United States Patent Application Publication US 2024/0066114 A1 - sequence listing, part 19

SEQ ID NO: 23665 - RNA, 4191 nt, Artificial Sequence
  SARS-CoV-2/Wuhan/WIV05/2019__EPI_ISL_402128 spike protein mRNA gc (1-1273)
aggagagggcgcuuggcuugcaaggacccugagcugcggcauugaagcacacccaacccaacucgacugaagucagccucacugaaccggaucugagaaucuucucucucugggcuugccagggcucuccgaaccuagcuagcauccucuucaauuccaacuagaaagcuuaccauguucguguuccuggugcugcugccccuggugagcagccagugcgugaaccugaccacccggacccagcugccaccagccuacaccaacagcuucacccggggcgucuacuaccccgacaagguguuccggagcagcguccugcacagcacccaggaccuguuccugcccuucuucagcaacgugaccugguuccacgccauccacgugagcggcaccaacggcaccaagcgguucgacaaccccgugcugcccuucaacgacggcguguacuucgccagcaccgagaagagcaacaucauccggggcuggaucuucggcaccacccuggacagcaagacccagagccugcugaucgugaauaacgccaccaacguggugaucaaggugugcgaguuccaguucugcaacgaccccuuccugggcguguacuaccacaagaacaacaagagcuggauggagagcgaguuccggguguacagcagcgccaacaacugcaccuucgaguacgugagccagcccuuccugauggaccuggagggcaagcagggcaacuucaagaaccugcgggaguucguguucaagaacaucgacggcuacuucaagaucuacagcaagcacaccccaaucaaccuggugcgggaucugccccagggcuucucagcccuggagccccugguggaccugcccaucggcaucaacaucacccgguuccagacccugcuggcccugcaccggagcuaccugaccccaggcgacagcagcagcggguggacagcaggcgcggcugcuuacuacgugggcuaccugcagccccggaccuuccugcugaaguacaacgagaacggcaccaucaccgacgccguggacugcgcccuggacccucugagcgagaccaagugcacccugaagagcuucaccguggagaagggcaucuaccagaccagcaacuuccgggugcagcccaccgagagcaucgugcgguuccccaacaucaccaaccugugccccuucggcgagguguucaacgccacccgguucgccagcguguacgccuggaaccggaagcggaucagcaacugcguggccgacuacagcgugcuguacaacagcgccagcuucagcaccuucaagugcuacggcgugagccccaccaagcugaacgaccugugcuucaccaacguguacgccgacagcuucgugauccguggcgacgaggugcggcagaucgcacccggccagacaggcaagaucgccgacuacaacuacaagcugcccgacgacuucaccggcugcgugaucgccuggaacagcaacaaccucgacagcaaggugggcggcaacuacaacuaccuguaccggcuguuccggaagagcaaccugaagcccuucgagcgggacaucagcaccgagaucuaccaagccggcuccaccccuugcaacggcguggagggcuucaacugcuacuucccucugcagagcuacggcuuccagcccaccaacggcgugggcuaccagcccuaccgggugguggugcugagcuucgagcugcugcacgccccagccaccguguguggccccaagaagagcaccaaccuggugaagaacaagugcgugaacuucaacuucaacggccuuaccggcaccggcgugcugaccgagagcaacaagaaauuccugcccuuucagcaguucggccgggacaucgccgacaccaccgacgcugugcgggauccccagacccuggagauccuggacaucaccccuugcagcuucggcggcgugagcgugaucaccccaggcaccaacaccagcaaccagguggccgugcuguaccaggacgugaacugcaccgaggugcccguggccauccacgccgaccagcugacacccaccuggcgggucuacagcaccggcagcaacguguuccagacccgggccgguugccugaucggcgccgagcacgugaacaacagcuacgagugcgacauccccaucggcgccggcaucugugccagcuaccagacccagaccaauucaccccggagggcaaggagcguggccagccagagcaucaucgccuacaccaugagccugggcgccgagaacagcguggccuacagcaacaacagcaucgccauccccaccaacuucaccaucagcgugaccaccgagauucugcccgugagcaugaccaagaccagcguggacugcaccauguacaucugcggcgacagcaccgagugcagcaaccugcugcugcaguacggcagcuucugcacccagcugaaccgggcccugaccggcaucgccguggagcaggacaagaacacccaggagguguucgcccaggugaagcagaucuacaagaccccucccaucaaggacuucggcggcuucaacuucagccagauccugcccgaccccagcaagcccagcaagcggagcuucaucgaggaccugcuguucaacaaggugacccuagccgacgccggcuucaucaagcaguacggcgacugccucggcgacauagccgcccgggaccugaucugcgcccagaaguucaacggccugaccgugcugccuccccugcugaccgacgagaugaucgcccaguacaccagcgcccuguuagccggaaccaucaccagcggcuggacuuucggcgcuggagccgcucugcagauccccuucgccaugcagauggccuaccgguucaacggcaucggcgugacccagaacgugcuguacgagaaccagaagcugaucgccaaccaguucaacagcgccaucggcaagauccaggacagccugagcagcaccgcuagcgcccugggcaagcugcaggacguggugaaccagaacgcccaggcccugaacacccuggugaagcagcugagcagcaacuucggcgccaucagcagcgugcugaacgacauccugagccggcuggacaaggucgaggccgaggugcagaucgaccggcugaucacuggccggcugcagagccugcagaccuacgugacccagcagcugauccgggccgccgagauucgggccagcgccaaccuggccgccaccaagaugagcgagugcgugcugggccagagcaagcggguggacuucugcggcaagggcuaccaccugaugagcuuuccccagagcgcaccccacggagugguguuccugcacgugaccuacgugcccgcccaggagaagaacuucaccaccgccccagccaucugccacgacggcaaggcccacuuuccccgggagggcguguucgugagcaacggcacccacugguucgugacccagcggaacuucuacgagccccagaucaucaccaccgacaacaccuucgugagcggcaacugcgacguggugaucggcaucgugaacaacaccguguacgauccccugcagcccgagcuggacagcuucaaggaggagcuggacaaguacuucaagaaucacaccagccccgacguggaccugggcgacaucagcggcaucaacgccagcguggugaacauccagaaggagaucgaucggcugaacgagguggccaagaaccugaacgagagccugaucgaccugcaggagcugggcaaguacgagcaguacaucaaguggcccugguacaucuggcugggcuucaucgccggccugaucgccaucgugauggugaccaucaugcugugcugcaugaccagcugcugcagcugccugaagggcuguugcagcugcggcagcugcugcaaguucgacgaggacgacagcgagcccgugcugaagggcgugaagcugcacuacaccugaggacuagucccuguucccagagcccacuuuuuuuucuuuuuuugaaauaaaauagccugucuuucagaucucaaaggcucuuuucagagccaccaaaaaaaaaaaaaaaaaaaaaaaaaaaaaaaaaaaaaaaaaaaaaaaaaaaaaaaaaaaaaaaaaaaaaaaaaaaaaaaaaaaaaaaaaaaaaaaaaaaaa

SEQ ID NO: 23666 - RNA, 4191 nt, Artificial Sequence
  SARS-CoV-2/Wuhan/WIV05/2019__EPI_ISL_402128 spike protein mRNA gc (1-1273)(D614G)
aggagagggcgcuuggcuugcaaggacccugagcugcggcauugaagcacacccaacccaacucgacugaagucagccucacugaaccggaucugagaaucuucucucucugggcuugccagggcucuccgaaccuagcuagcauccucuucaauuccaacuagaaagcuuaccauguucguguuccuggugcugcugccccuggugagcagccagugcgugaaccugaccacccggacccagcugccaccagccuacaccaacagcuucacccggggcgucuacuaccccgacaagguguuccggagcagcguccugcacagcacccaggaccuguuccugcccuucuucagcaacgugaccugguuccacgccauccacgugagcggcaccaacggcaccaagcgguucgacaaccccgugcugcccuucaacgacggcguguacuucgccagcaccgagaagagcaacaucauccggggcuggaucuucggcaccacccuggacagcaagacccagagccugcugaucgugaauaacgccaccaacguggugaucaaggugugcgaguuccaguucugcaacgaccccuuccugggcguguacuaccacaagaacaacaagagcuggauggagagcgaguuccggguguacagcagcgccaacaacugcaccuucgaguacgugagccagcccuuccugauggaccuggagggcaagcagggcaacuucaagaaccugcgggaguucguguucaagaacaucgacggcuacuucaagaucuacagcaagcacaccccaaucaaccuggugcgggaucugccccagggcuucucagcccuggagccccugguggaccugcccaucggcaucaacaucacccgguuccagacccugcuggcccugcaccggagcuaccugaccccaggcgacagcagcagcggguggacagcaggcgcggcugcuuacuacgugggcuaccugcagccccggaccuuccugcugaaguacaacgagaacggcaccaucaccgacgccguggacugcgcccuggacccucugagcgagaccaagugcacccugaagagcuucaccguggagaagggcaucuaccagaccagcaacuuccgggugcagcccaccgagagcaucgugcgguuccccaacaucaccaaccugugccccuucggcgagguguucaacgccacccgguucgccagcguguacgccuggaaccggaagcggaucagcaacugcguggccgacuacagcgugcuguacaacagcgccagcuucagcaccuucaagugcuacggcgugagccccaccaagcugaacgaccugugcuucaccaacguguacgccgacagcuucgugauccguggcgacgaggugcggcagaucgcacccggccagacaggcaagaucgccgacuacaacuacaagcugcccgacgacuucaccggcugcgugaucgccuggaacagcaacaaccucgacagcaaggugggcggcaacuacaacuaccuguaccggcuguuccggaagagcaaccugaagcccuucgagcgggacaucagcaccgagaucuaccaagccggcuccaccccuugcaacggcguggagggcuucaacugcuacuucccucugcagagcuacggcuuccagcccaccaacggcgugggcuaccagcccuaccgggugguggugcugagcuucgagcugcugcacgccccagccaccguguguggccccaagaagagcaccaaccuggugaagaacaagugcgugaacuucaacuucaacggccuuaccggcaccggcgugcugaccgagagcaacaagaaauuccugcccuuucagcaguucggccgggacaucgccgacaccaccgacgcugugcgggauccccagacccuggagauccuggacaucaccccuugcagcuucggcggcgugagcgugaucaccccaggcaccaacaccagcaaccagguggccgugcuguaccagggcgugaacugcaccgaggugcccguggccauccacgccgaccagcugacacccaccuggcgggucuacagcaccggcagcaacguguuccagacccgggccgguugccugaucggcgccgagcacgugaacaacagcuacgagugcgacauccccaucggcgccggcaucugugccagcuaccagacccagaccaauucaccccggagggcaaggagcguggccagccagagcaucaucgccuacaccaugagccugggcgccgagaacagcguggccuacagcaacaacagcaucgccauccccaccaacuucaccaucagcgugaccaccgagauucugcccgugagcaugaccaagaccagcguggacugcaccauguacaucugcggcgacagcaccgagugcagcaaccugcugcugcaguacggcagcuucugcacccagcugaaccgggcccugaccggcaucgccguggagcaggacaagaacacccaggagguguucgcccaggugaagcagaucuacaagaccccucccaucaaggacuucggcggcuucaacuucagccagauccugcccgaccccagcaagcccagcaagcggagcuucaucgaggaccugcuguucaacaaggugacccuagccgacgccggcuucaucaagcaguacggcgacugccucggcgacauagccgcccgggaccugaucugcgcccagaaguucaacggccugaccgugcugccuccccugcugaccgacgagaugaucgcccaguacaccagcgcccuguuagccggaaccaucaccagcggcuggacuuucggcgcuggagccgcucugcagauccccuucgccaugcagauggccuaccgguucaacggcaucggcgugacccagaacgugcuguacgagaaccagaagcugaucgccaaccaguucaacagcgccaucggcaagauccaggacagccugagcagcaccgcuagcgcccugggcaagcugcaggacguggugaaccagaacgcccaggcccugaacacccuggugaagcagcugagcagcaacuucggcgccaucagcagcgugcugaacgacauccugagccggcuggacaaggucgaggccgaggugcagaucgaccggcugaucacuggccggcugcagagccugcagaccuacgugacccagcagcugauccgggccgccgagauucgggccagcgccaaccuggccgccaccaagaugagcgagugcgugcugggccagagcaagcggguggacuucugcggcaagggcuaccaccugaugagcuuuccccagagcgcaccccacggagugguguuccugcacgugaccuacgugcccgcccaggagaagaacuucaccaccgccccagccaucugccacgacggcaaggcccacuuuccccgggagggcguguucgugagcaacggcacccacugguucgugacccagcggaacuucuacgagccccagaucaucaccaccgacaacaccuucgugagcggcaacugcgacguggugaucggcaucgugaacaacaccguguacgauccccugcagcccgagcuggacagcuucaaggaggagcuggacaaguacuucaagaaucacaccagccccgacguggaccugggcgacaucagcggcaucaacgccagcguggugaacauccagaaggagaucgaucggcugaacgagguggccaagaaccugaacgagagccugaucgaccugcaggagcugggcaaguacgagcaguacaucaaguggcccugguacaucuggcugggcuucaucgccggccugaucgccaucgugauggugaccaucaugcugugcugcaugaccagcugcugcagcugccugaagggcuguugcagcugcggcagcugcugcaaguucgacgaggacgacagcgagcccgugcugaagggcgugaagcugcacuacaccugaggacuagucccuguucccagagcccacuuuuuuuucuuuuuuugaaauaaaauagccugucuuucagaucucaaaggcucuuuucagagccaccaaaaaaaaaaaaaaaaaaaaaaaaaaaaaaaaaaaaaaaaaaaaaaaaaaaaaaaaaaaaaaaaaaaaaaaaaaaaaaaaaaaaaaaaaaaaaaaaaaaaa

SEQ ID NO: 23667 - RNA, 4191 nt, Artificial Sequence
  SARS-CoV-2/Wuhan/WIV05/2019__EPI_ISL_402128 spike protein mRNA gc (1-1273)(A222V_D614G)
aggagagggcgcuuggcuugcaaggacccugagcugcggcauugaagcacacccaacccaacucgacugaagucagccucacugaaccggaucugagaaucuucucucucugggcuugccagggcucuccgaaccuagcuagcauccucuucaauuccaacuagaaagcuuaccauguucguguuccuggugcugcugccccuggugagcagccagugcgugaaccugaccacccggacccagcugccaccagccuacaccaacagcuucacccggggcgucuacuaccccgacaagguguuccggagcagcguccugcacagcacccaggaccuguuccugcccuucuucagcaacgugaccugguuccacgccauccacgugagcggcaccaacggcaccaagcgguucgacaaccccgugcugcccuucaacgacggcguguacuucgccagcaccgagaagagcaacaucauccggggcuggaucuucggcaccacccuggacagcaagacccagagccugcugaucgugaauaacgccaccaacguggugaucaaggugugcgaguuccaguucugcaacgaccccuuccugggcguguacuaccacaagaacaacaagagcuggauggagagcgaguuccggguguacagcagcgccaacaacugcaccuucgaguacgugagccagcccuuccugauggaccuggagggcaagcagggcaacuucaagaaccugcgggaguucguguucaagaacaucgacggcuacuucaagaucuacagcaagcacaccccaaucaaccuggugcgggaucugccccagggcuucucagugcuggagccccugguggaccugcccaucggcaucaacaucacccgguuccagacccugcuggcccugcaccggagcuaccugaccccaggcgacagcagcagcggguggacagcaggcgcggcugcuuacuacgugggcuaccugcagccccggaccuuccugcugaaguacaacgagaacggcaccaucaccgacgccguggacugcgcccuggacccucugagcgagaccaagugcacccugaagagcuucaccguggagaagggcaucuaccagaccagcaacuuccgggugcagcccaccgagagcaucgugcgguuccccaacaucaccaaccugugccccuucggcgagguguucaacgccacccgguucgccagcguguacgccuggaaccggaagcggaucagcaacugcguggccgacuacagcgugcuguacaacagcgccagcuucagcaccuucaagugcuacggcgugagccccaccaagcugaacgaccugugcuucaccaacguguacgccgacagcuucgugauccguggcgacgaggugcggcagaucgcacccggccagacaggcaagaucgccgacuacaacuacaagcugcccgacgacuucaccggcugcgugaucgccuggaacagcaacaaccucgacagcaaggugggcggcaacuacaacuaccuguaccggcuguuccggaagagcaaccugaagcccuucgagcgggacaucagcaccgagaucuaccaagccggcuccaccccuugcaacggcguggagggcuucaacugcuacuucccucugcagagcuacggcuuccagcccaccaacggcgugggcuaccagcccuaccgggugguggugcugagcuucgagcugcugcacgccccagccaccguguguggccccaagaagagcaccaaccuggugaagaacaagugcgugaacuucaacuucaacggccuuaccggcaccggcgugcugaccgagagcaacaagaaauuccugcccuuucagcaguucggccgggacaucgccgacaccaccgacgcugugcgggauccccagacccuggagauccuggacaucaccccuugcagcuucggcggcgugagcgugaucaccccaggcaccaacaccagcaaccagguggccgugcuguaccagggcgugaacugcaccgaggugcccguggccauccacgccgaccagcugacacccaccuggcgggucuacagcaccggcagcaacguguuccagacccgggccgguugccugaucggcgccgagcacgugaacaacagcuacgagugcgacauccccaucggcgccggcaucugugccagcuaccagacccagaccaauucaccccggagggcaaggagcguggccagccagagcaucaucgccuacaccaugagccugggcgccgagaacagcguggccuacagcaacaacagcaucgccauccccaccaacuucaccaucagcgugaccaccgagauucugcccgugagcaugaccaagaccagcguggacugcaccauguacaucugcggcgacagcaccgagugcagcaaccugcugcugcaguacggcagcuucugcacccagcugaaccgggcccugaccggcaucgccguggagcaggacaagaacacccaggagguguucgcccaggugaagcagaucuacaagaccccucccaucaaggacuucggcggcuucaacuucagccagauccugcccgaccccagcaagcccagcaagcggagcuucaucgaggaccugcuguucaacaaggugacccuagccgacgccggcuucaucaagcaguacggcgacugccucggcgacauagccgcccgggaccugaucugcgcccagaaguucaacggccugaccgugcugccuccccugcugaccgacgagaugaucgcccaguacaccagcgcccuguuagccggaaccaucaccagcggcuggacuuucggcgcuggagccgcucugcagauccccuucgccaugcagauggccuaccgguucaacggcaucggcgugacccagaacgugcuguacgagaaccagaagcugaucgccaaccaguucaacagcgccaucggcaagauccaggacagccugagcagcaccgcuagcgcccugggcaagcugcaggacguggugaaccagaacgcccaggcccugaacacccuggugaagcagcugagcagcaacuucggcgccaucagcagcgugcugaacgacauccugagccggcuggacaaggucgaggccgaggugcagaucgaccggcugaucacuggccggcugcagagccugcagaccuacgugacccagcagcugauccgggccgccgagauucgggccagcgccaaccuggccgccaccaagaugagcgagugcgugcugggccagagcaagcggguggacuucugcggcaagggcuaccaccugaugagcuuuccccagagcgcaccccacggagugguguuccugcacgugaccuacgugcccgcccaggagaagaacuucaccaccgccccagccaucugccacgacggcaaggcccacuuuccccgggagggcguguucgugagcaacggcacccacugguucgugacccagcggaacuucuacgagccccagaucaucaccaccgacaacaccuucgugagcggcaacugcgacguggugaucggcaucgugaacaacaccguguacgauccccugcagcccgagcuggacagcuucaaggaggagcuggacaaguacuucaagaaucacaccagccccgacguggaccugggcgacaucagcggcaucaacgccagcguggugaacauccagaaggagaucgaucggcugaacgagguggccaagaaccugaacgagagccugaucgaccugcaggagcugggcaaguacgagcaguacaucaaguggcccugguacaucuggcugggcuucaucgccggccugaucgccaucgugauggugaccaucaugcugugcugcaugaccagcugcugcagcugccugaagggcuguugcagcugcggcagcugcugcaaguucgacgaggacgacagcgagcccgugcugaagggcgugaagcugcacuacaccugaggacuagucccuguucccagagcccacuuuuuuuucuuuuuuugaaauaaaauagccugucuuucagaucucaaaggcucuuuucagagccaccaaaaaaaaaaaaaaaaaaaaaaaaaaaaaaaaaaaaaaaaaaaaaaaaaaaaaaaaaaaaaaaaaaaaaaaaaaaaaaaaaaaaaaaaaaaaaaaaaaaaa

SEQ ID NO: 23668 - RNA, 4191 nt, Artificial Sequence
  SARS-CoV-2/Wuhan/WIV05/2019__EPI_ISL_402128 spike protein mRNA gc (1-1273)(N439K_D614G)
aggagagggcgcuuggcuugcaaggacccugagcugcggcauugaagcacacccaacccaacucgacugaagucagccucacugaaccggaucugagaaucuucucucucugggcuugccagggcucuccgaaccuagcuagcauccucuucaauuccaacuagaaagcuuaccauguucguguuccuggugcugcugccccuggugagcagccagugcgugaaccugaccacccggacccagcugccaccagccuacaccaacagcuucacccggggcgucuacuaccccgacaagguguuccggagcagcguccugcacagcacccaggaccuguuccugcccuucuucagcaacgugaccugguuccacgccauccacgugagcggcaccaacggcaccaagcgguucgacaaccccgugcugcccuucaacgacggcguguacuucgccagcaccgagaagagcaacaucauccggggcuggaucuucggcaccacccuggacagcaagacccagagccugcugaucgugaauaacgccaccaacguggugaucaaggugugcgaguuccaguucugcaacgaccccuuccugggcguguacuaccacaagaacaacaagagcuggauggagagcgaguuccggguguacagcagcgccaacaacugcaccuucgaguacgugagccagcccuuccugauggaccuggagggcaagcagggcaacuucaagaaccugcgggaguucguguucaagaacaucgacggcuacuucaagaucuacagcaagcacaccccaaucaaccuggugcgggaucugccccagggcuucucagcccuggagccccugguggaccugcccaucggcaucaacaucacccgguuccagacccugcuggcccugcaccggagcuaccugaccccaggcgacagcagcagcggguggacagcaggcgcggcugcuuacuacgugggcuaccugcagccccggaccuuccugcugaaguacaacgagaacggcaccaucaccgacgccguggacugcgcccuggacccucugagcgagaccaagugcacccugaagagcuucaccguggagaagggcaucuaccagaccagcaacuuccgggugcagcccaccgagagcaucgugcgguuccccaacaucaccaaccugugccccuucggcgagguguucaacgccacccgguucgccagcguguacgccuggaaccggaagcggaucagcaacugcguggccgacuacagcgugcuguacaacagcgccagcuucagcaccuucaagugcuacggcgugagccccaccaagcugaacgaccugugcuucaccaacguguacgccgacagcuucgugauccguggcgacgaggugcggcagaucgcacccggccagacaggcaagaucgccgacuacaacuacaagcugcccgacgacuucaccggcugcgugaucgccuggaacagcaagaaccucgacagcaaggugggcggcaacuacaacuaccuguaccggcuguuccggaagagcaaccugaagcccuucgagcgggacaucagcaccgagaucuaccaagccggcuccaccccuugcaacggcguggagggcuucaacugcuacuucccucugcagagcuacggcuuccagcccaccaacggcgugggcuaccagcccuaccgggugguggugcugagcuucgagcugcugcacgccccagccaccguguguggccccaagaagagcaccaaccuggugaagaacaagugcgugaacuucaacuucaacggccuuaccggcaccggcgugcugaccgagagcaacaagaaauuccugcccuuucagcaguucggccgggacaucgccgacaccaccgacgcugugcgggauccccagacccuggagauccuggacaucaccccuugcagcuucggcggcgugagcgugaucaccccaggcaccaacaccagcaaccagguggccgugcuguaccagggcgugaacugcaccgaggugcccguggccauccacgccgaccagcugacacccaccuggcgggucuacagcaccggcagcaacguguuccagacccgggccgguugccugaucggcgccgagcacgugaacaacagcuacgagugcgacauccccaucggcgccggcaucugugccagcuaccagacccagaccaauucaccccggagggcaaggagcguggccagccagagcaucaucgccuacaccaugagccugggcgccgagaacagcguggccuacagcaacaacagcaucgccauccccaccaacuucaccaucagcgugaccaccgagauucugcccgugagcaugaccaagaccagcguggacugcaccauguacaucugcggcgacagcaccgagugcagcaaccugcugcugcaguacggcagcuucugcacccagcugaaccgggcccugaccggcaucgccguggagcaggacaagaacacccaggagguguucgcccaggugaagcagaucuacaagaccccucccaucaaggacuucggcggcuucaacuucagccagauccugcccgaccccagcaagcccagcaagcggagcuucaucgaggaccugcuguucaacaaggugacccuagccgacgccggcuucaucaagcaguacggcgacugccucggcgacauagccgcccgggaccugaucugcgcccagaaguucaacggccugaccgugcugccuccccugcugaccgacgagaugaucgcccaguacaccagcgcccuguuagccggaaccaucaccagcggcuggacuuucggcgcuggagccgcucugcagauccccuucgccaugcagauggccuaccgguucaacggcaucggcgugacccagaacgugcuguacgagaaccagaagcugaucgccaaccaguucaacagcgccaucggcaagauccaggacagccugagcagcaccgcuagcgcccugggcaagcugcaggacguggugaaccagaacgcccaggcccugaacacccuggugaagcagcugagcagcaacuucggcgccaucagcagcgugcugaacgacauccugagccggcuggacaaggucgaggccgaggugcagaucgaccggcugaucacuggccggcugcagagccugcagaccuacgugacccagcagcugauccgggccgccgagauucgggccagcgccaaccuggccgccaccaagaugagcgagugcgugcugggccagagcaagcggguggacuucugcggcaagggcuaccaccugaugagcuuuccccagagcgcaccccacggagugguguuccugcacgugaccuacgugcccgcccaggagaagaacuucaccaccgccccagccaucugccacgacggcaaggcccacuuuccccgggagggcguguucgugagcaacggcacccacugguucgugacccagcggaacuucuacgagccccagaucaucaccaccgacaacaccuucgugagcggcaacugcgacguggugaucggcaucgugaacaacaccguguacgauccccugcagcccgagcuggacagcuucaaggaggagcuggacaaguacuucaagaaucacaccagccccgacguggaccugggcgacaucagcggcaucaacgccagcguggugaacauccagaaggagaucgaucggcugaacgagguggccaagaaccugaacgagagccugaucgaccugcaggagcugggcaaguacgagcaguacaucaaguggcccugguacaucuggcugggcuucaucgccggccugaucgccaucgugauggugaccaucaugcugugcugcaugaccagcugcugcagcugccugaagggcuguugcagcugcggcagcugcugcaaguucgacgaggacgacagcgagcccgugcugaagggcgugaagcugcacuacaccugaggacuagucccuguucccagagcccacuuuuuuuucuuuuuuugaaauaaaauagccugucuuucagaucucaaaggcucuuuucagagccaccaaaaaaaaaaaaaaaaaaaaaaaaaaaaaaaaaaaaaaaaaaaaaaaaaaaaaaaaaaaaaaaaaaaaaaaaaaaaaaaaaaaaaaaaaaaaaaaaaaaaa

SEQ ID NO: 23669 - RNA, 4191 nt, Artificial Sequence
  SARS-CoV-2/Wuhan/WIV05/2019__EPI_ISL_402128 spike protein mRNA gc (1-1273)(S477N_D614G)
aggagagggcgcuuggcuugcaaggacccugagcugcggcauugaagcacacccaacccaacucgacugaagucagccucacugaaccggaucugagaaucuucucucucugggcuugccagggcucuccgaaccuagcuagcauccucuucaauuccaacuagaaagcuuaccauguucguguuccuggugcugcugccccuggugagcagccagugcgugaaccugaccacccggacccagcugccaccagccuacaccaacagcuucacccggggcgucuacuaccccgacaagguguuccggagcagcguccugcacagcacccaggaccuguuccugcccuucuucagcaacgugaccugguuccacgccauccacgugagcggcaccaacggcaccaagcgguucgacaaccccgugcugcccuucaacgacggcguguacuucgccagcaccgagaagagcaacaucauccggggcuggaucuucggcaccacccuggacagcaagacccagagccugcugaucgugaauaacgccaccaacguggugaucaaggugugcgaguuccaguucugcaacgaccccuuccugggcguguacuaccacaagaacaacaagagcuggauggagagcgaguuccggguguacagcagcgccaacaacugcaccuucgaguacgugagccagcccuuccugauggaccuggagggcaagcagggcaacuucaagaaccugcgggaguucguguucaagaacaucgacggcuacuucaagaucuacagcaagcacaccccaaucaaccuggugcgggaucugccccagggcuucucagcccuggagccccugguggaccugcccaucggcaucaacaucacccgguuccagacccugcuggcccugcaccggagcuaccugaccccaggcgacagcagcagcggguggacagcaggcgcggcugcuuacuacgugggcuaccugcagccccggaccuuccugcugaaguacaacgagaacggcaccaucaccgacgccguggacugcgcccuggacccucugagcgagaccaagugcacccugaagagcuucaccguggagaagggcaucuaccagaccagcaacuuccgggugcagcccaccgagagcaucgugcgguuccccaacaucaccaaccugugccccuucggcgagguguucaacgccacccgguucgccagcguguacgccuggaaccggaagcggaucagcaacugcguggccgacuacagcgugcuguacaacagcgccagcuucagcaccuucaagugcuacggcgugagccccaccaagcugaacgaccugugcuucaccaacguguacgccgacagcuucgugauccguggcgacgaggugcggcagaucgcacccggccagacaggcaagaucgccgacuacaacuacaagcugcccgacgacuucaccggcugcgugaucgccuggaacagcaacaaccucgacagcaaggugggcggcaacuacaacuaccuguaccggcuguuccggaagagcaaccugaagcccuucgagcgggacaucagcaccgagaucuaccaagccggcaacaccccuugcaacggcguggagggcuucaacugcuacuucccucugcagagcuacggcuuccagcccaccaacggcgugggcuaccagcccuaccgggugguggugcugagcuucgagcugcugcacgccccagccaccguguguggccccaagaagagcaccaaccuggugaagaacaagugcgugaacuucaacuucaacggccuuaccggcaccggcgugcugaccgagagcaacaagaaauuccugcccuuucagcaguucggccgggacaucgccgacaccaccgacgcugugcgggauccccagacccuggagauccuggacaucaccccuugcagcuucggcggcgugagcgugaucaccccaggcaccaacaccagcaaccagguggccgugcuguaccagggcgugaacugcaccgaggugcccguggccauccacgccgaccagcugacacccaccuggcgggucuacagcaccggcagcaacguguuccagacccgggccgguugccugaucggcgccgagcacgugaacaacagcuacgagugcgacauccccaucggcgccggcaucugugccagcuaccagacccagaccaauucaccccggagggcaaggagcguggccagccagagcaucaucgccuacaccaugagccugggcgccgagaacagcguggccuacagcaacaacagcaucgccauccccaccaacuucaccaucagcgugaccaccgagauucugcccgugagcaugaccaagaccagcguggacugcaccauguacaucugcggcgacagcaccgagugcagcaaccugcugcugcaguacggcagcuucugcacccagcugaaccgggcccugaccggcaucgccguggagcaggacaagaacacccaggagguguucgcccaggugaagcagaucuacaagaccccucccaucaaggacuucggcggcuucaacuucagccagauccugcccgaccccagcaagcccagcaagcggagcuucaucgaggaccugcuguucaacaaggugacccuagccgacgccggcuucaucaagcaguacggcgacugccucggcgacauagccgcccgggaccugaucugcgcccagaaguucaacggccugaccgugcugccuccccugcugaccgacgagaugaucgcccaguacaccagcgcccuguuagccggaaccaucaccagcggcuggacuuucggcgcuggagccgcucugcagauccccuucgccaugcagauggccuaccgguucaacggcaucggcgugacccagaacgugcuguacgagaaccagaagcugaucgccaaccaguucaacagcgccaucggcaagauccaggacagccugagcagcaccgcuagcgcccugggcaagcugcaggacguggugaaccagaacgcccaggcccugaacacccuggugaagcagcugagcagcaacuucggcgccaucagcagcgugcugaacgacauccugagccggcuggacaaggucgaggccgaggugcagaucgaccggcugaucacuggccggcugcagagccugcagaccuacgugacccagcagcugauccgggccgccgagauucgggccagcgccaaccuggccgccaccaagaugagcgagugcgugcugggccagagcaagcggguggacuucugcggcaagggcuaccaccugaugagcuuuccccagagcgcaccccacggagugguguuccugcacgugaccuacgugcccgcccaggagaagaacuucaccaccgccccagccaucugccacgacggcaaggcccacuuuccccgggagggcguguucgugagcaacggcacccacugguucgugacccagcggaacuucuacgagccccagaucaucaccaccgacaacaccuucgugagcggcaacugcgacguggugaucggcaucgugaacaacaccguguacgauccccugcagcccgagcuggacagcuucaaggaggagcuggacaaguacuucaagaaucacaccagccccgacguggaccugggcgacaucagcggcaucaacgccagcguggugaacauccagaaggagaucgaucggcugaacgagguggccaagaaccugaacgagagccugaucgaccugcaggagcugggcaaguacgagcaguacaucaaguggcccugguacaucuggcugggcuucaucgccggccugaucgccaucgugauggugaccaucaugcugugcugcaugaccagcugcugcagcugccugaagggcuguugcagcugcggcagcugcugcaaguucgacgaggacgacagcgagcccgugcugaagggcgugaagcugcacuacaccugaggacuagucccuguucccagagcccacuuuuuuuucuuuuuuugaaauaaaauagccugucuuucagaucucaaaggcucuuuucagagccaccaaaaaaaaaaaaaaaaaaaaaaaaaaaaaaaaaaaaaaaaaaaaaaaaaaaaaaaaaaaaaaaaaaaaaaaaaaaaaaaaaaaaaaaaaaaaaaaaaaaaa

SEQ ID NO: 23670 - RNA, 4191 nt, Artificial Sequence
  SARS-CoV-2/Wuhan/WIV05/2019__EPI_ISL_402128 spike protein mRNA gc (1-1273)(N501Y_D614G)
aggagagggcgcuuggcuugcaaggacccugagcugcggcauugaagcacacccaacccaacucgacugaagucagccucacugaaccggaucugagaaucuucucucucugggcuugccagggcucuccgaaccuagcuagcauccucuucaauuccaacuagaaagcuuaccauguucguguuccuggugcugcugccccuggugagcagccagugcgugaaccugaccacccggacccagcugccaccagccuacaccaacagcuucacccggggcgucuacuaccccgacaagguguuccggagcagcguccugcacagcacccaggaccuguuccugcccuucuucagcaacgugaccugguuccacgccauccacgugagcggcaccaacggcaccaagcgguucgacaaccccgugcugcccuucaacgacggcguguacuucgccagcaccgagaagagcaacaucauccggggcuggaucuucggcaccacccuggacagcaagacccagagccugcugaucgugaauaacgccaccaacguggugaucaaggugugcgaguuccaguucugcaacgaccccuuccugggcguguacuaccacaagaacaacaagagcuggauggagagcgaguuccggguguacagcagcgccaacaacugcaccuucgaguacgugagccagcccuuccugauggaccuggagggcaagcagggcaacuucaagaaccugcgggaguucguguucaagaacaucgacggcuacuucaagaucuacagcaagcacaccccaaucaaccuggugcgggaucugccccagggcuucucagcccuggagccccugguggaccugcccaucggcaucaacaucacccgguuccagacccugcuggcccugcaccggagcuaccugaccccaggcgacagcagcagcggguggacagcaggcgcggcugcuuacuacgugggcuaccugcagccccggaccuuccugcugaaguacaacgagaacggcaccaucaccgacgccguggacugcgcccuggacccucugagcgagaccaagugcacccugaagagcuucaccguggagaagggcaucuaccagaccagcaacuuccgggugcagcccaccgagagcaucgugcgguuccccaacaucaccaaccugugccccuucggcgagguguucaacgccacccgguucgccagcguguacgccuggaaccggaagcggaucagcaacugcguggccgacuacagcgugcuguacaacagcgccagcuucagcaccuucaagugcuacggcgugagccccaccaagcugaacgaccugugcuucaccaacguguacgccgacagcuucgugauccguggcgacgaggugcggcagaucgcacccggccagacaggcaagaucgccgacuacaacuacaagcugcccgacgacuucaccggcugcgugaucgccuggaacagcaacaaccucgacagcaaggugggcggcaacuacaacuaccuguaccggcuguuccggaagagcaaccugaagcccuucgagcgggacaucagcaccgagaucuaccaagccggcuccaccccuugcaacggcguggagggcuucaacugcuacuucccucugcagagcuacggcuuccagcccaccuacggcgugggcuaccagcccuaccgggugguggugcugagcuucgagcugcugcacgccccagccaccguguguggccccaagaagagcaccaaccuggugaagaacaagugcgugaacuucaacuucaacggccuuaccggcaccggcgugcugaccgagagcaacaagaaauuccugcccuuucagcaguucggccgggacaucgccgacaccaccgacgcugugcgggauccccagacccuggagauccuggacaucaccccuugcagcuucggcggcgugagcgugaucaccccaggcaccaacaccagcaaccagguggccgugcuguaccagggcgugaacugcaccgaggugcccguggccauccacgccgaccagcugacacccaccuggcgggucuacagcaccggcagcaacguguuccagacccgggccgguugccugaucggcgccgagcacgugaacaacagcuacgagugcgacauccccaucggcgccggcaucugugccagcuaccagacccagaccaauucaccccggagggcaaggagcguggccagccagagcaucaucgccuacaccaugagccugggcgccgagaacagcguggccuacagcaacaacagcaucgccauccccaccaacuucaccaucagcgugaccaccgagauucugcccgugagcaugaccaagaccagcguggacugcaccauguacaucugcggcgacagcaccgagugcagcaaccugcugcugcaguacggcagcuucugcacccagcugaaccgggcccugaccggcaucgccguggagcaggacaagaacacccaggagguguucgcccaggugaagcagaucuacaagaccccucccaucaaggacuucggcggcuucaacuucagccagauccugcccgaccccagcaagcccagcaagcggagcuucaucgaggaccugcuguucaacaaggugacccuagccgacgccggcuucaucaagcaguacggcgacugccucggcgacauagccgcccgggaccugaucugcgcccagaaguucaacggccugaccgugcugccuccccugcugaccgacgagaugaucgcccaguacaccagcgcccuguuagccggaaccaucaccagcggcuggacuuucggcgcuggagccgcucugcagauccccuucgccaugcagauggccuaccgguucaacggcaucggcgugacccagaacgugcuguacgagaaccagaagcugaucgccaaccaguucaacagcgccaucggcaagauccaggacagccugagcagcaccgcuagcgcccugggcaagcugcaggacguggugaaccagaacgcccaggcccugaacacccuggugaagcagcugagcagcaacuucggcgccaucagcagcgugcugaacgacauccugagccggcuggacaaggucgaggccgaggugcagaucgaccggcugaucacuggccggcugcagagccugcagaccuacgugacccagcagcugauccgggccgccgagauucgggccagcgccaaccuggccgccaccaagaugagcgagugcgugcugggccagagcaagcggguggacuucugcggcaagggcuaccaccugaugagcuuuccccagagcgcaccccacggagugguguuccugcacgugaccuacgugcccgcccaggagaagaacuucaccaccgccccagccaucugccacgacggcaaggcccacuuuccccgggagggcguguucgugagcaacggcacccacugguucgugacccagcggaacuucuacgagccccagaucaucaccaccgacaacaccuucgugagcggcaacugcgacguggugaucggcaucgugaacaacaccguguacgauccccugcagcccgagcuggacagcuucaaggaggagcuggacaaguacuucaagaaucacaccagccccgacguggaccugggcgacaucagcggcaucaacgccagcguggugaacauccagaaggagaucgaucggcugaacgagguggccaagaaccugaacgagagccugaucgaccugcaggagcugggcaaguacgagcaguacaucaaguggcccugguacaucuggcugggcuucaucgccggccugaucgccaucgugauggugaccaucaugcugugcugcaugaccagcugcugcagcugccugaagggcuguugcagcugcggcagcugcugcaaguucgacgaggacgacagcgagcccgugcugaagggcgugaagcugcacuacaccugaggacuagucccuguucccagagcccacuuuuuuuucuuuuuuugaaauaaaauagccugucuuucagaucucaaaggcucuuuucagagccaccaaaaaaaaaaaaaaaaaaaaaaaaaaaaaaaaaaaaaaaaaaaaaaaaaaaaaaaaaaaaaaaaaaaaaaaaaaaaaaaaaaaaaaaaaaaaaaaaaaaaa

SEQ ID NO: 23671 - RNA, 4185 nt, Artificial Sequence
  SARS-CoV-2/Wuhan/WIV05/2019__EPI_ISL_402128 spike protein mRNA gc (1-1273)(H69del_V70del_D614G)
aggagagggcgcuuggcuugcaaggacccugagcugcggcauugaagcacacccaacccaacucgacugaagucagccucacugaaccggaucugagaaucuucucucucugggcuugccagggcucuccgaaccuagcuagcauccucuucaauuccaacuagaaagcuuaccauguucguguuccuggugcugcugccccuggugagcagccagugcgugaaccugaccacccggacccagcugccaccagccuacaccaacagcuucacccggggcgucuacuaccccgacaagguguuccggagcagcguccugcacagcacccaggaccuguuccugcccuucuucagcaacgugaccugguuccacgccaucagcggcaccaacggcaccaagcgguucgacaaccccgugcugcccuucaacgacggcguguacuucgccagcaccgagaagagcaacaucauccggggcuggaucuucggcaccacccuggacagcaagacccagagccugcugaucgugaauaacgccaccaacguggugaucaaggugugcgaguuccaguucugcaacgaccccuuccugggcguguacuaccacaagaacaacaagagcuggauggagagcgaguuccggguguacagcagcgccaacaacugcaccuucgaguacgugagccagcccuuccugauggaccuggagggcaagcagggcaacuucaagaaccugcgggaguucguguucaagaacaucgacggcuacuucaagaucuacagcaagcacaccccaaucaaccuggugcgggaucugccccagggcuucucagcccuggagccccugguggaccugcccaucggcaucaacaucacccgguuccagacccugcuggcccugcaccggagcuaccugaccccaggcgacagcagcagcggguggacagcaggcgcggcugcuuacuacgugggcuaccugcagccccggaccuuccugcugaaguacaacgagaacggcaccaucaccgacgccguggacugcgcccuggacccucugagcgagaccaagugcacccugaagagcuucaccguggagaagggcaucuaccagaccagcaacuuccgggugcagcccaccgagagcaucgugcgguuccccaacaucaccaaccugugccccuucggcgagguguucaacgccacccgguucgccagcguguacgccuggaaccggaagcggaucagcaacugcguggccgacuacagcgugcuguacaacagcgccagcuucagcaccuucaagugcuacggcgugagccccaccaagcugaacgaccugugcuucaccaacguguacgccgacagcuucgugauccguggcgacgaggugcggcagaucgcacccggccagacaggcaagaucgccgacuacaacuacaagcugcccgacgacuucaccggcugcgugaucgccuggaacagcaacaaccucgacagcaaggugggcggcaacuacaacuaccuguaccggcuguuccggaagagcaaccugaagcccuucgagcgggacaucagcaccgagaucuaccaagccggcuccaccccuugcaacggcguggagggcuucaacugcuacuucccucugcagagcuacggcuuccagcccaccaacggcgugggcuaccagcccuaccgggugguggugcugagcuucgagcugcugcacgccccagccaccguguguggccccaagaagagcaccaaccuggugaagaacaagugcgugaacuucaacuucaacggccuuaccggcaccggcgugcugaccgagagcaacaagaaauuccugcccuuucagcaguucggccgggacaucgccgacaccaccgacgcugugcgggauccccagacccuggagauccuggacaucaccccuugcagcuucggcggcgugagcgugaucaccccaggcaccaacaccagcaaccagguggccgugcuguaccagggcgugaacugcaccgaggugcccguggccauccacgccgaccagcugacacccaccuggcgggucuacagcaccggcagcaacguguuccagacccgggccgguugccugaucggcgccgagcacgugaacaacagcuacgagugcgacauccccaucggcgccggcaucugugccagcuaccagacccagaccaauucaccccggagggcaaggagcguggccagccagagcaucaucgccuacaccaugagccugggcgccgagaacagcguggccuacagcaacaacagcaucgccauccccaccaacuucaccaucagcgugaccaccgagauucugcccgugagcaugaccaagaccagcguggacugcaccauguacaucugcggcgacagcaccgagugcagcaaccugcugcugcaguacggcagcuucugcacccagcugaaccgggcccugaccggcaucgccguggagcaggacaagaacacccaggagguguucgcccaggugaagcagaucuacaagaccccucccaucaaggacuucggcggcuucaacuucagccagauccugcccgaccccagcaagcccagcaagcggagcuucaucgaggaccugcuguucaacaaggugacccuagccgacgccggcuucaucaagcaguacggcgacugccucggcgacauagccgcccgggaccugaucugcgcccagaaguucaacggccugaccgugcugccuccccugcugaccgacgagaugaucgcccaguacaccagcgcccuguuagccggaaccaucaccagcggcuggacuuucggcgcuggagccgcucugcagauccccuucgccaugcagauggccuaccgguucaacggcaucggcgugacccagaacgugcuguacgagaaccagaagcugaucgccaaccaguucaacagcgccaucggcaagauccaggacagccugagcagcaccgcuagcgcccugggcaagcugcaggacguggugaaccagaacgcccaggcccugaacacccuggugaagcagcugagcagcaacuucggcgccaucagcagcgugcugaacgacauccugagccggcuggacaaggucgaggccgaggugcagaucgaccggcugaucacuggccggcugcagagccugcagaccuacgugacccagcagcugauccgggccgccgagauucgggccagcgccaaccuggccgccaccaagaugagcgagugcgugcugggccagagcaagcggguggacuucugcggcaagggcuaccaccugaugagcuuuccccagagcgcaccccacggagugguguuccugcacgugaccuacgugcccgcccaggagaagaacuucaccaccgccccagccaucugccacgacggcaaggcccacuuuccccgggagggcguguucgugagcaacggcacccacugguucgugacccagcggaacuucuacgagccccagaucaucaccaccgacaacaccuucgugagcggcaacugcgacguggugaucggcaucgugaacaacaccguguacgauccccugcagcccgagcuggacagcuucaaggaggagcuggacaaguacuucaagaaucacaccagccccgacguggaccugggcgacaucagcggcaucaacgccagcguggugaacauccagaaggagaucgaucggcugaacgagguggccaagaaccugaacgagagccugaucgaccugcaggagcugggcaaguacgagcaguacaucaaguggcccugguacaucuggcugggcuucaucgccggccugaucgccaucgugauggugaccaucaugcugugcugcaugaccagcugcugcagcugccugaagggcuguugcagcugcggcagcugcugcaaguucgacgaggacgacagcgagcccgugcugaagggcgugaagcugcacuacaccugaggacuagucccuguucccagagcccacuuuuuuuucuuuuuuugaaauaaaauagccugucuuucagaucucaaaggcucuuuucagagccaccaaaaaaaaaaaaaaaaaaaaaaaaaaaaaaaaaaaaaaaaaaaaaaaaaaaaaaaaaaaaaaaaaaaaaaaaaaaaaaaaaaaaaaaaaaaaaaaaaaaaa

SEQ ID NO: 23672 - RNA, 4191 nt, Artificial Sequence
  SARS-CoV-2/Wuhan/WIV05/2019__EPI_ISL_402128 spike protein mRNA gc (1-1273)(Y453F_D614G)
aggagagggcgcuuggcuugcaaggacccugagcugcggcauugaagcacacccaacccaacucgacugaagucagccucacugaaccggaucugagaaucuucucucucugggcuugccagggcucuccgaaccuagcuagcauccucuucaauuccaacuagaaagcuuaccauguucguguuccuggugcugcugccccuggugagcagccagugcgugaaccugaccacccggacccagcugccaccagccuacaccaacagcuucacccggggcgucuacuaccccgacaagguguuccggagcagcguccugcacagcacccaggaccuguuccugcccuucuucagcaacgugaccugguuccacgccauccacgugagcggcaccaacggcaccaagcgguucgacaaccccgugcugcccuucaacgacggcguguacuucgccagcaccgagaagagcaacaucauccggggcuggaucuucggcaccacccuggacagcaagacccagagccugcugaucgugaauaacgccaccaacguggugaucaaggugugcgaguuccaguucugcaacgaccccuuccugggcguguacuaccacaagaacaacaagagcuggauggagagcgaguuccggguguacagcagcgccaacaacugcaccuucgaguacgugagccagcccuuccugauggaccuggagggcaagcagggcaacuucaagaaccugcgggaguucguguucaagaacaucgacggcuacuucaagaucuacagcaagcacaccccaaucaaccuggugcgggaucugccccagggcuucucagcccuggagccccugguggaccugcccaucggcaucaacaucacccgguuccagacccugcuggcccugcaccggagcuaccugaccccaggcgacagcagcagcggguggacagcaggcgcggcugcuuacuacgugggcuaccugcagccccggaccuuccugcugaaguacaacgagaacggcaccaucaccgacgccguggacugcgcccuggacccucugagcgagaccaagugcacccugaagagcuucaccguggagaagggcaucuaccagaccagcaacuuccgggugcagcccaccgagagcaucgugcgguuccccaacaucaccaaccugugccccuucggcgagguguucaacgccacccgguucgccagcguguacgccuggaaccggaagcggaucagcaacugcguggccgacuacagcgugcuguacaacagcgccagcuucagcaccuucaagugcuacggcgugagccccaccaagcugaacgaccugugcuucaccaacguguacgccgacagcuucgugauccguggcgacgaggugcggcagaucgcacccggccagacaggcaagaucgccgacuacaacuacaagcugcccgacgacuucaccggcugcgugaucgccuggaacagcaacaaccucgacagcaaggugggcggcaacuacaacuaccuguuccggcuguuccggaagagcaaccugaagcccuucgagcgggacaucagcaccgagaucuaccaagccggcuccaccccuugcaacggcguggagggcuucaacugcuacuucccucugcagagcuacggcuuccagcccaccaacggcgugggcuaccagcccuaccgggugguggugcugagcuucgagcugcugcacgccccagccaccguguguggccccaagaagagcaccaaccuggugaagaacaagugcgugaacuucaacuucaacggccuuaccggcaccggcgugcugaccgagagcaacaagaaauuccugcccuuucagcaguucggccgggacaucgccgacaccaccgacgcugugcgggauccccagacccuggagauccuggacaucaccccuugcagcuucggcggcgugagcgugaucaccccaggcaccaacaccagcaaccagguggccgugcuguaccagggcgugaacugcaccgaggugcccguggccauccacgccgaccagcugacacccaccuggcgggucuacagcaccggcagcaacguguuccagacccgggccgguugccugaucggcgccgagcacgugaacaacagcuacgagugcgacauccccaucggcgccggcaucugugccagcuaccagacccagaccaauucaccccggagggcaaggagcguggccagccagagcaucaucgccuacaccaugagccugggcgccgagaacagcguggccuacagcaacaacagcaucgccauccccaccaacuucaccaucagcgugaccaccgagauucugcccgugagcaugaccaagaccagcguggacugcaccauguacaucugcggcgacagcaccgagugcagcaaccugcugcugcaguacggcagcuucugcacccagcugaaccgggcccugaccggcaucgccguggagcaggacaagaacacccaggagguguucgcccaggugaagcagaucuacaagaccccucccaucaaggacuucggcggcuucaacuucagccagauccugcccgaccccagcaagcccagcaagcggagcuucaucgaggaccugcuguucaacaaggugacccuagccgacgccggcuucaucaagcaguacggcgacugccucggcgacauagccgcccgggaccugaucugcgcccagaaguucaacggccugaccgugcugccuccccugcugaccgacgagaugaucgcccaguacaccagcgcccuguuagccggaaccaucaccagcggcuggacuuucggcgcuggagccgcucugcagauccccuucgccaugcagauggccuaccgguucaacggcaucggcgugacccagaacgugcuguacgagaaccagaagcugaucgccaaccaguucaacagcgccaucggcaagauccaggacagccugagcagcaccgcuagcgcccugggcaagcugcaggacguggugaaccagaacgcccaggcccugaacacccuggugaagcagcugagcagcaacuucggcgccaucagcagcgugcugaacgacauccugagccggcuggacaaggucgaggccgaggugcagaucgaccggcugaucacuggccggcugcagagccugcagaccuacgugacccagcagcugauccgggccgccgagauucgggccagcgccaaccuggccgccaccaagaugagcgagugcgugcugggccagagcaagcggguggacuucugcggcaagggcuaccaccugaugagcuuuccccagagcgcaccccacggagugguguuccugcacgugaccuacgugcccgcccaggagaagaacuucaccaccgccccagccaucugccacgacggcaaggcccacuuuccccgggagggcguguucgugagcaacggcacccacugguucgugacccagcggaacuucuacgagccccagaucaucaccaccgacaacaccuucgugagcggcaacugcgacguggugaucggcaucgugaacaacaccguguacgauccccugcagcccgagcuggacagcuucaaggaggagcuggacaaguacuucaagaaucacaccagccccgacguggaccugggcgacaucagcggcaucaacgccagcguggugaacauccagaaggagaucgaucggcugaacgagguggccaagaaccugaacgagagccugaucgaccugcaggagcugggcaaguacgagcaguacaucaaguggcccugguacaucuggcugggcuucaucgccggccugaucgccaucgugauggugaccaucaugcugugcugcaugaccagcugcugcagcugccugaagggcuguugcagcugcggcagcugcugcaaguucgacgaggacgacagcgagcccgugcugaagggcgugaagcugcacuacaccugaggacuagucccuguucccagagcccacuuuuuuuucuuuuuuugaaauaaaauagccugucuuucagaucucaaaggcucuuuucagagccaccaaaaaaaaaaaaaaaaaaaaaaaaaaaaaaaaaaaaaaaaaaaaaaaaaaaaaaaaaaaaaaaaaaaaaaaaaaaaaaaaaaaaaaaaaaaaaaaaaaaaa

SEQ ID NO: 23673 - RNA, 4191 nt, Artificial Sequence
  SARS-CoV-2/Wuhan/WIV05/2019__EPI_ISL_402128 spike protein mRNA gc (1-1273)(D614G_I692V)
aggagagggcgcuuggcuugcaaggacccugagcugcggcauugaagcacacccaacccaacucgacugaagucagccucacugaaccggaucugagaaucuucucucucugggcuugccagggcucuccgaaccuagcuagcauccucuucaauuccaacuagaaagcuuaccauguucguguuccuggugcugcugccccuggugagcagccagugcgugaaccugaccacccggacccagcugccaccagccuacaccaacagcuucacccggggcgucuacuaccccgacaagguguuccggagcagcguccugcacagcacccaggaccuguuccugcccuucuucagcaacgugaccugguuccacgccauccacgugagcggcaccaacggcaccaagcgguucgacaaccccgugcugcccuucaacgacggcguguacuucgccagcaccgagaagagcaacaucauccggggcuggaucuucggcaccacccuggacagcaagacccagagccugcugaucgugaauaacgccaccaacguggugaucaaggugugcgaguuccaguucugcaacgaccccuuccugggcguguacuaccacaagaacaacaagagcuggauggagagcgaguuccggguguacagcagcgccaacaacugcaccuucgaguacgugagccagcccuuccugauggaccuggagggcaagcagggcaacuucaagaaccugcgggaguucguguucaagaacaucgacggcuacuucaagaucuacagcaagcacaccccaaucaaccuggugcgggaucugccccagggcuucucagcccuggagccccugguggaccugcccaucggcaucaacaucacccgguuccagacccugcuggcccugcaccggagcuaccugaccccaggcgacagcagcagcggguggacagcaggcgcggcugcuuacuacgugggcuaccugcagccccggaccuuccugcugaaguacaacgagaacggcaccaucaccgacgccguggacugcgcccuggacccucugagcgagaccaagugcacccugaagagcuucaccguggagaagggcaucuaccagaccagcaacuuccgggugcagcccaccgagagcaucgugcgguuccccaacaucaccaaccugugccccuucggcgagguguucaacgccacccgguucgccagcguguacgccuggaaccggaagcggaucagcaacugcguggccgacuacagcgugcuguacaacagcgccagcuucagcaccuucaagugcuacggcgugagccccaccaagcugaacgaccugugcuucaccaacguguacgccgacagcuucgugauccguggcgacgaggugcggcagaucgcacccggccagacaggcaagaucgccgacuacaacuacaagcugcccgacgacuucaccggcugcgugaucgccuggaacagcaacaaccucgacagcaaggugggcggcaacuacaacuaccuguaccggcuguuccggaagagcaaccugaagcccuucgagcgggacaucagcaccgagaucuaccaagccggcuccaccccuugcaacggcguggagggcuucaacugcuacuucccucugcagagcuacggcuuccagcccaccaacggcgugggcuaccagcccuaccgggugguggugcugagcuucgagcugcugcacgccccagccaccguguguggccccaagaagagcaccaaccuggugaagaacaagugcgugaacuucaacuucaacggccuuaccggcaccggcgugcugaccgagagcaacaagaaauuccugcccuuucagcaguucggccgggacaucgccgacaccaccgacgcugugcgggauccccagacccuggagauccuggacaucaccccuugcagcuucggcggcgugagcgugaucaccccaggcaccaacaccagcaaccagguggccgugcuguaccagggcgugaacugcaccgaggugcccguggccauccacgccgaccagcugacacccaccuggcgggucuacagcaccggcagcaacguguuccagacccgggccgguugccugaucggcgccgagcacgugaacaacagcuacgagugcgacauccccaucggcgccggcaucugugccagcuaccagacccagaccaauucaccccggagggcaaggagcguggccagccagagcgugaucgccuacaccaugagccugggcgccgagaacagcguggccuacagcaacaacagcaucgccauccccaccaacuucaccaucagcgugaccaccgagauucugcccgugagcaugaccaagaccagcguggacugcaccauguacaucugcggcgacagcaccgagugcagcaaccugcugcugcaguacggcagcuucugcacccagcugaaccgggcccugaccggcaucgccguggagcaggacaagaacacccaggagguguucgcccaggugaagcagaucuacaagaccccucccaucaaggacuucggcggcuucaacuucagccagauccugcccgaccccagcaagcccagcaagcggagcuucaucgaggaccugcuguucaacaaggugacccuagccgacgccggcuucaucaagcaguacggcgacugccucggcgacauagccgcccgggaccugaucugcgcccagaaguucaacggccugaccgugcugccuccccugcugaccgacgagaugaucgcccaguacaccagcgcccuguuagccggaaccaucaccagcggcuggacuuucggcgcuggagccgcucugcagauccccuucgccaugcagauggccuaccgguucaacggcaucggcgugacccagaacgugcuguacgagaaccagaagcugaucgccaaccaguucaacagcgccaucggcaagauccaggacagccugagcagcaccgcuagcgcccugggcaagcugcaggacguggugaaccagaacgcccaggcccugaacacccuggugaagcagcugagcagcaacuucggcgccaucagcagcgugcugaacgacauccugagccggcuggacaaggucgaggccgaggugcagaucgaccggcugaucacuggccggcugcagagccugcagaccuacgugacccagcagcugauccgggccgccgagauucgggccagcgccaaccuggccgccaccaagaugagcgagugcgugcugggccagagcaagcggguggacuucugcggcaagggcuaccaccugaugagcuuuccccagagcgcaccccacggagugguguuccugcacgugaccuacgugcccgcccaggagaagaacuucaccaccgccccagccaucugccacgacggcaaggcccacuuuccccgggagggcguguucgugagcaacggcacccacugguucgugacccagcggaacuucuacgagccccagaucaucaccaccgacaacaccuucgugagcggcaacugcgacguggugaucggcaucgugaacaacaccguguacgauccccugcagcccgagcuggacagcuucaaggaggagcuggacaaguacuucaagaaucacaccagccccgacguggaccugggcgacaucagcggcaucaacgccagcguggugaacauccagaaggagaucgaucggcugaacgagguggccaagaaccugaacgagagccugaucgaccugcaggagcugggcaaguacgagcaguacaucaaguggcccugguacaucuggcugggcuucaucgccggccugaucgccaucgugauggugaccaucaugcugugcugcaugaccagcugcugcagcugccugaagggcuguugcagcugcggcagcugcugcaaguucgacgaggacgacagcgagcccgugcugaagggcgugaagcugcacuacaccugaggacuagucccuguucccagagcccacuuuuuuuucuuuuuuugaaauaaaauagccugucuuucagaucucaaaggcucuuuucagagccaccaaaaaaaaaaaaaaaaaaaaaaaaaaaaaaaaaaaaaaaaaaaaaaaaaaaaaaaaaaaaaaaaaaaaaaaaaaaaaaaaaaaaaaaaaaaaaaaaaaaaa

SEQ ID NO: 23674 - RNA, 4191 nt, Artificial Sequence
  SARS-CoV-2/Wuhan/WIV05/2019__EPI_ISL_402128 spike protein mRNA gc (1-1273)(D614G_M1229I)
aggagagggcgcuuggcuugcaaggacccugagcugcggcauugaagcacacccaacccaacucgacugaagucagccucacugaaccggaucugagaaucuucucucucugggcuugccagggcucuccgaaccuagcuagcauccucuucaauuccaacuagaaagcuuaccauguucguguuccuggugcugcugccccuggugagcagccagugcgugaaccugaccacccggacccagcugccaccagccuacaccaacagcuucacccggggcgucuacuaccccgacaagguguuccggagcagcguccugcacagcacccaggaccuguuccugcccuucuucagcaacgugaccugguuccacgccauccacgugagcggcaccaacggcaccaagcgguucgacaaccccgugcugcccuucaacgacggcguguacuucgccagcaccgagaagagcaacaucauccggggcuggaucuucggcaccacccuggacagcaagacccagagccugcugaucgugaauaacgccaccaacguggugaucaaggugugcgaguuccaguucugcaacgaccccuuccugggcguguacuaccacaagaacaacaagagcuggauggagagcgaguuccggguguacagcagcgccaacaacugcaccuucgaguacgugagccagcccuuccugauggaccuggagggcaagcagggcaacuucaagaaccugcgggaguucguguucaagaacaucgacggcuacuucaagaucuacagcaagcacaccccaaucaaccuggugcgggaucugccccagggcuucucagcccuggagccccugguggaccugcccaucggcaucaacaucacccgguuccagacccugcuggcccugcaccggagcuaccugaccccaggcgacagcagcagcggguggacagcaggcgcggcugcuuacuacgugggcuaccugcagccccggaccuuccugcugaaguacaacgagaacggcaccaucaccgacgccguggacugcgcccuggacccucugagcgagaccaagugcacccugaagagcuucaccguggagaagggcaucuaccagaccagcaacuuccgggugcagcccaccgagagcaucgugcgguuccccaacaucaccaaccugugccccuucggcgagguguucaacgccacccgguucgccagcguguacgccuggaaccggaagcggaucagcaacugcguggccgacuacagcgugcuguacaacagcgccagcuucagcaccuucaagugcuacggcgugagccccaccaagcugaacgaccugugcuucaccaacguguacgccgacagcuucgugauccguggcgacgaggugcggcagaucgcacccggccagacaggcaagaucgccgacuacaacuacaagcugcccgacgacuucaccggcugcgugaucgccuggaacagcaacaaccucgacagcaaggugggcggcaacuacaacuaccuguaccggcuguuccggaagagcaaccugaagcccuucgagcgggacaucagcaccgagaucuaccaagccggcuccaccccuugcaacggcguggagggcuucaacugcuacuucccucugcagagcuacggcuuccagcccaccaacggcgugggcuaccagcccuaccgggugguggugcugagcuucgagcugcugcacgccccagccaccguguguggccccaagaagagcaccaaccuggugaagaacaagugcgugaacuucaacuucaacggccuuaccggcaccggcgugcugaccgagagcaacaagaaauuccugcccuuucagcaguucggccgggacaucgccgacaccaccgacgcugugcgggauccccagacccuggagauccuggacaucaccccuugcagcuucggcggcgugagcgugaucaccccaggcaccaacaccagcaaccagguggccgugcuguaccagggcgugaacugcaccgaggugcccguggccauccacgccgaccagcugacacccaccuggcgggucuacagcaccggcagcaacguguuccagacccgggccgguugccugaucggcgccgagcacgugaacaacagcuacgagugcgacauccccaucggcgccggcaucugugccagcuaccagacccagaccaauucaccccggagggcaaggagcguggccagccagagcaucaucgccuacaccaugagccugggcgccgagaacagcguggccuacagcaacaacagcaucgccauccccaccaacuucaccaucagcgugaccaccgagauucugcccgugagcaugaccaagaccagcguggacugcaccauguacaucugcggcgacagcaccgagugcagcaaccugcugcugcaguacggcagcuucugcacccagcugaaccgggcccugaccggcaucgccguggagcaggacaagaacacccaggagguguucgcccaggugaagcagaucuacaagaccccucccaucaaggacuucggcggcuucaacuucagccagauccugcccgaccccagcaagcccagcaagcggagcuucaucgaggaccugcuguucaacaaggugacccuagccgacgccggcuucaucaagcaguacggcgacugccucggcgacauagccgcccgggaccugaucugcgcccagaaguucaacggccugaccgugcugccuccccugcugaccgacgagaugaucgcccaguacaccagcgcccuguuagccggaaccaucaccagcggcuggacuuucggcgcuggagccgcucugcagauccccuucgccaugcagauggccuaccgguucaacggcaucggcgugacccagaacgugcuguacgagaaccagaagcugaucgccaaccaguucaacagcgccaucggcaagauccaggacagccugagcagcaccgcuagcgcccugggcaagcugcaggacguggugaaccagaacgcccaggcccugaacacccuggugaagcagcugagcagcaacuucggcgccaucagcagcgugcugaacgacauccugagccggcuggacaaggucgaggccgaggugcagaucgaccggcugaucacuggccggcugcagagccugcagaccuacgugacccagcagcugauccgggccgccgagauucgggccagcgccaaccuggccgccaccaagaugagcgagugcgugcugggccagagcaagcggguggacuucugcggcaagggcuaccaccugaugagcuuuccccagagcgcaccccacggagugguguuccugcacgugaccuacgugcccgcccaggagaagaacuucaccaccgccccagccaucugccacgacggcaaggcccacuuuccccgggagggcguguucgugagcaacggcacccacugguucgugacccagcggaacuucuacgagccccagaucaucaccaccgacaacaccuucgugagcggcaacugcgacguggugaucggcaucgugaacaacaccguguacgauccccugcagcccgagcuggacagcuucaaggaggagcuggacaaguacuucaagaaucacaccagccccgacguggaccugggcgacaucagcggcaucaacgccagcguggugaacauccagaaggagaucgaucggcugaacgagguggccaagaaccugaacgagagccugaucgaccugcaggagcugggcaaguacgagcaguacaucaaguggcccugguacaucuggcugggcuucaucgccggccugaucgccaucgugaucgugaccaucaugcugugcugcaugaccagcugcugcagcugccugaagggcuguugcagcugcggcagcugcugcaaguucgacgaggacgacagcgagcccgugcugaagggcgugaagcugcacuacaccugaggacuagucccuguucccagagcccacuuuuuuuucuuuuuuugaaauaaaauagccugucuuucagaucucaaaggcucuuuucagagccaccaaaaaaaaaaaaaaaaaaaaaaaaaaaaaaaaaaaaaaaaaaaaaaaaaaaaaaaaaaaaaaaaaaaaaaaaaaaaaaaaaaaaaaaaaaaaaaaaaaaaa

SEQ ID NO: 23675 - RNA, 4185 nt, Artificial Sequence
  SARS-CoV-2/Wuhan/WIV05/2019__EPI_ISL_402128 spike protein mRNA gc (1-1273)(H69del_V70del_A222V_Y453F_S477N_D614G_I692V)
aggagagggcgcuuggcuugcaaggacccugagcugcggcauugaagcacacccaacccaacucgacugaagucagccucacugaaccggaucugagaaucuucucucucugggcuugccagggcucuccgaaccuagcuagcauccucuucaauuccaacuagaaagcuuaccauguucguguuccuggugcugcugccccuggugagcagccagugcgugaaccugaccacccggacccagcugccaccagccuacaccaacagcuucacccggggcgucuacuaccccgacaagguguuccggagcagcguccugcacagcacccaggaccuguuccugcccuucuucagcaacgugaccugguuccacgccaucagcggcaccaacggcaccaagcgguucgacaaccccgugcugcccuucaacgacggcguguacuucgccagcaccgagaagagcaacaucauccggggcuggaucuucggcaccacccuggacagcaagacccagagccugcugaucgugaauaacgccaccaacguggugaucaaggugugcgaguuccaguucugcaacgaccccuuccugggcguguacuaccacaagaacaacaagagcuggauggagagcgaguuccggguguacagcagcgccaacaacugcaccuucgaguacgugagccagcccuuccugauggaccuggagggcaagcagggcaacuucaagaaccugcgggaguucguguucaagaacaucgacggcuacuucaagaucuacagcaagcacaccccaaucaaccuggugcgggaucugccccagggcuucucagugcuggagccccugguggaccugcccaucggcaucaacaucacccgguuccagacccugcuggcccugcaccggagcuaccugaccccaggcgacagcagcagcggguggacagcaggcgcggcugcuuacuacgugggcuaccugcagccccggaccuuccugcugaaguacaacgagaacggcaccaucaccgacgccguggacugcgcccuggacccucugagcgagaccaagugcacccugaagagcuucaccguggagaagggcaucuaccagaccagcaacuuccgggugcagcccaccgagagcaucgugcgguuccccaacaucaccaaccugugccccuucggcgagguguucaacgccacccgguucgccagcguguacgccuggaaccggaagcggaucagcaacugcguggccgacuacagcgugcuguacaacagcgccagcuucagcaccuucaagugcuacggcgugagccccaccaagcugaacgaccugugcuucaccaacguguacgccgacagcuucgugauccguggcgacgaggugcggcagaucgcacccggccagacaggcaagaucgccgacuacaacuacaagcugcccgacgacuucaccggcugcgugaucgccuggaacagcaacaaccucgacagcaaggugggcggcaacuacaacuaccuguuccggcuguuccggaagagcaaccugaagcccuucgagcgggacaucagcaccgagaucuaccaagccggcaacaccccuugcaacggcguggagggcuucaacugcuacuucccucugcagagcuacggcuuccagcccaccaacggcgugggcuaccagcccuaccgggugguggugcugagcuucgagcugcugcacgccccagccaccguguguggccccaagaagagcaccaaccuggugaagaacaagugcgugaacuucaacuucaacggccuuaccggcaccggcgugcugaccgagagcaacaagaaauuccugcccuuucagcaguucggccgggacaucgccgacaccaccgacgcugugcgggauccccagacccuggagauccuggacaucaccccuugcagcuucggcggcgugagcgugaucaccccaggcaccaacaccagcaaccagguggccgugcuguaccagggcgugaacugcaccgaggugcccguggccauccacgccgaccagcugacacccaccuggcgggucuacagcaccggcagcaacguguuccagacccgggccgguugccugaucggcgccgagcacgugaacaacagcuacgagugcgacauccccaucggcgccggcaucugugccagcuaccagacccagaccaauucaccccggagggcaaggagcguggccagccagagcgugaucgccuacaccaugagccugggcgccgagaacagcguggccuacagcaacaacagcaucgccauccccaccaacuucaccaucagcgugaccaccgagauucugcccgugagcaugaccaagaccagcguggacugcaccauguacaucugcggcgacagcaccgagugcagcaaccugcugcugcaguacggcagcuucugcacccagcugaaccgggcccugaccggcaucgccguggagcaggacaagaacacccaggagguguucgcccaggugaagcagaucuacaagaccccucccaucaaggacuucggcggcuucaacuucagccagauccugcccgaccccagcaagcccagcaagcggagcuucaucgaggaccugcuguucaacaaggugacccuagccgacgccggcuucaucaagcaguacggcgacugccucggcgacauagccgcccgggaccugaucugcgcccagaaguucaacggccugaccgugcugccuccccugcugaccgacgagaugaucgcccaguacaccagcgcccuguuagccggaaccaucaccagcggcuggacuuucggcgcuggagccgcucugcagauccccuucgccaugcagauggccuaccgguucaacggcaucggcgugacccagaacgugcuguacgagaaccagaagcugaucgccaaccaguucaacagcgccaucggcaagauccaggacagccugagcagcaccgcuagcgcccugggcaagcugcaggacguggugaaccagaacgcccaggcccugaacacccuggugaagcagcugagcagcaacuucggcgccaucagcagcgugcugaacgacauccugagccggcuggacaaggucgaggccgaggugcagaucgaccggcugaucacuggccggcugcagagccugcagaccuacgugacccagcagcugauccgggccgccgagauucgggccagcgccaaccuggccgccaccaagaugagcgagugcgugcugggccagagcaagcggguggacuucugcggcaagggcuaccaccugaugagcuuuccccagagcgcaccccacggagugguguuccugcacgugaccuacgugcccgcccaggagaagaacuucaccaccgccccagccaucugccacgacggcaaggcccacuuuccccgggagggcguguucgugagcaacggcacccacugguucgugacccagcggaacuucuacgagccccagaucaucaccaccgacaacaccuucgugagcggcaacugcgacguggugaucggcaucgugaacaacaccguguacgauccccugcagcccgagcuggacagcuucaaggaggagcuggacaaguacuucaagaaucacaccagccccgacguggaccugggcgacaucagcggcaucaacgccagcguggugaacauccagaaggagaucgaucggcugaacgagguggccaagaaccugaacgagagccugaucgaccugcaggagcugggcaaguacgagcaguacaucaaguggcccugguacaucuggcugggcuucaucgccggccugaucgccaucgugauggugaccaucaugcugugcugcaugaccagcugcugcagcugccugaagggcuguugcagcugcggcagcugcugcaaguucgacgaggacgacagcgagcccgugcugaagggcgugaagcugcacuacaccugaggacuagucccuguucccagagcccacuuuuuuuucuuuuuuugaaauaaaauagccugucuuucagaucucaaaggcucuuuucagagccaccaaaaaaaaaaaaaaaaaaaaaaaaaaaaaaaaaaaaaaaaaaaaaaaaaaaaaaaaaaaaaaaaaaaaaaaaaaaaaaaaaaaaaaaaaaaaaaaaaaaaa

SEQ ID NO: 23676 - RNA, 4185 nt, Artificial Sequence
  SARS-CoV-2/Wuhan/WIV05/2019__EPI_ISL_402128 spike protein mRNA gc (1-1273)(H69del_V70del_Y453F_D614G_I692V_M1229I)
aggagagggcgcuuggcuugcaaggacccugagcugcggcauugaagcacacccaacccaacucgacugaagucagccucacugaaccggaucugagaaucuucucucucugggcuugccagggcucuccgaaccuagcuagcauccucuucaauuccaacuagaaagcuuaccauguucguguuccuggugcugcugccccuggugagcagccagugcgugaaccugaccacccggacccagcugccaccagccuacaccaacagcuucacccggggcgucuacuaccccgacaagguguuccggagcagcguccugcacagcacccaggaccuguuccugcccuucuucagcaacgugaccugguuccacgccaucagcggcaccaacggcaccaagcgguucgacaaccccgugcugcccuucaacgacggcguguacuucgccagcaccgagaagagcaacaucauccggggcuggaucuucggcaccacccuggacagcaagacccagagccugcugaucgugaauaacgccaccaacguggugaucaaggugugcgaguuccaguucugcaacgaccccuuccugggcguguacuaccacaagaacaacaagagcuggauggagagcgaguuccggguguacagcagcgccaacaacugcaccuucgaguacgugagccagcccuuccugauggaccuggagggcaagcagggcaacuucaagaaccugcgggaguucguguucaagaacaucgacggcuacuucaagaucuacagcaagcacaccccaaucaaccuggugcgggaucugccccagggcuucucagcccuggagccccugguggaccugcccaucggcaucaacaucacccgguuccagacccugcuggcccugcaccggagcuaccugaccccaggcgacagcagcagcggguggacagcaggcgcggcugcuuacuacgugggcuaccugcagccccggaccuuccugcugaaguacaacgagaacggcaccaucaccgacgccguggacugcgcccuggacccucugagcgagaccaagugcacccugaagagcuucaccguggagaagggcaucuaccagaccagcaacuuccgggugcagcccaccgagagcaucgugcgguuccccaacaucaccaaccugugccccuucggcgagguguucaacgccacccgguucgccagcguguacgccuggaaccggaagcggaucagcaacugcguggccgacuacagcgugcuguacaacagcgccagcuucagcaccuucaagugcuacggcgugagccccaccaagcugaacgaccugugcuucaccaacguguacgccgacagcuucgugauccguggcgacgaggugcggcagaucgcacccggccagacaggcaagaucgccgacuacaacuacaagcugcccgacgacuucaccggcugcgugaucgccuggaacagcaacaaccucgacagcaaggugggcggcaacuacaacuaccuguuccggcuguuccggaagagcaaccugaagcccuucgagcgggacaucagcaccgagaucuaccaagccggcuccaccccuugcaacggcguggagggcuucaacugcuacuucccucugcagagcuacggcuuccagcccaccaacggcgugggcuaccagcccuaccgggugguggugcugagcuucgagcugcugcacgccccagccaccguguguggccccaagaagagcaccaaccuggugaagaacaagugcgugaacuucaacuucaacggccuuaccggcaccggcgugcugaccgagagcaacaagaaauuccugcccuuucagcaguucggccgggacaucgccgacaccaccgacgcugugcgggauccccagacccuggagauccuggacaucaccccuugcagcuucggcggcgugagcgugaucaccccaggcaccaacaccagcaaccagguggccgugcuguaccagggcgugaacugcaccgaggugcccguggccauccacgccgaccagcugacacccaccuggcgggucuacagcaccggcagcaacguguuccagacccgggccgguugccugaucggcgccgagcacgugaacaacagcuacgagugcgacauccccaucggcgccggcaucugugccagcuaccagacccagaccaauucaccccggagggcaaggagcguggccagccagagcgugaucgccuacaccaugagccugggcgccgagaacagcguggccuacagcaacaacagcaucgccauccccaccaacuucaccaucagcgugaccaccgagauucugcccgugagcaugaccaagaccagcguggacugcaccauguacaucugcggcgacagcaccgagugcagcaaccugcugcugcaguacggcagcuucugcacccagcugaaccgggcccugaccggcaucgccguggagcaggacaagaacacccaggagguguucgcccaggugaagcagaucuacaagaccccucccaucaaggacuucggcggcuucaacuucagccagauccugcccgaccccagcaagcccagcaagcggagcuucaucgaggaccugcuguucaacaaggugacccuagccgacgccggcuucaucaagcaguacggcgacugccucggcgacauagccgcccgggaccugaucugcgcccagaaguucaacggccugaccgugcugccuccccugcugaccgacgagaugaucgcccaguacaccagcgcccuguuagccggaaccaucaccagcggcuggacuuucggcgcuggagccgcucugcagauccccuucgccaugcagauggccuaccgguucaacggcaucggcgugacccagaacgugcuguacgagaaccagaagcugaucgccaaccaguucaacagcgccaucggcaagauccaggacagccugagcagcaccgcuagcgcccugggcaagcugcaggacguggugaaccagaacgcccaggcccugaacacccuggugaagcagcugagcagcaacuucggcgccaucagcagcgugcugaacgacauccugagccggcuggacaaggucgaggccgaggugcagaucgaccggcugaucacuggccggcugcagagccugcagaccuacgugacccagcagcugauccgggccgccgagauucgggccagcgccaaccuggccgccaccaagaugagcgagugcgugcugggccagagcaagcggguggacuucugcggcaagggcuaccaccugaugagcuuuccccagagcgcaccccacggagugguguuccugcacgugaccuacgugcccgcccaggagaagaacuucaccaccgccccagccaucugccacgacggcaaggcccacuuuccccgggagggcguguucgugagcaacggcacccacugguucgugacccagcggaacuucuacgagccccagaucaucaccaccgacaacaccuucgugagcggcaacugcgacguggugaucggcaucgugaacaacaccguguacgauccccugcagcccgagcuggacagcuucaaggaggagcuggacaaguacuucaagaaucacaccagccccgacguggaccugggcgacaucagcggcaucaacgccagcguggugaacauccagaaggagaucgaucggcugaacgagguggccaagaaccugaacgagagccugaucgaccugcaggagcugggcaaguacgagcaguacaucaaguggcccugguacaucuggcugggcuucaucgccggccugaucgccaucgugaucgugaccaucaugcugugcugcaugaccagcugcugcagcugccugaagggcuguugcagcugcggcagcugcugcaaguucgacgaggacgacagcgagcccgugcugaagggcgugaagcugcacuacaccugaggacuagucccuguucccagagcccacuuuuuuuucuuuuuuugaaauaaaauagccugucuuucagaucucaaaggcucuuuucagagccaccaaaaaaaaaaaaaaaaaaaaaaaaaaaaaaaaaaaaaaaaaaaaaaaaaaaaaaaaaaaaaaaaaaaaaaaaaaaaaaaaaaaaaaaaaaaaaaaaaaaaa

SEQ ID NO: 23677 - RNA, 4182 nt, Artificial Sequence
  SARS-CoV-2/Wuhan/WIV05/2019__EPI_ISL_402128 spike protein mRNA gc (1-1273)(H69del_V70del_Y144del_N501Y_A570D_D614G_P681H_T716I_S982 A_D1118H)
aggagagggcgcuuggcuugcaaggacccugagcugcggcauugaagcacacccaacccaacucgacugaagucagccucacugaaccggaucugagaaucuucucucucugggcuugccagggcucuccgaaccuagcuagcauccucuucaauuccaacuagaaagcuuaccauguucguguuccuggugcugcugccccuggugagcagccagugcgugaaccugaccacccggacccagcugccaccagccuacaccaacagcuucacccggggcgucuacuaccccgacaagguguuccggagcagcguccugcacagcacccaggaccuguuccugcccuucuucagcaacgugaccugguuccacgccaucagcggcaccaacggcaccaagcgguucgacaaccccgugcugcccuucaacgacggcguguacuucgccagcaccgagaagagcaacaucauccggggcuggaucuucggcaccacccuggacagcaagacccagagccugcugaucgugaauaacgccaccaacguggugaucaaggugugcgaguuccaguucugcaacgaccccuuccugggcguguaccacaagaacaacaagagcuggauggagagcgaguuccggguguacagcagcgccaacaacugcaccuucgaguacgugagccagcccuuccugauggaccuggagggcaagcagggcaacuucaagaaccugcgggaguucguguucaagaacaucgacggcuacuucaagaucuacagcaagcacaccccaaucaaccuggugcgggaucugccccagggcuucucagcccuggagccccugguggaccugcccaucggcaucaacaucacccgguuccagacccugcuggcccugcaccggagcuaccugaccccaggcgacagcagcagcggguggacagcaggcgcggcugcuuacuacgugggcuaccugcagccccggaccuuccugcugaaguacaacgagaacggcaccaucaccgacgccguggacugcgcccuggacccucugagcgagaccaagugcacccugaagagcuucaccguggagaagggcaucuaccagaccagcaacuuccgggugcagcccaccgagagcaucgugcgguuccccaacaucaccaaccugugccccuucggcgagguguucaacgccacccgguucgccagcguguacgccuggaaccggaagcggaucagcaacugcguggccgacuacagcgugcuguacaacagcgccagcuucagcaccuucaagugcuacggcgugagccccaccaagcugaacgaccugugcuucaccaacguguacgccgacagcuucgugauccguggcgacgaggugcggcagaucgcacccggccagacaggcaagaucgccgacuacaacuacaagcugcccgacgacuucaccggcugcgugaucgccuggaacagcaacaaccucgacagcaaggugggcggcaacuacaacuaccuguaccggcuguuccggaagagcaaccugaagcccuucgagcgggacaucagcaccgagaucuaccaagccggcuccaccccuugcaacggcguggagggcuucaacugcuacuucccucugcagagcuacggcuuccagcccaccuacggcgugggcuaccagcccuaccgggugguggugcugagcuucgagcugcugcacgccccagccaccguguguggccccaagaagagcaccaaccuggugaagaacaagugcgugaacuucaacuucaacggccuuaccggcaccggcgugcugaccgagagcaacaagaaauuccugcccuuucagcaguucggccgggacaucgacgacaccaccgacgcugugcgggauccccagacccuggagauccuggacaucaccccuugcagcuucggcggcgugagcgugaucaccccaggcaccaacaccagcaaccagguggccgugcuguaccagggcgugaacugcaccgaggugcccguggccauccacgccgaccagcugacacccaccuggcgggucuacagcaccggcagcaacguguuccagacccgggccgguugccugaucggcgccgagcacgugaacaacagcuacgagugcgacauccccaucggcgccggcaucugugccagcuaccagacccagaccaauucacaccggagggcaaggagcguggccagccagagcaucaucgccuacaccaugagccugggcgccgagaacagcguggccuacagcaacaacagcaucgccauccccaucaacuucaccaucagcgugaccaccgagauucugcccgugagcaugaccaagaccagcguggacugcaccauguacaucugcggcgacagcaccgagugcagcaaccugcugcugcaguacggcagcuucugcacccagcugaaccgggcccugaccggcaucgccguggagcaggacaagaacacccaggagguguucgcccaggugaagcagaucuacaagaccccucccaucaaggacuucggcggcuucaacuucagccagauccugcccgaccccagcaagcccagcaagcggagcuucaucgaggaccugcuguucaacaaggugacccuagccgacgccggcuucaucaagcaguacggcgacugccucggcgacauagccgcccgggaccugaucugcgcccagaaguucaacggccugaccgugcugccuccccugcugaccgacgagaugaucgcccaguacaccagcgcccuguuagccggaaccaucaccagcggcuggacuuucggcgcuggagccgcucugcagauccccuucgccaugcagauggccuaccgguucaacggcaucggcgugacccagaacgugcuguacgagaaccagaagcugaucgccaaccaguucaacagcgccaucggcaagauccaggacagccugagcagcaccgcuagcgcccugggcaagcugcaggacguggugaaccagaacgcccaggcccugaacacccuggugaagcagcugagcagcaacuucggcgccaucagcagcgugcugaacgacauccuggcccggcuggacaaggucgaggccgaggugcagaucgaccggcugaucacuggccggcugcagagccugcagaccuacgugacccagcagcugauccgggccgccgagauucgggccagcgccaaccuggccgccaccaagaugagcgagugcgugcugggccagagcaagcggguggacuucugcggcaagggcuaccaccugaugagcuuuccccagagcgcaccccacggagugguguuccugcacgugaccuacgugcccgcccaggagaagaacuucaccaccgccccagccaucugccacgacggcaaggcccacuuuccccgggagggcguguucgugagcaacggcacccacugguucgugacccagcggaacuucuacgagccccagaucaucaccacccacaacaccuucgugagcggcaacugcgacguggugaucggcaucgugaacaacaccguguacgauccccugcagcccgagcuggacagcuucaaggaggagcuggacaaguacuucaagaaucacaccagccccgacguggaccugggcgacaucagcggcaucaacgccagcguggugaacauccagaaggagaucgaucggcugaacgagguggccaagaaccugaacgagagccugaucgaccugcaggagcugggcaaguacgagcaguacaucaaguggcccugguacaucuggcugggcuucaucgccggccugaucgccaucgugauggugaccaucaugcugugcugcaugaccagcugcugcagcugccugaagggcuguugcagcugcggcagcugcugcaaguucgacgaggacgacagcgagcccgugcugaagggcgugaagcugcacuacaccugaggacuagucccuguucccagagcccacuuuuuuuucuuuuuuugaaauaaaauagccugucuuucagaucucaaaggcucuuuucagagccaccaaaaaaaaaaaaaaaaaaaaaaaaaaaaaaaaaaaaaaaaaaaaaaaaaaaaaaaaaaaaaaaaaaaaaaaaaaaaaaaaaaaaaaaaaaaaaaaaaaaaa

SEQ ID NO: 23678 - RNA, 4191 nt, Artificial Sequence
  SARS-CoV-2/Wuhan/WIV05/2019__EPI_ISL_402128 spike protein mRNA gc (1-1273)(K417N_E484K_N501Y_D614G)
aggagagggcgcuuggcuugcaaggacccugagcugcggcauugaagcacacccaacccaacucgacugaagucagccucacugaaccggaucugagaaucuucucucucugggcuugccagggcucuccgaaccuagcuagcauccucuucaauuccaacuagaaagcuuaccauguucguguuccuggugcugcugccccuggugagcagccagugcgugaaccugaccacccggacccagcugccaccagccuacaccaacagcuucacccggggcgucuacuaccccgacaagguguuccggagcagcguccugcacagcacccaggaccuguuccugcccuucuucagcaacgugaccugguuccacgccauccacgugagcggcaccaacggcaccaagcgguucgacaaccccgugcugcccuucaacgacggcguguacuucgccagcaccgagaagagcaacaucauccggggcuggaucuucggcaccacccuggacagcaagacccagagccugcugaucgugaauaacgccaccaacguggugaucaaggugugcgaguuccaguucugcaacgaccccuuccugggcguguacuaccacaagaacaacaagagcuggauggagagcgaguuccggguguacagcagcgccaacaacugcaccuucgaguacgugagccagcccuuccugauggaccuggagggcaagcagggcaacuucaagaaccugcgggaguucguguucaagaacaucgacggcuacuucaagaucuacagcaagcacaccccaaucaaccuggugcgggaucugccccagggcuucucagcccuggagccccugguggaccugcccaucggcaucaacaucacccgguuccagacccugcuggcccugcaccggagcuaccugaccccaggcgacagcagcagcggguggacagcaggcgcggcugcuuacuacgugggcuaccugcagccccggaccuuccugcugaaguacaacgagaacggcaccaucaccgacgccguggacugcgcccuggacccucugagcgagaccaagugcacccugaagagcuucaccguggagaagggcaucuaccagaccagcaacuuccgggugcagcccaccgagagcaucgugcgguuccccaacaucaccaaccugugccccuucggcgagguguucaacgccacccgguucgccagcguguacgccuggaaccggaagcggaucagcaacugcguggccgacuacagcgugcuguacaacagcgccagcuucagcaccuucaagugcuacggcgugagccccaccaagcugaacgaccugugcuucaccaacguguacgccgacagcuucgugauccguggcgacgaggugcggcagaucgcacccggccagacaggcaacaucgccgacuacaacuacaagcugcccgacgacuucaccggcugcgugaucgccuggaacagcaacaaccucgacagcaaggugggcggcaacuacaacuaccuguaccggcuguuccggaagagcaaccugaagcccuucgagcgggacaucagcaccgagaucuaccaagccggcuccaccccuugcaacggcgugaagggcuucaacugcuacuucccucugcagagcuacggcuuccagcccaccuacggcgugggcuaccagcccuaccgggugguggugcugagcuucgagcugcugcacgccccagccaccguguguggccccaagaagagcaccaaccuggugaagaacaagugcgugaacuucaacuucaacggccuuaccggcaccggcgugcugaccgagagcaacaagaaauuccugcccuuucagcaguucggccgggacaucgccgacaccaccgacgcugugcgggauccccagacccuggagauccuggacaucaccccuugcagcuucggcggcgugagcgugaucaccccaggcaccaacaccagcaaccagguggccgugcuguaccagggcgugaacugcaccgaggugcccguggccauccacgccgaccagcugacacccaccuggcgggucuacagcaccggcagcaacguguuccagacccgggccgguugccugaucggcgccgagcacgugaacaacagcuacgagugcgacauccccaucggcgccggcaucugugccagcuaccagacccagaccaauucaccccggagggcaaggagcguggccagccagagcaucaucgccuacaccaugagccugggcgccgagaacagcguggccuacagcaacaacagcaucgccauccccaccaacuucaccaucagcgugaccaccgagauucugcccgugagcaugaccaagaccagcguggacugcaccauguacaucugcggcgacagcaccgagugcagcaaccugcugcugcaguacggcagcuucugcacccagcugaaccgggcccugaccggcaucgccguggagcaggacaagaacacccaggagguguucgcccaggugaagcagaucuacaagaccccucccaucaaggacuucggcggcuucaacuucagccagauccugcccgaccccagcaagcccagcaagcggagcuucaucgaggaccugcuguucaacaaggugacccuagccgacgccggcuucaucaagcaguacggcgacugccucggcgacauagccgcccgggaccugaucugcgcccagaaguucaacggccugaccgugcugccuccccugcugaccgacgagaugaucgcccaguacaccagcgcccuguuagccggaaccaucaccagcggcuggacuuucggcgcuggagccgcucugcagauccccuucgccaugcagauggccuaccgguucaacggcaucggcgugacccagaacgugcuguacgagaaccagaagcugaucgccaaccaguucaacagcgccaucggcaagauccaggacagccugagcagcaccgcuagcgcccugggcaagcugcaggacguggugaaccagaacgcccaggcccugaacacccuggugaagcagcugagcagcaacuucggcgccaucagcagcgugcugaacgacauccugagccggcuggacaaggucgaggccgaggugcagaucgaccggcugaucacuggccggcugcagagccugcagaccuacgugacccagcagcugauccgggccgccgagauucgggccagcgccaaccuggccgccaccaagaugagcgagugcgugcugggccagagcaagcggguggacuucugcggcaagggcuaccaccugaugagcuuuccccagagcgcaccccacggagugguguuccugcacgugaccuacgugcccgcccaggagaagaacuucaccaccgccccagccaucugccacgacggcaaggcccacuuuccccgggagggcguguucgugagcaacggcacccacugguucgugacccagcggaacuucuacgagccccagaucaucaccaccgacaacaccuucgugagcggcaacugcgacguggugaucggcaucgugaacaacaccguguacgauccccugcagcccgagcuggacagcuucaaggaggagcuggacaaguacuucaagaaucacaccagccccgacguggaccugggcgacaucagcggcaucaacgccagcguggugaacauccagaaggagaucgaucggcugaacgagguggccaagaaccugaacgagagccugaucgaccugcaggagcugggcaaguacgagcaguacaucaaguggcccugguacaucuggcugggcuucaucgccggccugaucgccaucgugauggugaccaucaugcugugcugcaugaccagcugcugcagcugccugaagggcuguugcagcugcggcagcugcugcaaguucgacgaggacgacagcgagcccgugcugaagggcgugaagcugcacuacaccugaggacuagucccuguucccagagcccacuuuuuuuucuuuuuuugaaauaaaauagccugucuuucagaucucaaaggcucuuuucagagccaccaaaaaaaaaaaaaaaaaaaaaaaaaaaaaaaaaaaaaaaaaaaaaaaaaaaaaaaaaaaaaaaaaaaaaaaaaaaaaaaaaaaaaaaaaaaaaaaaaaaaa

SEQ ID NO: 23679 - RNA, 4182 nt, Artificial Sequence
  SARS-CoV-2/Wuhan/WIV05/2019__EPI_ISL_402128 spike protein mRNA gc (1-1273)(L18F_D80A_D215G_L242del_A243del_L244del_R246I_K417N_E484 K_N501Y_D614G_A701V)
aggagagggcgcuuggcuugcaaggacccugagcugcggcauugaagcacacccaacccaacucgacugaagucagccucacugaaccggaucugagaaucuucucucucugggcuugccagggcucuccgaaccuagcuagcauccucuucaauuccaacuagaaagcuuaccauguucguguuccuggugcugcugccccuggugagcagccagugcgugaacuucaccacccggacccagcugccaccagccuacaccaacagcuucacccggggcgucuacuaccccgacaagguguuccggagcagcguccugcacagcacccaggaccuguuccugcccuucuucagcaacgugaccugguuccacgccauccacgugagcggcaccaacggcaccaagcgguucgccaaccccgugcugcccuucaacgacggcguguacuucgccagcaccgagaagagcaacaucauccggggcuggaucuucggcaccacccuggacagcaagacccagagccugcugaucgugaauaacgccaccaacguggugaucaaggugugcgaguuccaguucugcaacgaccccuuccugggcguguacuaccacaagaacaacaagagcuggauggagagcgaguuccggguguacagcagcgccaacaacugcaccuucgaguacgugagccagcccuuccugauggaccuggagggcaagcagggcaacuucaagaaccugcgggaguucguguucaagaacaucgacggcuacuucaagaucuacagcaagcacaccccaaucaaccuggugcggggccugccccagggcuucucagcccuggagccccugguggaccugcccaucggcaucaacaucacccgguuccagacccugcacaucagcuaccugaccccaggcgacagcagcagcggguggacagcaggcgcggcugcuuacuacgugggcuaccugcagccccggaccuuccugcugaaguacaacgagaacggcaccaucaccgacgccguggacugcgcccuggacccucugagcgagaccaagugcacccugaagagcuucaccguggagaagggcaucuaccagaccagcaacuuccgggugcagcccaccgagagcaucgugcgguuccccaacaucaccaaccugugccccuucggcgagguguucaacgccacccgguucgccagcguguacgccuggaaccggaagcggaucagcaacugcguggccgacuacagcgugcuguacaacagcgccagcuucagcaccuucaagugcuacggcgugagccccaccaagcugaacgaccugugcuucaccaacguguacgccgacagcuucgugauccguggcgacgaggugcggcagaucgcacccggccagacaggcaacaucgccgacuacaacuacaagcugcccgacgacuucaccggcugcgugaucgccuggaacagcaacaaccucgacagcaaggugggcggcaacuacaacuaccuguaccggcuguuccggaagagcaaccugaagcccuucgagcgggacaucagcaccgagaucuaccaagccggcuccaccccuugcaacggcgugaagggcuucaacugcuacuucccucugcagagcuacggcuuccagcccaccuacggcgugggcuaccagcccuaccgggugguggugcugagcuucgagcugcugcacgccccagccaccguguguggccccaagaagagcaccaaccuggugaagaacaagugcgugaacuucaacuucaacggccuuaccggcaccggcgugcugaccgagagcaacaagaaauuccugcccuuucagcaguucggccgggacaucgccgacaccaccgacgcugugcgggauccccagacccuggagauccuggacaucaccccuugcagcuucggcggcgugagcgugaucaccccaggcaccaacaccagcaaccagguggccgugcuguaccagggcgugaacugcaccgaggugcccguggccauccacgccgaccagcugacacccaccuggcgggucuacagcaccggcagcaacguguuccagacccgggccgguugccugaucggcgccgagcacgugaacaacagcuacgagugcgacauccccaucggcgccggcaucugugccagcuaccagacccagaccaauucaccccggagggcaaggagcguggccagccagagcaucaucgccuacaccaugagccugggcguggagaacagcguggccuacagcaacaacagcaucgccauccccaccaacuucaccaucagcgugaccaccgagauucugcccgugagcaugaccaagaccagcguggacugcaccauguacaucugcggcgacagcaccgagugcagcaaccugcugcugcaguacggcagcuucugcacccagcugaaccgggcccugaccggcaucgccguggagcaggacaagaacacccaggagguguucgcccaggugaagcagaucuacaagaccccucccaucaaggacuucggcggcuucaacuucagccagauccugcccgaccccagcaagcccagcaagcggagcuucaucgaggaccugcuguucaacaaggugacccuagccgacgccggcuucaucaagcaguacggcgacugccucggcgacauagccgcccgggaccugaucugcgcccagaaguucaacggccugaccgugcugccuccccugcugaccgacgagaugaucgcccaguacaccagcgcccuguuagccggaaccaucaccagcggcuggacuuucggcgcuggagccgcucugcagauccccuucgccaugcagauggccuaccgguucaacggcaucggcgugacccagaacgugcuguacgagaaccagaagcugaucgccaaccaguucaacagcgccaucggcaagauccaggacagccugagcagcaccgcuagcgcccugggcaagcugcaggacguggugaaccagaacgcccaggcccugaacacccuggugaagcagcugagcagcaacuucggcgccaucagcagcgugcugaacgacauccugagccggcuggacaaggucgaggccgaggugcagaucgaccggcugaucacuggccggcugcagagccugcagaccuacgugacccagcagcugauccgggccgccgagauucgggccagcgccaaccuggccgccaccaagaugagcgagugcgugcugggccagagcaagcggguggacuucugcggcaagggcuaccaccugaugagcuuuccccagagcgcaccccacggagugguguuccugcacgugaccuacgugcccgcccaggagaagaacuucaccaccgccccagccaucugccacgacggcaaggcccacuuuccccgggagggcguguucgugagcaacggcacccacugguucgugacccagcggaacuucuacgagccccagaucaucaccaccgacaacaccuucgugagcggcaacugcgacguggugaucggcaucgugaacaacaccguguacgauccccugcagcccgagcuggacagcuucaaggaggagcuggacaaguacuucaagaaucacaccagccccgacguggaccugggcgacaucagcggcaucaacgccagcguggugaacauccagaaggagaucgaucggcugaacgagguggccaagaaccugaacgagagccugaucgaccugcaggagcugggcaaguacgagcaguacaucaaguggcccugguacaucuggcugggcuucaucgccggccugaucgccaucgugauggugaccaucaugcugugcugcaugaccagcugcugcagcugccugaagggcuguugcagcugcggcagcugcugcaaguucgacgaggacgacagcgagcccgugcugaagggcgugaagcugcacuacaccugaggacuagucccuguucccagagcccacuuuuuuuucuuuuuuugaaauaaaauagccugucuuucagaucucaaaggcucuuuucagagccaccaaaaaaaaaaaaaaaaaaaaaaaaaaaaaaaaaaaaaaaaaaaaaaaaaaaaaaaaaaaaaaaaaaaaaaaaaaaaaaaaaaaaaaaaaaaaaaaaaaaaa

SEQ ID NO: 23680 - RNA, 4191 nt, Artificial Sequence
  SARS-CoV-2/Wuhan/WIV05/2019__EPI_ISL_402128 spike protein mRNA gc (1-1273)(E484K_D614G)
aggagagggcgcuuggcuugcaaggacccugagcugcggcauugaagcacacccaacccaacucgacugaagucagccucacugaaccggaucugagaaucuucucucucugggcuugccagggcucuccgaaccuagcuagcauccucuucaauuccaacuagaaagcuuaccauguucguguuccuggugcugcugccccuggugagcagccagugcgugaaccugaccacccggacccagcugccaccagccuacaccaacagcuucacccggggcgucuacuaccccgacaagguguuccggagcagcguccugcacagcacccaggaccuguuccugcccuucuucagcaacgugaccugguuccacgccauccacgugagcggcaccaacggcaccaagcgguucgacaaccccgugcugcccuucaacgacggcguguacuucgccagcaccgagaagagcaacaucauccggggcuggaucuucggcaccacccuggacagcaagacccagagccugcugaucgugaauaacgccaccaacguggugaucaaggugugcgaguuccaguucugcaacgaccccuuccugggcguguacuaccacaagaacaacaagagcuggauggagagcgaguuccggguguacagcagcgccaacaacugcaccuucgaguacgugagccagcccuuccugauggaccuggagggcaagcagggcaacuucaagaaccugcgggaguucguguucaagaacaucgacggcuacuucaagaucuacagcaagcacaccccaaucaaccuggugcgggaucugccccagggcuucucagcccuggagccccugguggaccugcccaucggcaucaacaucacccgguuccagacccugcuggcccugcaccggagcuaccugaccccaggcgacagcagcagcggguggacagcaggcgcggcugcuuacuacgugggcuaccugcagccccggaccuuccugcugaaguacaacgagaacggcaccaucaccgacgccguggacugcgcccuggacccucugagcgagaccaagugcacccugaagagcuucaccguggagaagggcaucuaccagaccagcaacuuccgggugcagcccaccgagagcaucgugcgguuccccaacaucaccaaccugugccccuucggcgagguguucaacgccacccgguucgccagcguguacgccuggaaccggaagcggaucagcaacugcguggccgacuacagcgugcuguacaacagcgccagcuucagcaccuucaagugcuacggcgugagccccaccaagcugaacgaccugugcuucaccaacguguacgccgacagcuucgugauccguggcgacgaggugcggcagaucgcacccggccagacaggcaagaucgccgacuacaacuacaagcugcccgacgacuucaccggcugcgugaucgccuggaacagcaacaaccucgacagcaaggugggcggcaacuacaacuaccuguaccggcuguuccggaagagcaaccugaagcccuucgagcgggacaucagcaccgagaucuaccaagccggcuccaccccuugcaacggcgugaagggcuucaacugcuacuucccucugcagagcuacggcuuccagcccaccaacggcgugggcuaccagcccuaccgggugguggugcugagcuucgagcugcugcacgccccagccaccguguguggccccaagaagagcaccaaccuggugaagaacaagugcgugaacuucaacuucaacggccuuaccggcaccggcgugcugaccgagagcaacaagaaauuccugcccuuucagcaguucggccgggacaucgccgacaccaccgacgcugugcgggauccccagacccuggagauccuggacaucaccccuugcagcuucggcggcgugagcgugaucaccccaggcaccaacaccagcaaccagguggccgugcuguaccagggcgugaacugcaccgaggugcccguggccauccacgccgaccagcugacacccaccuggcgggucuacagcaccggcagcaacguguuccagacccgggccgguugccugaucggcgccgagcacgugaacaacagcuacgagugcgacauccccaucggcgccggcaucugugccagcuaccagacccagaccaauucaccccggagggcaaggagcguggccagccagagcaucaucgccuacaccaugagccugggcgccgagaacagcguggccuacagcaacaacagcaucgccauccccaccaacuucaccaucagcgugaccaccgagauucugcccgugagcaugaccaagaccagcguggacugcaccauguacaucugcggcgacagcaccgagugcagcaaccugcugcugcaguacggcagcuucugcacccagcugaaccgggcccugaccggcaucgccguggagcaggacaagaacacccaggagguguucgcccaggugaagcagaucuacaagaccccucccaucaaggacuucggcggcuucaacuucagccagauccugcccgaccccagcaagcccagcaagcggagcuucaucgaggaccugcuguucaacaaggugacccuagccgacgccggcuucaucaagcaguacggcgacugccucggcgacauagccgcccgggaccugaucugcgcccagaaguucaacggccugaccgugcugccuccccugcugaccgacgagaugaucgcccaguacaccagcgcccuguuagccggaaccaucaccagcggcuggacuuucggcgcuggagccgcucugcagauccccuucgccaugcagauggccuaccgguucaacggcaucggcgugacccagaacgugcuguacgagaaccagaagcugaucgccaaccaguucaacagcgccaucggcaagauccaggacagccugagcagcaccgcuagcgcccugggcaagcugcaggacguggugaaccagaacgcccaggcccugaacacccuggugaagcagcugagcagcaacuucggcgccaucagcagcgugcugaacgacauccugagccggcuggacaaggucgaggccgaggugcagaucgaccggcugaucacuggccggcugcagagccugcagaccuacgugacccagcagcugauccgggccgccgagauucgggccagcgccaaccuggccgccaccaagaugagcgagugcgugcugggccagagcaagcggguggacuucugcggcaagggcuaccaccugaugagcuuuccccagagcgcaccccacggagugguguuccugcacgugaccuacgugcccgcccaggagaagaacuucaccaccgccccagccaucugccacgacggcaaggcccacuuuccccgggagggcguguucgugagcaacggcacccacugguucgugacccagcggaacuucuacgagccccagaucaucaccaccgacaacaccuucgugagcggcaacugcgacguggugaucggcaucgugaacaacaccguguacgauccccugcagcccgagcuggacagcuucaaggaggagcuggacaaguacuucaagaaucacaccagccccgacguggaccugggcgacaucagcggcaucaacgccagcguggugaacauccagaaggagaucgaucggcugaacgagguggccaagaaccugaacgagagccugaucgaccugcaggagcugggcaaguacgagcaguacaucaaguggcccugguacaucuggcugggcuucaucgccggccugaucgccaucgugauggugaccaucaugcugugcugcaugaccagcugcugcagcugccugaagggcuguugcagcugcggcagcugcugcaaguucgacgaggacgacagcgagcccgugcugaagggcgugaagcugcacuacaccugaggacuagucccuguucccagagcccacuuuuuuuucuuuuuuugaaauaaaauagccugucuuucagaucucaaaggcucuuuucagagccaccaaaaaaaaaaaaaaaaaaaaaaaaaaaaaaaaaaaaaaaaaaaaaaaaaaaaaaaaaaaaaaaaaaaaaaaaaaaaaaaaaaaaaaaaaaaaaaaaaaaaa

SEQ ID NO: 23681 - RNA, 4191 nt, Artificial Sequence
  SARS-CoV-2/Wuhan/WIV05/2019__EPI_ISL_402128 spike protein mRNA gc (1-1273)(L18F_T20N_P26S_D138Y_R190S_K417T_E484K_N501Y_D614G_H655Y _T1027I)
aggagagggcgcuuggcuugcaaggacccugagcugcggcauugaagcacacccaacccaacucgacugaagucagccucacugaaccggaucugagaaucuucucucucugggcuugccagggcucuccgaaccuagcuagcauccucuucaauuccaacuagaaagcuuaccauguucguguuccuggugcugcugccccuggugagcagccagugcgugaacuucaccaaccggacccagcugccaagcgccuacaccaacagcuucacccggggcgucuacuaccccgacaagguguuccggagcagcguccugcacagcacccaggaccuguuccugcccuucuucagcaacgugaccugguuccacgccauccacgugagcggcaccaacggcaccaagcgguucgacaaccccgugcugcccuucaacgacggcguguacuucgccagcaccgagaagagcaacaucauccggggcuggaucuucggcaccacccuggacagcaagacccagagccugcugaucgugaauaacgccaccaacguggugaucaaggugugcgaguuccaguucugcaacuaccccuuccugggcguguacuaccacaagaacaacaagagcuggauggagagcgaguuccggguguacagcagcgccaacaacugcaccuucgaguacgugagccagcccuuccugauggaccuggagggcaagcagggcaacuucaagaaccugagcgaguucguguucaagaacaucgacggcuacuucaagaucuacagcaagcacaccccaaucaaccuggugcgggaucugccccagggcuucucagcccuggagccccugguggaccugcccaucggcaucaacaucacccgguuccagacccugcuggcccugcaccggagcuaccugaccccaggcgacagcagcagcggguggacagcaggcgcggcugcuuacuacgugggcuaccugcagccccggaccuuccugcugaaguacaacgagaacggcaccaucaccgacgccguggacugcgcccuggacccucugagcgagaccaagugcacccugaagagcuucaccguggagaagggcaucuaccagaccagcaacuuccgggugcagcccaccgagagcaucgugcgguuccccaacaucaccaaccugugccccuucggcgagguguucaacgccacccgguucgccagcguguacgccuggaaccggaagcggaucagcaacugcguggccgacuacagcgugcuguacaacagcgccagcuucagcaccuucaagugcuacggcgugagccccaccaagcugaacgaccugugcuucaccaacguguacgccgacagcuucgugauccguggcgacgaggugcggcagaucgcacccggccagacaggcaccaucgccgacuacaacuacaagcugcccgacgacuucaccggcugcgugaucgccuggaacagcaacaaccucgacagcaaggugggcggcaacuacaacuaccuguaccggcuguuccggaagagcaaccugaagcccuucgagcgggacaucagcaccgagaucuaccaagccggcuccaccccuugcaacggcgugaagggcuucaacugcuacuucccucugcagagcuacggcuuccagcccaccuacggcgugggcuaccagcccuaccgggugguggugcugagcuucgagcugcugcacgccccagccaccguguguggccccaagaagagcaccaaccuggugaagaacaagugcgugaacuucaacuucaacggccuuaccggcaccggcgugcugaccgagagcaacaagaaauuccugcccuuucagcaguucggccgggacaucgccgacaccaccgacgcugugcgggauccccagacccuggagauccuggacaucaccccuugcagcuucggcggcgugagcgugaucaccccaggcaccaacaccagcaaccagguggccgugcuguaccagggcgugaacugcaccgaggugcccguggccauccacgccgaccagcugacacccaccuggcgggucuacagcaccggcagcaacguguuccagacccgggccgguugccugaucggcgccgaguacgugaacaacagcuacgagugcgacauccccaucggcgccggcaucugugccagcuaccagacccagaccaauucaccccggagggcaaggagcguggccagccagagcaucaucgccuacaccaugagccugggcgccgagaacagcguggccuacagcaacaacagcaucgccauccccaccaacuucaccaucagcgugaccaccgagauucugcccgugagcaugaccaagaccagcguggacugcaccauguacaucugcggcgacagcaccgagugcagcaaccugcugcugcaguacggcagcuucugcacccagcugaaccgggcccugaccggcaucgccguggagcaggacaagaacacccaggagguguucgcccaggugaagcagaucuacaagaccccucccaucaaggacuucggcggcuucaacuucagccagauccugcccgaccccagcaagcccagcaagcggagcuucaucgaggaccugcuguucaacaaggugacccuagccgacgccggcuucaucaagcaguacggcgacugccucggcgacauagccgcccgggaccugaucugcgcccagaaguucaacggccugaccgugcugccuccccugcugaccgacgagaugaucgcccaguacaccagcgcccuguuagccggaaccaucaccagcggcuggacuuucggcgcuggagccgcucugcagauccccuucgccaugcagauggccuaccgguucaacggcaucggcgugacccagaacgugcuguacgagaaccagaagcugaucgccaaccaguucaacagcgccaucggcaagauccaggacagccugagcagcaccgcuagcgcccugggcaagcugcaggacguggugaaccagaacgcccaggcccugaacacccuggugaagcagcugagcagcaacuucggcgccaucagcagcgugcugaacgacauccugagccggcuggacaaggucgaggccgaggugcagaucgaccggcugaucacuggccggcugcagagccugcagaccuacgugacccagcagcugauccgggccgccgagauucgggccagcgccaaccuggccgccaucaagaugagcgagugcgugcugggccagagcaagcggguggacuucugcggcaagggcuaccaccugaugagcuuuccccagagcgcaccccacggagugguguuccugcacgugaccuacgugcccgcccaggagaagaacuucaccaccgccccagccaucugccacgacggcaaggcccacuuuccccgggagggcguguucgugagcaacggcacccacugguucgugacccagcggaacuucuacgagccccagaucaucaccaccgacaacaccuucgugagcggcaacugcgacguggugaucggcaucgugaacaacaccguguacgauccccugcagcccgagcuggacagcuucaaggaggagcuggacaaguacuucaagaaucacaccagccccgacguggaccugggcgacaucagcggcaucaacgccagcguggugaacauccagaaggagaucgaucggcugaacgagguggccaagaaccugaacgagagccugaucgaccugcaggagcugggcaaguacgagcaguacaucaaguggcccugguacaucuggcugggcuucaucgccggccugaucgccaucgugauggugaccaucaugcugugcugcaugaccagcugcugcagcugccugaagggcuguugcagcugcggcagcugcugcaaguucgacgaggacgacagcgagcccgugcugaagggcgugaagcugcacuacaccugaggacuagucccuguucccagagcccacuuuuuuuucuuuuuuugaaauaaaauagccugucuuucagaucucaaaggcucuuuucagagccaccaaaaaaaaaaaaaaaaaaaaaaaaaaaaaaaaaaaaaaaaaaaaaaaaaaaaaaaaaaaaaaaaaaaaaaaaaaaaaaaaaaaaaaaaaaaaaaaaaaaaa

SEQ ID NO: 23682 - RNA, 4191 nt, Artificial Sequence
  SARS-CoV-2/Wuhan/WIV05/2019__EPI_ISL_402128 spike protein mRNA gc (1-1273)(S13I_W152C_L452R_D614G)
aggagagggcgcuuggcuugcaaggacccugagcugcggcauugaagcacacccaacccaacucgacugaagucagccucacugaaccggaucugagaaucuucucucucugggcuugccagggcucuccgaaccuagcuagcauccucuucaauuccaacuagaaagcuuaccauguucguguuccuggugcugcugccccuggugagcauccagugcgugaaccugaccacccggacccagcugccaccagccuacaccaacagcuucacccggggcgucuacuaccccgacaagguguuccggagcagcguccugcacagcacccaggaccuguuccugcccuucuucagcaacgugaccugguuccacgccauccacgugagcggcaccaacggcaccaagcgguucgacaaccccgugcugcccuucaacgacggcguguacuucgccagcaccgagaagagcaacaucauccggggcuggaucuucggcaccacccuggacagcaagacccagagccugcugaucgugaauaacgccaccaacguggugaucaaggugugcgaguuccaguucugcaacgaccccuuccugggcguguacuaccacaagaacaacaagagcugcauggagagcgaguuccggguguacagcagcgccaacaacugcaccuucgaguacgugagccagcccuuccugauggaccuggagggcaagcagggcaacuucaagaaccugcgggaguucguguucaagaacaucgacggcuacuucaagaucuacagcaagcacaccccaaucaaccuggugcgggaucugccccagggcuucucagcccuggagccccugguggaccugcccaucggcaucaacaucacccgguuccagacccugcuggcccugcaccggagcuaccugaccccaggcgacagcagcagcggguggacagcaggcgcggcugcuuacuacgugggcuaccugcagccccggaccuuccugcugaaguacaacgagaacggcaccaucaccgacgccguggacugcgcccuggacccucugagcgagaccaagugcacccugaagagcuucaccguggagaagggcaucuaccagaccagcaacuuccgggugcagcccaccgagagcaucgugcgguuccccaacaucaccaaccugugccccuucggcgagguguucaacgccacccgguucgccagcguguacgccuggaaccggaagcggaucagcaacugcguggccgacuacagcgugcuguacaacagcgccagcuucagcaccuucaagugcuacggcgugagccccaccaagcugaacgaccugugcuucaccaacguguacgccgacagcuucgugauccguggcgacgaggugcggcagaucgcacccggccagacaggcaagaucgccgacuacaacuacaagcugcccgacgacuucaccggcugcgugaucgccuggaacagcaacaaccucgacagcaaggugggcggcaacuacaacuaccgcuaccggcuguuccggaagagcaaccugaagcccuucgagcgggacaucagcaccgagaucuaccaagccggcuccaccccuugcaacggcguggagggcuucaacugcuacuucccucugcagagcuacggcuuccagcccaccaacggcgugggcuaccagcccuaccgggugguggugcugagcuucgagcugcugcacgccccagccaccguguguggccccaagaagagcaccaaccuggugaagaacaagugcgugaacuucaacuucaacggccuuaccggcaccggcgugcugaccgagagcaacaagaaauuccugcccuuucagcaguucggccgggacaucgccgacaccaccgacgcugugcgggauccccagacccuggagauccuggacaucaccccuugcagcuucggcggcgugagcgugaucaccccaggcaccaacaccagcaaccagguggccgugcuguaccagggcgugaacugcaccgaggugcccguggccauccacgccgaccagcugacacccaccuggcgggucuacagcaccggcagcaacguguuccagacccgggccgguugccugaucggcgccgagcacgugaacaacagcuacgagugcgacauccccaucggcgccggcaucugugccagcuaccagacccagaccaauucaccccggagggcaaggagcguggccagccagagcaucaucgccuacaccaugagccugggcgccgagaacagcguggccuacagcaacaacagcaucgccauccccaccaacuucaccaucagcgugaccaccgagauucugcccgugagcaugaccaagaccagcguggacugcaccauguacaucugcggcgacagcaccgagugcagcaaccugcugcugcaguacggcagcuucugcacccagcugaaccgggcccugaccggcaucgccguggagcaggacaagaacacccaggagguguucgcccaggugaagcagaucuacaagaccccucccaucaaggacuucggcggcuucaacuucagccagauccugcccgaccccagcaagcccagcaagcggagcuucaucgaggaccugcuguucaacaaggugacccuagccgacgccggcuucaucaagcaguacggcgacugccucggcgacauagccgcccgggaccugaucugcgcccagaaguucaacggccugaccgugcugccuccccugcugaccgacgagaugaucgcccaguacaccagcgcccuguuagccggaaccaucaccagcggcuggacuuucggcgcuggagccgcucugcagauccccuucgccaugcagauggccuaccgguucaacggcaucggcgugacccagaacgugcuguacgagaaccagaagcugaucgccaaccaguucaacagcgccaucggcaagauccaggacagccugagcagcaccgcuagcgcccugggcaagcugcaggacguggugaaccagaacgcccaggcccugaacacccuggugaagcagcugagcagcaacuucggcgccaucagcagcgugcugaacgacauccugagccggcuggacaaggucgaggccgaggugcagaucgaccggcugaucacuggccggcugcagagccugcagaccuacgugacccagcagcugauccgggccgccgagauucgggccagcgccaaccuggccgccaccaagaugagcgagugcgugcugggccagagcaagcggguggacuucugcggcaagggcuaccaccugaugagcuuuccccagagcgcaccccacggagugguguuccugcacgugaccuacgugcccgcccaggagaagaacuucaccaccgccccagccaucugccacgacggcaaggcccacuuuccccgggagggcguguucgugagcaacggcacccacugguucgugacccagcggaacuucuacgagccccagaucaucaccaccgacaacaccuucgugagcggcaacugcgacguggugaucggcaucgugaacaacaccguguacgauccccugcagcccgagcuggacagcuucaaggaggagcuggacaaguacuucaagaaucacaccagccccgacguggaccugggcgacaucagcggcaucaacgccagcguggugaacauccagaaggagaucgaucggcugaacgagguggccaagaaccugaacgagagccugaucgaccugcaggagcugggcaaguacgagcaguacaucaaguggcccugguacaucuggcugggcuucaucgccggccugaucgccaucgugauggugaccaucaugcugugcugcaugaccagcugcugcagcugccugaagggcuguugcagcugcggcagcugcugcaaguucgacgaggacgacagcgagcccgugcugaagggcgugaagcugcacuacaccugaggacuagucccuguucccagagcccacuuuuuuuucuuuuuuugaaauaaaauagccugucuuucagaucucaaaggcucuuuucagagccaccaaaaaaaaaaaaaaaaaaaaaaaaaaaaaaaaaaaaaaaaaaaaaaaaaaaaaaaaaaaaaaaaaaaaaaaaaaaaaaaaaaaaaaaaaaaaaaaaaaaaa

SEQ ID NO: 23683 - RNA, 4191 nt, Artificial Sequence
  SARS-CoV-2/Wuhan/WIV05/2019__EPI_ISL_402128 spike protein mRNA gc (1-1273)
aggagagggcgcuuggcuugcaaggacccugagcugcggcauugaagcacacccaacccaacucgacugaagucagccucacugaaccggaucugagaaucuucucucucugggcuugccagggcucuccgaaccuagcuagcauccucuucaauuccaacuagaaagcuuaccauguucguguuccuggugcugcugccccuggugagcagccagugcgugaaccugaccacccggacccagcugcccccugccuacaccaacagcuucacccggggcguguacuaccccgacaagguguuccggagcagcgugcugcacagcacccaggaccuguuccugcccuucuucagcaacgugaccugguuccacgccauccacgugagcggcaccaacggcaccaagcgguucgacaacccagugcugcccuucaacgacggcguguacuucgccagcaccgagaagucaaacaucauccggggcuggaucuucggcaccacccuggacagcaagacacagagccugcugaucgugaacaacgccaccaacguggugaucaaggugugcgaguuucaguucugcaacgaccccuuccugggcguguacuaccacaagaacaacaagagcuggauggagagcgaguuccgggucuacagcagcgcuaacaauugcaccuucgaguacgugagccagcccuuccugauggaccucgagggcaagcagggcaacuucaagaaccugcgggaguucguguucaagaacaucgauggcuacuucaagaucuacagcaagcacacccccaucaaccuggugcgggaccugccccagggauucagcgcccuggagccucugguggaccugcccaucggcaucaacaucaccagguuccagacccugcuggcccugcaccggagcuaccugacccccggcgacagcagcagcggcuggaccgccggcgccgccgcauacuacgugggcuaccugcagccacggaccuuccugcugaaguacaacgagaacggcaccaucaccgacgccguggacugcgcccuggacccccugagcgagaccaagugcacccuaaagagcuucaccguggagaagggcaucuaccagaccagcaacuuccgggugcagcccacugagagcaucgugcgguuccccaacauuaccaaccugugucccuucggcgagguguucaacgccacccgguucgccagcguguacgccuggaaccggaagcggaucagcaacugcguggccgacuacagcgugcuguacaacagcgccagcuucagcaccuucaagugcuacggcgugagcccuaccaagcugaacgaccugugcuucaccaacguguacgcugacagcuucgugauccggggcgacgaggugcggcagaucgcccccggccagaccggcaagaucgccgacuacaacuacaagcugcccgacgacuucaccggcugcgugaucgccuggaacagcaacaaccuggacagcaaggugggcggcaacuacaacuaccuguaccggcuguuccguaagagcaaccugaagccauucgagcgggacaucagcaccgagaucuaccaggccggcagcacccccugcaacgguguggagggcuuuaacugcuacuucccccugcagagcuacggcuuccagcccaccaacggcgugggcuaccagcccuaccgggugguggugcugagcuucgagcugcugcacgcccccgccaccgugugcggcccuaaaaagagcaccaaccuggugaagaacaagugcgugaacuucaauuucaacggccugaccggcaccggcgugcugaccgagagcaacaagaaguuccugcccuuccagcaguucggccgggauaucgccgacaccaccgacgcagugcgggacccccagacccuggagauccuggacaucaccccaugcagcuucggcggcgugagcgucaucacccccggcacaaacaccagcaaccagguggccgugcuguaccaggacgugaacugcaccgaggugcccguggccauccacgccgaccagcugacccccaccuggcggguguacagcaccggaagcaacguguuccagacccgggccggcugccugaucggcgccgagcacgugaacaacuccuacgagugcgacauccccaucggcgcuggcaucugcgccagcuaccagacccagaccaacagcccccggcgggcccggagcguggccagccagagcaucaucgccuacaccaugagcuuaggcgccgagaacagcguggccuacagcaacaacagcaucgcgaucccuaccaacuucaccaucagcgugaccaccgagauacugcccgugagcaugaccaagaccagcguggacuguaccauguacaucugcggcgacagcaccgagugcagcaaccugcugcugcaguacggcagcuucugcacccagcugaaccgggcccugaccggcaucgccguggagcaggacaagaacacccaagagguguucgcccaggugaagcagaucuacaagacucccccaaucaaggacuucggcggcuucaacuucagccagauccugcccgaccccagcaagcccagcaagcggagcuucaucgaggaccugcuguucaacaaggugacccuggccgacgccggcuucaucaagcaguacggcgauugccugggcgacaucgccgcucgggaccugaucugcgcccagaaguucaacgggcugaccgugcugcccccucugcugaccgacgagaugaucgcccaguacaccagcgcccugcuugccggcaccaucaccagcggcuggaccuucggcgccggcgcagcccugcagauccccuucgccaugcagauggccuaccgguucaacggcaucggcgugacccagaacgugcuguacgagaaccagaagcugaucgccaaccaguucaacagcgccaucggcaagauccaggacagccugagcagcaccgccagcgcccugggcaagcugcaggacguggugaaccagaacgcucaggcccugaacacccuggugaagcagcugagcagcaacuucggcgccaucagcucagugcugaaugacauccugagcaggcuggacaagguggaggccgaggugcagaucgaccggcugaucaccggccggcugcagagccugcagaccuacgugacccagcagcugauccgggccgccgagauccgggccagcgccaaccuggcagccaccaagaugagcgagugcgugcugggccagagcaagcggguggacuuuugcggcaagggcuaccaccugaugagcuucccccagagcgccccacacggcgugguguuccuccacgucacauacgugcccgcccaggagaagaacuucaccaccgcccccgccauuugccacgacggcaaggcucacuucccccgggagggcguguucgugagcaacggaacccacugguucgugacccagcggaacuucuacgagccccagaucaucaccaccgacaacaccuucgugagcggcaacugcgacguggugaucggcaucgugaacaacaccguguacgacccccugcagccugagcuggacagcuucaaggaggagcuggacaaguacuucaagaaccacaccagccccgauguggaccugggcgacaucagcggcaucaacgccagcguggugaacauccagaaggagaucgaccggcugaacgagguggccaagaaccugaacgagagccugaucgaccugcaggagcugggcaaguacgagcaguacaucaaguggcccugguacaucuggcugggcuucaucgccggccugaucgccaucgugauggugaccaucaugcugugcugcaugaccagcugcuguagcugccugaagggcugcugcagcugcggcagcugcugcaaguucgacgaggacgacagcgagccagugcugaagggcgugaagcugcacuacaccugaggacuagucccuguucccagagcccacuuuuuuuucuuuuuuugaaauaaaauagccugucuuucagaucucaaaggcucuuuucagagccaccaaaaaaaaaaaaaaaaaaaaaaaaaaaaaaaaaaaaaaaaaaaaaaaaaaaaaaaaaaaaaaaaaaaaaaaaaaaaaaaaaaaaaaaaaaaaaaaaaaaaa

SEQ ID NO: 23684 - RNA, 4191 nt, Artificial Sequence
  SARS-CoV-2/Wuhan/WIV05/2019__EPI_ISL_402128 spike protein mRNA gc (1-1273)(D614G)
aggagagggcgcuuggcuugcaaggacccugagcugcggcauugaagcacacccaacccaacucgacugaagucagccucacugaaccggaucugagaaucuucucucucugggcuugccagggcucuccgaaccuagcuagcauccucuucaauuccaacuagaaagcuuaccauguucguguuccuggugcugcugccccuggugagcagccagugcgugaaccugaccacccggacccagcugcccccugccuacaccaacagcuucacccggggcguguacuaccccgacaagguguuccggagcagcgugcugcacagcacccaggaccuguuccugcccuucuucagcaacgugaccugguuccacgccauccacgugagcggcaccaacggcaccaagcgguucgacaacccagugcugcccuucaacgacggcguguacuucgccagcaccgagaagucaaacaucauccggggcuggaucuucggcaccacccuggacagcaagacacagagccugcugaucgugaacaacgccaccaacguggugaucaaggugugcgaguuucaguucugcaacgaccccuuccugggcguguacuaccacaagaacaacaagagcuggauggagagcgaguuccgggucuacagcagcgcuaacaauugcaccuucgaguacgugagccagcccuuccugauggaccucgagggcaagcagggcaacuucaagaaccugcgggaguucguguucaagaacaucgauggcuacuucaagaucuacagcaagcacacccccaucaaccuggugcgggaccugccccagggauucagcgcccuggagccucugguggaccugcccaucggcaucaacaucaccagguuccagacccugcuggcccugcaccggagcuaccugacccccggcgacagcagcagcggcuggaccgccggcgccgccgcauacuacgugggcuaccugcagccacggaccuuccugcugaaguacaacgagaacggcaccaucaccgacgccguggacugcgcccuggacccccugagcgagaccaagugcacccuaaagagcuucaccguggagaagggcaucuaccagaccagcaacuuccgggugcagcccacugagagcaucgugcgguuccccaacauuaccaaccugugucccuucggcgagguguucaacgccacccgguucgccagcguguacgccuggaaccggaagcggaucagcaacugcguggccgacuacagcgugcuguacaacagcgccagcuucagcaccuucaagugcuacggcgugagcccuaccaagcugaacgaccugugcuucaccaacguguacgcugacagcuucgugauccggggcgacgaggugcggcagaucgcccccggccagaccggcaagaucgccgacuacaacuacaagcugcccgacgacuucaccggcugcgugaucgccuggaacagcaacaaccuggacagcaaggugggcggcaacuacaacuaccuguaccggcuguuccguaagagcaaccugaagccauucgagcgggacaucagcaccgagaucuaccaggccggcagcacccccugcaacgguguggagggcuuuaacugcuacuucccccugcagagcuacggcuuccagcccaccaacggcgugggcuaccagcccuaccgggugguggugcugagcuucgagcugcugcacgcccccgccaccgugugcggcccuaaaaagagcaccaaccuggugaagaacaagugcgugaacuucaauuucaacggccugaccggcaccggcgugcugaccgagagcaacaagaaguuccugcccuuccagcaguucggccgggauaucgccgacaccaccgacgcagugcgggacccccagacccuggagauccuggacaucaccccaugcagcuucggcggcgugagcgucaucacccccggcacaaacaccagcaaccagguggccgugcuguaccagggagugaacugcaccgaggugcccguggccauccacgccgaccagcugacccccaccuggcggguguacagcaccggcagcaacguguuccagacccgggccggcugccugaucggcgccgagcacgugaacaacuccuacgagugcgacauccccaucggcgcuggcaucugcgccagcuaccagacccagaccaacagcccccggcgggcccggagcguggccagccagagcaucaucgccuacaccaugagcuuaggcgccgagaacagcguggccuacagcaacaacagcaucgcgaucccuaccaacuucaccaucagcgugaccaccgagauacugcccgugagcaugaccaagaccagcguggacuguaccauguacaucugcggcgacagcaccgagugcagcaaccugcugcugcaguacggcagcuucugcacccagcugaaccgggcccugaccggcaucgccguggagcaggacaagaacacccaagagguguucgcccaggugaagcagaucuacaagacucccccaaucaaggacuucggcggcuucaacuucagccagauccugcccgaccccagcaagcccagcaagcggagcuucaucgaggaccugcuguucaacaaggugacccuggccgacgccggcuucaucaagcaguacggcgacugccugggggauaucgccgcucgggaccugaucugcgcccagaaguucaacggccugaccgugcugcccccucugcugaccgacgagaugaucgcccaguacaccagcgcccugcuugccggcaccaucaccagcggcuggaccuucggcgccggcgcagcccugcagauccccuucgccaugcagauggccuaccgguucaacggcaucggcgugacccagaacgugcuguacgagaaccagaagcugaucgccaaccaguucaacagcgccaucggcaagauccaggacagccugagcagcaccgccagcgcccugggcaagcugcaggacguggugaaccagaacgcucaggcccugaacacccuggugaagcagcugagcagcaacuucggcgccaucagcucagugcugaaugacauccugagcaggcuggacaagguggaggccgaggugcagaucgaccggcugaucaccggccggcugcagagccugcagaccuacgugacccagcagcugauccgggccgccgagauccgggccagcgccaaccuggcagccaccaagaugagcgagugcgugcugggccagagcaagcggguggacuuuugcggcaagggcuaccaccugaugagcuucccccagagcgccccacacggcgugguguuccuccacgucacauacgugcccgcccaggagaagaacuucaccaccgcccccgccauuugccacgacggcaaggcucacuucccccgggagggaguguucgugagcaacggcacccacugguucgugacccagcggaacuucuacgagccccagaucaucaccaccgacaacaccuucgugagcggcaacugcgacguggugaucggcaucgugaacaacaccguguacgacccccugcagccugagcuggacagcuucaaggaggagcuggacaaguacuucaagaaccacaccagccccgacguggaucugggcgacaucagcggcaucaacgccagcguggugaacauccagaaggagaucgaccggcugaacgagguggccaagaaccugaacgagagccugaucgaccugcaggagcugggcaaguacgagcaguacaucaaguggcccugguacaucuggcugggcuucaucgccggccugaucgccaucgugauggugaccaucaugcugugcugcaugaccagcugcuguagcugccugaagggcugcugcagcugcggcagcugcugcaaguucgacgaggacgacagcgagccagugcugaagggcgugaagcugcacuacaccugaggacuagucccuguucccagagcccacuuuuuuuucuuuuuuugaaauaaaauagccugucuuucagaucucaaaggcucuuuucagagccaccaaaaaaaaaaaaaaaaaaaaaaaaaaaaaaaaaaaaaaaaaaaaaaaaaaaaaaaaaaaaaaaaaaaaaaaaaaaaaaaaaaaaaaaaaaaaaaaaaaaaa

SEQ ID NO: 23685 - RNA, 4191 nt, Artificial Sequence
  SARS-CoV-2/Wuhan/WIV05/2019__EPI_ISL_402128 spike protein mRNA gc (1-1273)(A222V_D614G)
aggagagggcgcuuggcuugcaaggacccugagcugcggcauugaagcacacccaacccaacucgacugaagucagccucacugaaccggaucugagaaucuucucucucugggcuugccagggcucuccgaaccuagcuagcauccucuucaauuccaacuagaaagcuuaccauguucguguuccuggugcugcugccccuggugagcagccagugcgugaaccugaccacccggacccagcugcccccugccuacaccaacagcuucacccggggcguguacuaccccgacaagguguuccggagcagcgugcugcacagcacccaggaccuguuccugcccuucuucagcaacgugaccugguuccacgccauccacgugagcggcaccaacggcaccaagcgguucgacaacccagugcugcccuucaacgacggcguguacuucgccagcaccgagaagucaaacaucauccggggcuggaucuucggcaccacccuggacagcaagacacagagccugcugaucgugaacaacgccaccaacguggugaucaaggugugcgaguuucaguucugcaacgaccccuuccugggcguguacuaccacaagaacaacaagagcuggauggagagcgaguuccgggucuacagcagcgcuaacaauugcaccuucgaguacgugagccagcccuuccugauggaccucgagggcaagcagggcaacuucaagaaccugcgggaguucguguucaagaacaucgauggcuacuucaagaucuacagcaagcacacccccaucaaccuggugcgggaccugccccagggauucagcgugcuggagccucugguggaccugcccaucggcaucaacaucaccagguuccagacccugcuggcccugcaccggagcuaccugacccccggcgacagcagcagcggcuggaccgccggcgccgccgccuacuacgugggcuaccugcagccacggaccuuccugcugaaguacaacgagaacggcaccaucaccgacgcaguggacugcgcccuggacccccugagcgagaccaagugcacccuaaagagcuucaccguggagaagggcaucuaccagaccagcaacuuccgggugcagcccacugagagcaucgugcgguuccccaacauuaccaaccugugucccuucggcgagguguucaacgccacccgguucgccagcguguacgccuggaaccggaagcggaucagcaacugcguggccgacuacagcgugcuguacaacagcgccagcuucagcaccuucaagugcuacggcgugagcccuaccaagcugaacgaccugugcuucaccaacguguacgccgacagcuucgugauccggggcgacgaggugcggcagaucgcucccggccagaccggcaagaucgccgacuacaacuacaagcugcccgacgacuucaccggcugcgugaucgccuggaacagcaacaaccuggacagcaaggugggcggcaacuacaacuaccuguaccggcuguuccguaagagcaaccugaagccauucgagcgggacaucagcaccgagaucuaccaggccggcagcacccccugcaacgguguggagggcuuuaacugcuacuucccccugcagagcuacggcuuccagcccaccaacggcgugggcuaccagcccuaccgggugguggugcugagcuucgagcugcugcacgcccccgccaccgugugcggcccuaaaaagagcaccaaccuggugaagaacaagugcgugaacuucaauuucaacggccugaccggcaccggcgugcugaccgagagcaacaagaaguuccugcccuuccagcaguucggccgggauaucgccgacaccaccgacgccgugcgggacccccagacccuggagauccuggacaucaccccaugcagcuucggcggcgucagcgugaucacccccggcacaaacaccagcaaccagguggcagugcuguaccagggagugaacugcaccgaggugcccguggccauccacgccgaccagcugacccccaccuggcggguguacagcaccggcagcaacguguuccagacccgggccggcugccugaucggcgccgagcacgugaacaacuccuacgagugcgacauccccaucggcgccggcaucugcgcuagcuaccagacccagaccaacagcccccggcgggcccggagcguggccagccagagcaucaucgccuacaccaugagcuuaggcgccgagaacagcguggccuacagcaacaacagcaucgccaucccuaccaacuucaccaucagcgugaccaccgagauacugcccgugagcaugaccaagaccagcguggacuguaccauguacaucugcggcgacagcaccgagugcagcaaccugcugcugcaguacggcagcuucugcacccagcugaaccgggcgcugaccggcaucgccguggagcaggacaagaacacccaagagguguucgcccaggugaagcagaucuacaagacucccccaaucaaggacuucggcggcuucaacuucagccagauccugcccgaccccagcaagcccagcaagcggagcuucaucgaggaccugcuguucaacaaggugacccuggccgacgccggcuucaucaagcaguacggcgacugccugggggauaucgccgcccgggaccugaucugcgcucagaaguucaacggccugaccgugcugcccccucugcugaccgacgagaugaucgcccaguacaccagcgcccugcuugccggcaccaucaccagcggcuggaccuucggcgccggcgccgcacugcagauccccuucgccaugcagauggccuaccgguucaacggcaucggcgugacccagaacgugcuguacgagaaccagaagcugaucgccaaccaguucaacagcgccaucggcaagauccaggacagccugagcagcaccgccagcgcccugggcaagcugcaggacguggugaaccagaacgcccaggcucugaacacccuggugaagcagcugagcagcaacuucggcgccaucagcucagugcugaaugacauccugagcaggcuggacaagguggaggccgaggugcagaucgaccggcugaucaccggccggcugcagagccugcagaccuacgugacccagcagcugauccgggccgccgagauccgggccagcgccaaccuggccgcaaccaagaugagcgagugcgugcugggccagagcaagcggguggacuuuugcggcaagggcuaccaccugaugagcuucccccagagcgccccacacggcguggucuuccuccacgugacauacgugcccgcccaggagaagaacuucaccaccgcccccgccauuugccacgacggcaaggcccacuucccccgggagggaguguucgugagcaacggcacccacugguucgugacccagcggaacuucuacgagccccagaucaucaccaccgacaacaccuucgugagcggcaacugcgacguggugaucggcaucgugaacaacaccguguacgacccccugcagccugagcuggacagcuucaaggaggagcuggacaaguacuucaagaaccacaccagccccgacguggaucugggcgacaucagcggcaucaacgcuagcguggugaacauccagaaggagaucgaccggcugaacgagguggccaagaaccugaacgagagccugaucgaccugcaggagcugggcaaguacgagcaguacaucaaguggcccugguacaucuggcugggcuucaucgccggccugaucgccaucgugauggugaccaucaugcugugcugcaugaccagcugcuguagcugccugaagggcugcugcagcugcggcagcugcugcaaguucgacgaggacgacagcgagccagugcugaagggcgugaagcugcacuacaccugaggacuagucccuguucccagagcccacuuuuuuuucuuuuuuugaaauaaaauagccugucuuucagaucucaaaggcucuuuucagagccaccaaaaaaaaaaaaaaaaaaaaaaaaaaaaaaaaaaaaaaaaaaaaaaaaaaaaaaaaaaaaaaaaaaaaaaaaaaaaaaaaaaaaaaaaaaaaaaaaaaaaa

SEQ ID NO: 23686 - RNA, 4191 nt, Artificial Sequence
  SARS-CoV-2/Wuhan/WIV05/2019__EPI_ISL_402128 spike protein mRNA gc (1-1273)(N439K_D614G)
aggagagggcgcuuggcuugcaaggacccugagcugcggcauugaagcacacccaacccaacucgacugaagucagccucacugaaccggaucugagaaucuucucucucugggcuugccagggcucuccgaaccuagcuagcauccucuucaauuccaacuagaaagcuuaccauguucguguuccuggugcugcugccccuggugagcagccagugcgugaaccugaccacccggacccagcugcccccugccuacaccaacagcuucacccggggcguguacuaccccgacaagguguuccggagcagcgugcugcacagcacccaggaccuguuccugcccuucuucagcaacgugaccugguuccacgccauccacgugagcggcaccaacggcaccaagcgguucgacaacccagugcugcccuucaacgacggcguguacuucgccagcaccgagaagucaaacaucauccggggcuggaucuucggcaccacccuggacagcaagacacagagccugcugaucgugaacaacgccaccaacguggugaucaaggugugcgaguuucaguucugcaacgaccccuuccugggcguguacuaccacaagaacaacaagagcuggauggagagcgaguuccgggucuacagcagcgcuaacaauugcaccuucgaguacgugagccagcccuuccugauggaccucgagggcaagcagggcaacuucaagaaccugcgggaguucguguucaagaacaucgauggcuacuucaagaucuacagcaagcacacccccaucaaccuggugcgggaccugccccagggauucagcgcccuggagccucugguggaccugcccaucggcaucaacaucaccagguuccagacccugcuggcccugcaccggagcuaccugacccccggcgacagcagcagcggcuggaccgccggcgccgccgcauacuacgugggcuaccugcagccacggaccuuccugcugaaguacaacgagaacggcaccaucaccgacgccguggacugcgcccuggacccccugagcgagaccaagugcacccuaaagagcuucaccguggagaagggcaucuaccagaccagcaacuuccgggugcagcccacugagagcaucgugcgguuccccaacauuaccaaccugugucccuucggcgagguguucaacgccacccgguucgccagcguguacgccuggaaccggaagcggaucagcaacugcguggccgacuacagcgugcuguacaacagcgccagcuucagcaccuucaagugcuacggcgugagcccuaccaagcugaacgaccugugcuucaccaacguguacgcugacagcuucgugauccggggcgacgaggugcggcagaucgcccccggccagaccggcaagaucgccgacuacaacuacaagcugcccgacgacuucaccggcugcgugaucgccuggaacagcaagaaccuggacagcaaggugggcggcaacuacaacuaccuguaccggcuguuccguaagagcaaccugaagccauucgagcgggacaucagcaccgagaucuaccaggccggcagcacccccugcaacgguguggagggcuuuaacugcuacuucccccugcagagcuacggcuuccagcccaccaacggcgugggcuaccagcccuaccgggugguggugcugagcuucgagcugcugcacgcccccgccaccgugugcggcccuaaaaagagcaccaaccuggugaagaacaagugcgugaacuucaacuucaauggccugaccggcaccggcgugcugaccgagagcaacaagaaguuccugcccuuccagcaguucggccgggauaucgccgacaccaccgacgcagugcgggacccccagacccuggagauccuggacaucaccccaugcagcuucggcggcgugagcgucaucacccccggcacaaacaccagcaaccagguggccgugcuguaccagggagugaacugcaccgaggugcccguggccauccacgccgaccagcugacccccaccuggcggguguacagcaccggcagcaacguguuccagacccgggccggcugccugaucggcgccgagcacgugaacaacuccuacgagugcgacauccccaucggcgcuggcaucugcgccagcuaccagacccagaccaacagcccccggcgggcccggagcguggccagccagagcaucaucgccuacaccaugagcuuaggcgccgagaacagcguggccuacagcaacaacagcaucgcgaucccuaccaacuucaccaucagcgugaccaccgagauacugcccgugagcaugaccaagaccagcguggacuguaccauguacaucugcggcgacagcaccgagugcagcaaccugcugcugcaguacggcagcuucugcacccagcugaaccgggcccugaccggcaucgccguggagcaggacaagaacacccaagagguguucgcccaggugaagcagaucuacaagacucccccaaucaaggacuucggcggcuucaacuucagccagauccugcccgaccccagcaagcccagcaagcggagcuucaucgaggaccugcuguucaacaaggugacccuggccgacgccggcuucaucaagcaguacggcgacugccugggggauaucgccgcucgggaccugaucugcgcccagaaguucaacggccugaccgugcugcccccucugcugaccgacgagaugaucgcccaguacaccagcgcccugcuugccggcaccaucaccagcggcuggaccuucggcgccggcgcagcccugcagauccccuucgccaugcagauggccuaccgguucaacggcaucggcgugacccagaacgugcuguacgagaaccagaagcugaucgccaaccaguucaacagcgccaucggcaagauccaggacagccugagcagcaccgccagcgcccugggcaagcugcaggacguggugaaccagaacgcucaggcccugaacacccuggugaagcagcugagcagcaacuucggcgccaucagcucagugcugaacgacauccugagcaggcuggacaagguggaggccgaggugcagaucgaccggcugaucaccggccggcugcagagccugcagaccuacgugacccagcagcugauccgggccgccgagauccgggccagcgccaaucuggcagccaccaagaugagcgagugcgugcugggccagagcaagcggguggacuuuugcggcaagggcuaccaccugaugagcuucccccagagcgccccacacggcgugguguuccuccacgucacauacgugcccgcccaggagaagaacuucaccaccgcccccgccauuugccacgacggcaaggcucacuucccccgggagggaguguucgugagcaacggcacccacugguucgugacccagcggaacuucuacgagccccagaucaucaccaccgacaacaccuucgugagcggcaacugcgacguggugaucggcaucgugaacaacaccguguacgacccccugcagccugagcuggacagcuucaaggaggagcuggacaaguacuucaagaaccacaccagccccgacguggaucugggcgacaucagcggcaucaacgccagcguggugaacauccagaaggagaucgaccggcugaacgagguggccaagaaccugaacgagagccugaucgaccugcaggagcugggcaaguacgagcaguacaucaaguggcccugguacaucuggcugggcuucaucgccggccugaucgccaucgugauggugaccaucaugcugugcugcaugaccagcugcuguagcugccugaagggcugcugcagcugcggcagcugcugcaaguucgacgaggacgacagcgagccagugcugaagggcgugaagcugcacuacaccugaggacuagucccuguucccagagcccacuuuuuuuucuuuuuuugaaauaaaauagccugucuuucagaucucaaaggcucuuuucagagccaccaaaaaaaaaaaaaaaaaaaaaaaaaaaaaaaaaaaaaaaaaaaaaaaaaaaaaaaaaaaaaaaaaaaaaaaaaaaaaaaaaaaaaaaaaaaaaaaaaaaaa

SEQ ID NO: 23687 - RNA, 4191 nt, Artificial Sequence
  SARS-CoV-2/Wuhan/WIV05/2019__EPI_ISL_402128 spike protein mRNA gc (1-1273)(S477N_D614G)
aggagagggcgcuuggcuugcaaggacccugagcugcggcauugaagcacacccaacccaacucgacugaagucagccucacugaaccggaucugagaaucuucucucucugggcuugccagggcucuccgaaccuagcuagcauccucuucaauuccaacuagaaagcuuaccauguucguguuccuggugcugcugccccuggugagcagccagugcgugaaccugaccacccggacccagcugcccccugccuacaccaacagcuucacccggggcguguacuaccccgacaagguguuccggagcagcgugcugcacagcacccaggaccuguuccugcccuucuucagcaacgugaccugguuccacgccauccacgugagcggcaccaacggcaccaagcgguucgacaacccagugcugcccuucaacgacggcguguacuucgccagcaccgagaagucaaacaucauccggggcuggaucuucggcaccacccuggacagcaagacacagagccugcugaucgugaacaacgccaccaacguggugaucaaggugugcgaguuucaguucugcaacgaccccuuccugggcguguacuaccacaagaacaacaagagcuggauggagagcgaguuccgggucuacagcagcgcuaacaauugcaccuucgaguacgugagccagcccuuccugauggaccucgagggcaagcagggcaacuucaagaaccugcgggaguucguguucaagaacaucgauggcuacuucaagaucuacagcaagcacacccccaucaaccuggugcgggaccugccccagggauucagcgcccuggagccucugguggaccugcccaucggcaucaacaucaccagguuccagacccugcuggcccugcaccggagcuaccugacccccggcgacagcagcagcggcuggaccgccggcgccgccgcauacuacgugggcuaccugcagccacggaccuuccugcugaaguacaacgagaacggcaccaucaccgacgccguggacugcgcccuggacccccugagcgagaccaagugcacccuaaagagcuucaccguggagaagggcaucuaccagaccagcaacuuccgggugcagcccacugagagcaucgugcgguuccccaacauuaccaaccugugucccuucggcgagguguucaacgccacccgguucgccagcguguacgccuggaaccggaagcggaucagcaacugcguggccgacuacagcgugcuguacaacagcgccagcuucagcaccuucaagugcuacggcgugagcccuaccaagcugaacgaccugugcuucaccaacguguacgcugacagcuucgugauccggggcgacgaggugcggcagaucgcccccggccagaccggcaagaucgccgacuacaacuacaagcugcccgacgacuucaccggcugcgugaucgccuggaacagcaacaaccuggacagcaaggugggcggcaacuacaacuaccuguaccggcuguuccguaagagcaaccugaagccauucgagcgggacaucagcaccgagaucuaccaggccggcaacacccccugcaacgguguggagggcuuuaacugcuacuucccccugcagagcuacggcuuccagcccaccaacggcgugggcuaccagcccuaccgggugguggugcugagcuucgagcugcugcacgcccccgccaccgugugcggcccuaaaaagagcaccaaccuggugaagaacaagugcgugaauuucaacuucaacggccugaccggcaccggcgugcugaccgagagcaacaagaaguuccugcccuuccagcaguucggccgggauaucgccgacaccaccgacgcagugcgggacccccagacccuggagauccuggacaucaccccaugcagcuucggcggcgugagcgucaucacccccggcacaaacaccagcaaccagguggccgugcuguaccagggagugaacugcaccgaggugcccguggccauccacgccgaccagcugacccccaccuggcggguguacagcaccggcagcaacguguuccagacccgggccggcugccugaucggcgccgagcacgugaacaacagcuacgagugcgacauccccaucggcgcuggcaucugcgccuccuaccagacccagaccaacagcccccggcgggcccggagcguggccagccagagcaucaucgccuacaccaugagcuuaggcgccgagaacagcguggccuacagcaacaacagcaucgcgaucccuaccaacuucaccaucagcgugaccaccgagauacugcccgugagcaugaccaagaccagcguggacuguaccauguacaucugcggcgacagcaccgagugcagcaaccugcugcugcaguacggcagcuucugcacccagcugaaccgggcccugaccggcaucgccguggagcaggacaagaacacccaagagguguucgcccaggugaagcagaucuacaagacucccccaaucaaggacuucggcggcuucaacuucagccagauccugcccgaccccagcaagcccagcaagcggagcuucaucgaggaccugcuguucaacaaggugacccuggccgacgccggcuucaucaagcaguacggcgacugccugggggauaucgccgcucgggaccugaucugcgcccagaaguucaacggccugaccgugcugcccccucugcugaccgacgagaugaucgcccaguacaccagcgcccugcuugccggcaccaucaccagcggcuggaccuucggcgccggcgcagcccugcagauccccuucgccaugcagauggccuaccgguucaacggcaucggcgugacccagaacgugcuguacgagaaccagaagcugaucgccaaccaguucaacagcgccaucggcaagauccaggacagccugagcagcaccgccagcgcccugggcaagcugcaggacguggugaaccagaacgcucaggcccugaacacccuggugaagcagcugagcagcaauuucggcgccaucagcagcgugcugaacgacauccugucaaggcuggacaagguggaggccgaggugcagaucgaccggcugaucaccggccggcugcagagccugcagaccuacgugacccagcagcugauccgggccgccgagauccgggccagcgccaaccuggcagccaccaagaugagcgagugcgugcugggccagagcaagcggguggacuuuugcggcaagggcuaccaccugaugagcuucccccagagcgccccacacggcgugguguuccuccacgucacauacgugcccgcccaggagaagaacuucaccaccgcccccgccauuugccacgacggcaaggcucacuucccccgggagggaguguucgugagcaacggcacccacugguucgugacccagcggaacuucuacgagccccagaucaucaccaccgacaacaccuucgugagcggcaacugcgacguggugaucggcaucgugaacaacaccguguacgacccccugcagccugagcuggacagcuucaaggaggagcuggacaaguacuucaagaaccacaccagccccgacguggaucugggcgacaucagcggcaucaacgccagcguggugaacauccagaaggagaucgaccggcugaacgagguggccaagaaccugaacgagagccugaucgaccugcaggagcugggcaaguacgagcaguacaucaaguggcccugguacaucuggcugggcuucaucgccggccugaucgccaucgugauggugaccaucaugcugugcugcaugaccagcugcuguagcugccugaagggcugcugcagcugcggcagcugcugcaaguucgacgaggacgacagcgagccagugcugaagggcgugaagcugcacuacaccugaggacuagucccuguucccagagcccacuuuuuuuucuuuuuuugaaauaaaauagccugucuuucagaucucaaaggcucuuuucagagccaccaaaaaaaaaaaaaaaaaaaaaaaaaaaaaaaaaaaaaaaaaaaaaaaaaaaaaaaaaaaaaaaaaaaaaaaaaaaaaaaaaaaaaaaaaaaaaaaaaaaaa

SEQ ID NO: 23688 - RNA, 4191 nt, Artificial Sequence
  SARS-CoV-2/Wuhan/WIV05/2019__EPI_ISL_402128 spike protein mRNA gc (1-1273)(N501Y_D614G)
aggagagggcgcuuggcuugcaaggacccugagcugcggcauugaagcacacccaacccaacucgacugaagucagccucacugaaccggaucugagaaucuucucucucugggcuugccagggcucuccgaaccuagcuagcauccucuucaauuccaacuagaaagcuuaccauguucguguuccuggugcugcugccccuggugagcagccagugcgugaaccugaccacccggacccagcugcccccugccuacaccaacagcuucacccggggcguguacuaccccgacaagguguuccggagcagcgugcugcacagcacccaggaccuguuccugcccuucuucagcaacgugaccugguuccacgccauccacgugagcggcaccaacggcaccaagcgguucgacaacccagugcugcccuucaacgacggcguguacuucgccagcaccgagaagucaaacaucauccggggcuggaucuucggcaccacccuggacagcaagacacagagccugcugaucgugaacaacgccaccaacguggugaucaaggugugcgaguuucaguucugcaacgaccccuuccugggcguguacuaccacaagaacaacaagagcuggauggagagcgaguuccgggucuacagcagcgcuaacaauugcaccuucgaguacgugagccagcccuuccugauggaccucgagggcaagcagggcaacuucaagaaccugcgggaguucguguucaagaacaucgauggcuacuucaagaucuacagcaagcacacccccaucaaccuggugcgggaccugccccagggauucagcgcccuggagccucugguggaccugcccaucggcaucaacaucaccagguuccagacccugcuggcccugcaccggagcuaccugacccccggcgacagcagcagcggcuggaccgccggcgccgccgcauacuacgugggcuaccugcagccacggaccuuccugcugaaguacaacgagaacggcaccaucaccgacgccguggacugcgcccuggacccccugagcgagaccaagugcacccuaaagagcuucaccguggagaagggcaucuaccagaccagcaacuuccgggugcagcccacugagagcaucgugcgguuccccaacauuaccaaccugugucccuucggcgagguguucaacgccacccgguucgccagcguguacgccuggaaccggaagcggaucagcaacugcguggccgacuacagcgugcuguacaacagcgccagcuucagcaccuucaagugcuacggcgugagcccuaccaagcugaacgaccugugcuucaccaacguguacgcugacagcuucgugauccggggcgacgaggugcggcagaucgcccccggccagaccggcaagaucgccgacuacaacuacaagcugcccgacgacuucaccggcugcgugaucgccuggaacagcaacaaccuggacagcaaggugggcggcaacuacaacuaccuguaccggcuguuccguaagagcaaccugaagccauucgagcgggacaucagcaccgagaucuaccaggccggcagcacccccugcaacgguguggagggcuuuaacugcuacuucccccugcagagcuacggcuuccagcccaccuacggcgugggcuaccagcccuaccgggugguggugcugagcuucgagcugcugcacgcccccgccaccgugugcggcccuaaaaagagcaccaaccuggugaagaacaagugcgugaacuucaacuucaauggccugaccggcaccggcgugcugaccgagagcaacaagaaguuccugcccuuccagcaguucggccgggauaucgccgacaccaccgacgcagugcgggacccccagacccuggagauccuggacaucaccccaugcagcuucggcggcgugagcgucaucacccccggcacaaacaccagcaaccagguggccgugcuguaccagggagugaacugcaccgaggugcccguggccauccacgccgaccagcugacccccaccuggcggguguacagcaccggcagcaacguguuccagacccgggccggcugccugaucggcgccgagcacgugaacaacuccuacgagugcgacauccccaucggcgcuggcaucugcgccagcuaccagacccagaccaacagcccccggcgggcccggagcguggccagccagagcaucaucgccuacaccaugagcuuaggcgccgagaacagcguggccuacagcaacaacagcaucgcgaucccuaccaacuucaccaucagcgugaccaccgagauacugcccgugagcaugaccaagaccagcguggacuguaccauguacaucugcggcgacagcaccgagugcagcaaccugcugcugcaguacggcagcuucugcacccagcugaaccgggcccugaccggcaucgccguggagcaggacaagaacacccaagagguguucgcccaggugaagcagaucuacaagacucccccaaucaaggacuucggcggcuucaacuucagccagauccugcccgaccccagcaagcccagcaagcggagcuucaucgaggaccugcuguucaacaaggugacccuggccgacgccggcuucaucaagcaguacggcgacugccugggggauaucgccgcucgggaccugaucugcgcccagaaguucaacggccugaccgugcugcccccucugcugaccgacgagaugaucgcccaguacaccagcgcccugcuugccggcaccaucaccagcggcuggaccuucggcgccggcgcagcccugcagauccccuucgccaugcagauggccuaccgguucaacggcaucggcgugacccagaacgugcuguacgagaaccagaagcugaucgccaaccaguucaacagcgccaucggcaagauccaggacagccugagcagcaccgccagcgcccugggcaagcugcaggacguggugaaccagaacgcucaggcccugaacacccuggugaagcagcugagcagcaacuucggcgccaucagcucagugcugaacgacauccugagcaggcuggacaagguggaggccgaggugcagaucgaccggcugaucaccggccggcugcagagccugcagaccuacgugacccagcagcugauccgggccgccgagauccgggccagcgccaaucuggcagccaccaagaugagcgagugcgugcugggccagagcaagcggguggacuuuugcggcaagggcuaccaccugaugagcuucccccagagcgccccacacggcgugguguuccuccacgucacauacgugcccgcccaggagaagaacuucaccaccgcccccgccauuugccacgacggcaaggcucacuucccccgggagggaguguucgugagcaacggcacccacugguucgugacccagcggaacuucuacgagccccagaucaucaccaccgacaacaccuucgugagcggcaacugcgacguggugaucggcaucgugaacaacaccguguacgacccccugcagccugagcuggacagcuucaaggaggagcuggacaaguacuucaagaaccacaccagccccgacguggaucugggcgacaucagcggcaucaacgccagcguggugaacauccagaaggagaucgaccggcugaacgagguggccaagaaccugaacgagagccugaucgaccugcaggagcugggcaaguacgagcaguacaucaaguggcccugguacaucuggcugggcuucaucgccggccugaucgccaucgugauggugaccaucaugcugugcugcaugaccagcugcuguagcugccugaagggcugcugcagcugcggcagcugcugcaaguucgacgaggacgacagcgagccagugcugaagggcgugaagcugcacuacaccugaggacuagucccuguucccagagcccacuuuuuuuucuuuuuuugaaauaaaauagccugucuuucagaucucaaaggcucuuuucagagccaccaaaaaaaaaaaaaaaaaaaaaaaaaaaaaaaaaaaaaaaaaaaaaaaaaaaaaaaaaaaaaaaaaaaaaaaaaaaaaaaaaaaaaaaaaaaaaaaaaaaaa

SEQ ID NO: 23689 - RNA, 4185 nt, Artificial Sequence
  SARS-CoV-2/Wuhan/WIV05/2019__EPI_ISL_402128 spike protein mRNA gc (1-1273)(H69del_V70del_D614G)
aggagagggcgcuuggcuugcaaggacccugagcugcggcauugaagcacacccaacccaacucgacugaagucagccucacugaaccggaucugagaaucuucucucucugggcuugccagggcucuccgaaccuagcuagcauccucuucaauuccaacuagaaagcuuaccauguucguguuccuggugcugcugccccuggugagcagccagugcgugaaccugaccacccggacccagcugcccccugccuacaccaacagcuucacccggggcguguacuaccccgacaagguguuccggagcagcgugcugcacagcacccaggaccuguuccugcccuucuucagcaacgugaccugguuccacgccaucagcggcaccaacggcaccaagcgguucgacaacccagugcugcccuucaacgacggcguguacuucgccagcaccgagaagucaaacaucauccggggcuggaucuucggcaccacccuggacagcaagacacagagccugcugaucgugaacaacgccaccaacguggugaucaaggugugcgaguuucaguucugcaacgaccccuuccugggcguguacuaccacaagaacaacaagagcuggauggagagcgaguuccggguguacagcagcgcuaacaauugcaccuucgaguacgucagccagcccuuccugauggaccucgagggcaagcagggcaacuucaagaaccugcgggaguucguguucaagaacaucgauggcuacuucaagaucuacagcaagcacacccccaucaaccuggugcgggaccugccccagggauucagcgcccuggagccucugguggaccugcccaucggcaucaacaucaccagguuccagacccugcuggcccugcaccggagcuaccugacccccggcgacagcagcagcggcuggaccgccggcgccgccgcauacuacgugggcuaccugcagccacggaccuuccugcugaaguacaacgagaacggcaccaucaccgacgccguggacugcgcccuggacccccugagcgagaccaagugcacccuaaagagcuucaccguggagaagggcaucuaccagaccagcaacuuccgggugcagcccacugagagcaucgugcgguuccccaacauuaccaaccugugucccuucggcgagguguucaacgccacccgguucgccagcguguacgccuggaaccggaagcggaucagcaacugcguggccgacuacagcgugcuguacaacagcgccagcuucagcaccuucaagugcuacggcgugagcccuaccaagcugaacgaccugugcuucaccaacguguacgcugacagcuucgugauccggggcgacgaggugcggcagaucgcccccggccagaccggcaagaucgccgacuacaacuacaagcugcccgacgacuucaccggcugcgugaucgccuggaacagcaacaaccuggacagcaaggugggcggcaacuacaacuaccuguaccggcuguuccguaagagcaaccugaagccauucgagcgggacaucagcaccgagaucuaccaggccggcagcacccccugcaacgguguggagggcuuuaacugcuacuucccccugcagagcuacggcuuccagcccaccaacggcgugggcuaccagcccuaccgggugguggugcugagcuucgagcugcugcacgcccccgccaccgugugcggcccuaaaaagagcaccaaccuggugaagaacaagugcgugaacuucaauuucaacggccugaccggcaccggcgugcugaccgagagcaacaagaaguuccugcccuuccagcaguucggccgggauaucgccgacaccaccgacgcagugcgggacccccagacccuggagauccuggacaucaccccaugcagcuucggcggcgugagcgugaucacccccggcacaaacaccagcaaccaggucgccgugcuguaccagggagugaacugcaccgaggugcccguggccauccacgccgaccagcugacccccaccuggcggguguacagcaccggcagcaacguguuccagacccgggccggcugccugaucggcgccgagcacgugaacaacuccuacgagugcgacauccccaucggcgcuggcaucugcgccagcuaccagacccagaccaacagcccccggcgggcccggagcguggccagccagagcaucaucgccuacaccaugagcuuaggcgccgagaacagcguggccuacagcaacaacagcaucgcgaucccuaccaacuucaccaucagcgugaccaccgagauacugcccgugagcaugaccaagaccagcguggacuguaccauguacaucugcggcgacagcaccgagugcagcaaccugcugcugcaguacggcagcuucugcacccagcugaaccgggcccugaccggcaucgccguggagcaggacaagaacacccaagagguguucgcccaggugaagcagaucuacaagacucccccaaucaaggacuucggcggcuucaacuucagccagauccugcccgaccccagcaagcccagcaagcggagcuucaucgaggaccugcuguucaacaaggugacccuggccgacgccggcuucaucaagcaguacggcgacugccugggggauaucgccgcucgggaccugaucugcgcccagaaguucaacggccugaccgugcugcccccucugcugaccgacgagaugaucgcccaguacaccagcgcccugcuugccggcaccaucaccagcggcuggaccuucggcgccggcgcagcccugcagauccccuucgccaugcagauggccuaccgguucaacggcaucggcgugacccagaacgugcuguacgagaaccagaagcugaucgccaaccaguucaacagcgccaucggcaagauccaggacagccugagcagcaccgccagcgcccugggcaagcugcaggacguggugaaccagaacgcucaggcccugaacacccuggugaagcagcugagcagcaacuucggcgccaucagcucagugcugaaugacauccugagcaggcuggacaagguggaggccgaggugcagaucgaccggcugaucaccggccggcugcagagccugcagaccuacgugacccagcagcugauccgggccgccgagauccgggccagcgccaaccuggcagccaccaagaugagcgagugcgugcugggccagagcaagcggguggacuuuugcggcaagggcuaccaccugaugagcuucccccagagcgccccacacggcgugguguuccuccacgugacauacguccccgcccaggagaagaacuucaccaccgcccccgccauuugccacgacggcaaggcucacuucccccgggagggaguguucgugagcaacggcacccacugguucgugacccagcggaacuucuacgagccccagaucaucaccaccgacaacaccuucgugagcggcaacugcgacguggugaucggcaucgugaacaacaccguguacgacccccugcagccugagcuggacagcuucaaggaggagcuggacaaguacuucaagaaccacaccagccccgacguggaucugggcgacaucagcggcaucaacgccagcguggugaacauccagaaggagaucgaccggcugaacgagguggccaagaaccugaacgagagccugaucgaccugcaggagcugggcaaguacgagcaguacaucaaguggcccugguacaucuggcugggcuucaucgccggccugaucgccaucgugauggugaccaucaugcugugcugcaugaccagcugcuguagcugccugaagggcugcugcagcugcggcagcugcugcaaguucgacgaggacgacagcgagccagugcugaagggcgugaagcugcacuacaccugaggacuagucccuguucccagagcccacuuuuuuuucuuuuuuugaaauaaaauagccugucuuucagaucucaaaggcucuuuucagagccaccaaaaaaaaaaaaaaaaaaaaaaaaaaaaaaaaaaaaaaaaaaaaaaaaaaaaaaaaaaaaaaaaaaaaaaaaaaaaaaaaaaaaaaaaaaaaaaaaaaaaa

SEQ ID NO: 23690 - RNA, 4191 nt, Artificial Sequence
  SARS-CoV-2/Wuhan/WIV05/2019__EPI_ISL_402128 spike protein mRNA gc (1-1273)(Y453F_D614G)
aggagagggcgcuuggcuugcaaggacccugagcugcggcauugaagcacacccaacccaacucgacugaagucagccucacugaaccggaucugagaaucuucucucucugggcuugccagggcucuccgaaccuagcuagcauccucuucaauuccaacuagaaagcuuaccauguucguguuccuggugcugcugccccuggugagcagccagugcgugaaccugaccacccggacccagcugcccccugccuacaccaacagcuucacccggggcguguacuaccccgacaagguguuccggagcagcgugcugcacagcacccaggaccuguuccugcccuucuucagcaacgugaccugguuccacgccauccacgugagcggcaccaacggcaccaagcgguucgacaacccagugcugcccuucaacgacggcguguacuucgccagcaccgagaagucaaacaucauccggggcuggaucuucggcaccacccuggacagcaagacacagagccugcugaucgugaacaacgccaccaacguggugaucaaggugugcgaguuucaguucugcaacgaccccuuccugggcguguacuaccacaagaacaacaagagcuggauggagagcgaguuccgggucuacagcagcgcuaacaauugcaccuucgaguacgugagccagcccuuccugauggaccucgagggcaagcagggcaacuucaagaaccugcgggaguucguguucaagaacaucgauggcuacuucaagaucuacagcaagcacacccccaucaaccuggugcgggaccugccccagggauucagcgcccuggagccucugguggaccugcccaucggcaucaacaucaccagguuccagacccugcuggcccugcaccggagcuaccugacccccggcgacagcagcagcggcuggaccgccggcgccgccgcauacuacgugggcuaccugcagccacggaccuuccugcugaaguacaacgagaacggcaccaucaccgacgccguggacugcgcccuggacccccugagcgagaccaagugcacccuaaagagcuucaccguggagaagggcaucuaccagaccagcaacuuccgggugcagcccacugagagcaucgugcgguuccccaacauuaccaaccugugucccuucggcgagguguucaacgccacccgguucgccagcguguacgccuggaaccggaagcggaucagcaacugcguggccgacuacagcgugcuguacaacagcgccagcuucagcaccuucaagugcuacggcgugagcccuaccaagcugaacgaccugugcuucaccaacguguacgcugacagcuucgugauccggggcgacgaggugcggcagaucgcccccggccagaccggcaagaucgccgacuacaacuacaagcugcccgacgacuucaccggcugcgugaucgccuggaacagcaacaaccuggacagcaaggugggcggcaacuacaacuaccuguuccggcuguuccguaagagcaaccugaagccauuugagcgggacaucagcaccgagaucuaccaggccggcagcacccccugcaacgguguggagggcuucaacugcuacuucccccugcagagcuacggcuuccagcccaccaacggcgugggcuaccagcccuaccgggugguggugcugagcuucgagcugcugcacgcccccgccaccgugugcggcccuaaaaagagcaccaaccuggugaagaacaagugcgugaacuucaauuucaacggccugaccggcaccggcgugcugaccgagagcaacaagaaguuccugcccuuccagcaguucggccgggauaucgccgacaccaccgacgcagugcgggacccccagacccuggagauccuggacaucaccccaugcagcuucggcggcgugagcgucaucacccccggcacaaacaccagcaaccagguggccgugcuguaccagggagugaacugcaccgaggugcccguggccauccacgccgaccagcugacccccaccuggcggguguacagcaccggcagcaacguguuccagacccgggccggcugccugaucggcgccgagcacgugaacaacuccuacgagugcgacauccccaucggcgcuggcaucugcgccagcuaccagacccagaccaacagcccccggcgggcccggagcguggccagccagagcaucaucgccuacaccaugagcuuaggcgccgagaacagcguggccuacagcaacaacagcaucgcgaucccuaccaacuucaccaucagcgugaccaccgagauacugcccgugagcaugaccaagaccagcguggacuguaccauguacaucugcggcgacagcaccgagugcagcaaccugcugcugcaguacggcagcuucugcacccagcugaaccgggcccugaccggcaucgccguggagcaggacaagaacacccaagagguguucgcccaggugaagcagaucuacaagacucccccaaucaaggacuucggcggcuucaacuucagccagauccugcccgaccccagcaagcccagcaagcggagcuucaucgaggaccugcuguucaacaaggugacccuggccgacgccggcuucaucaagcaguacggcgacugccugggggauaucgccgcucgggaccugaucugcgcccagaaguucaacggccugaccgugcugcccccucugcugaccgacgagaugaucgcccaguacaccagcgcccugcuugccggcaccaucaccagcggcuggaccuucggcgccggcgcagcccugcagauccccuucgccaugcagauggccuaccgguucaacggcaucggcgugacccagaacgugcuguacgagaaccagaagcugaucgccaaccaguucaacagcgccaucggcaagauccaggacagccugagcagcaccgccagcgcccugggcaagcugcaggacguggugaaccagaacgcucaggcccugaacacccuggugaagcagcugagcagcaacuuuggcgccaucagcucagugcugaaugacauccugagcaggcuggacaagguggaggccgaggugcagaucgaccggcugaucaccggccggcugcagagccugcagaccuacgugacccagcagcugauccgggccgccgagauccgggccagcgccaaccuggcagccaccaagaugagcgagugcgugcugggccagagcaagcggguggacuucugcggcaagggcuaccaccugaugagcuucccccagagcgccccacacggcgugguguuccuccacgucacauacgugcccgcccaggagaagaacuucaccaccgcccccgccauuugccacgacggcaaggcucacuucccccgggagggaguguucgugagcaacggcacccacugguucgugacccagcggaacuucuacgagccccagaucaucaccaccgacaacaccuucgugagcggcaacugcgacguggugaucggcaucgugaacaacaccguguacgacccccugcagccugagcuggacagcuucaaggaggagcuggacaaguacuucaagaaccacaccagccccgacguggaucugggcgacaucagcggcaucaacgccagcguggugaacauccagaaggagaucgaccggcugaacgagguggccaagaaccugaacgagagccugaucgaccugcaggagcugggcaaguacgagcaguacaucaaguggcccugguacaucuggcugggcuucaucgccggccugaucgccaucgugauggugaccaucaugcugugcugcaugaccagcugcuguagcugccugaagggcugcugcagcugcggcagcugcugcaaguucgacgaggacgacagcgagccagugcugaagggcgugaagcugcacuacaccugaggacuagucccuguucccagagcccacuuuuuuuucuuuuuuugaaauaaaauagccugucuuucagaucucaaaggcucuuuucagagccaccaaaaaaaaaaaaaaaaaaaaaaaaaaaaaaaaaaaaaaaaaaaaaaaaaaaaaaaaaaaaaaaaaaaaaaaaaaaaaaaaaaaaaaaaaaaaaaaaaaaaa

SEQ ID NO: 23691 - RNA, 4191 nt, Artificial Sequence
  SARS-CoV-2/Wuhan/WIV05/2019__EPI_ISL_402128 spike protein mRNA gc (1-1273)(D614G_I692V)
aggagagggcgcuuggcuugcaaggacccugagcugcggcauugaagcacacccaacccaacucgacugaagucagccucacugaaccggaucugagaaucuucucucucugggcuugccagggcucuccgaaccuagcuagcauccucuucaauuccaacuagaaagcuuaccauguucguguuccuggugcugcugccccuggugagcagccagugcgugaaccugaccacccggacccagcugcccccugccuacaccaacagcuucacccggggcguguacuaccccgacaagguguuccggagcagcgugcugcacagcacccaggaccuguuccugcccuucuucagcaacgugaccugguuccacgccauccacgugagcggcaccaacggcaccaagcgguucgacaacccagugcugcccuucaacgacggcguguacuucgccagcaccgagaagucaaacaucauccggggcuggaucuucggcaccacccuggacagcaagacacagagccugcugaucgugaacaacgccaccaacguggugaucaaggugugcgaguuucaguucugcaacgaccccuuccugggcguguacuaccacaagaacaacaagagcuggauggagagcgaguuccgggucuacagcagcgcuaacaauugcaccuucgaguacgugagccagcccuuccugauggaccucgagggcaagcagggcaacuucaagaaccugcgggaguucguguucaagaacaucgauggcuacuucaagaucuacagcaagcacacccccaucaaccuggugcgggaccugccccagggauucagcgcccuggagccucugguggaccugcccaucggcaucaacaucaccagguuccagacccugcuggcccugcaccggagcuaccugacccccggcgacagcagcagcggcuggaccgccggcgccgccgcauacuacgugggcuaccugcagccacggaccuuccugcugaaguacaacgagaacggcaccaucaccgacgccguggacugcgcccuggacccccugagcgagaccaagugcacccuaaagagcuucaccguggagaagggcaucuaccagaccagcaacuuccgggugcagcccacugagagcaucgugcgguuccccaacauuaccaaccugugucccuucggcgagguguucaacgccacccgguucgccagcguguacgccuggaaccggaagcggaucagcaacugcguggccgacuacagcgugcuguacaacagcgccagcuucagcaccuucaagugcuacggcgugagcccuaccaagcugaacgaccugugcuucaccaacguguacgcugacagcuucgugauccggggcgacgaggugcggcagaucgcccccggccagaccggcaagaucgccgacuacaacuacaagcugcccgacgacuucaccggcugcgugaucgccuggaacagcaacaaccuggacagcaaggugggcggcaacuacaacuaccuguaccggcuguuccguaagagcaaccugaagccauucgagcgggacaucagcaccgagaucuaccaggccggcagcacccccugcaacgguguggagggcuuuaacugcuacuucccccugcagagcuacggcuuccagcccaccaacggcgugggcuaccagcccuaccgggugguggugcugagcuucgagcugcugcacgcccccgccaccgugugcggcccuaaaaagagcaccaaccuggugaagaacaagugcgugaacuucaauuucaacggccugaccggcaccggcgugcugaccgagagcaacaagaaguuccugcccuuccagcaguucggccgggauaucgccgacaccaccgacgcagugcgggacccccagacccuggagauccuggacaucaccccaugcagcuucggcggcgugagcgucaucacccccggcacaaacaccagcaaccagguggccgugcuguaccagggagugaacugcaccgaggugcccguggccauccacgccgaccagcugacccccaccuggcggguguacagcaccggcagcaacguguuccagacccgggccggcugccugaucggcgccgagcacgugaacaacuccuacgagugcgacauccccaucggcgcuggcaucugcgccagcuaccagacccagaccaacagcccccggcgggcccggagcguggccagccagagcgugaucgccuacaccaugagcuuaggcgccgagaacagcguggccuacagcaacaacagcaucgcgaucccuaccaacuucaccaucagcgugaccaccgagauccugcccgugagcaugaccaagaccagcguggacuguaccauguacauaugcggcgacagcaccgagugcagcaaccugcugcugcaguacggcagcuucugcacccagcugaaccgggcccugaccggcaucgccguggagcaggacaagaacacccaagagguguucgcccaggugaagcagaucuacaagacucccccaaucaaggacuucggcggcuucaacuucagccagauccugcccgaccccagcaagcccagcaagcggagcuucaucgaggaccugcuguucaacaaggugacccuggccgacgccggcuucaucaagcaguacggcgacugccugggggauaucgccgcucgggaccugaucugcgcccagaaguucaacggccugaccgugcugcccccucugcugaccgacgagaugaucgcccaguacaccagcgcccugcuugccggcaccaucaccagcggcuggaccuucggcgccggcgcagcccugcagauccccuucgccaugcagauggccuaccgguucaacggcaucggcgugacccagaacgugcuguacgagaaccagaagcugaucgccaaccaguucaacagcgccaucggcaagauccaggacagccugagcagcaccgccagcgcccugggcaagcugcaggacguggugaaccagaacgcucaggcccugaacacccuggugaagcagcugagcagcaacuucggcgccaucagcucagugcugaaugacauccugagcaggcuggacaagguggaggccgaggugcagaucgaccggcugaucaccggccggcugcagagccugcagaccuacgugacccagcagcugauccgggccgccgagauccgggccagcgccaaccuggcagccaccaagaugagcgagugcgugcugggccagagcaagcggguggacuuuugcggcaagggcuaccaccugaugagcuucccccagagcgccccacacggcguggucuuccuccacgugacauacgugcccgcccaggagaagaacuucaccaccgcccccgccaucugccacgacggcaaggcucacuucccccgggagggaguguucgugagcaacggcacccacugguucgugacccagcggaacuucuacgagccccagauuaucaccaccgacaacaccuucgugagcggcaacugcgacguggugaucggcaucgugaacaacaccguguacgacccccugcagccugagcuggacagcuucaaggaggagcuggacaaguacuucaagaaccacaccagccccgacguggaucugggcgacaucagcggcaucaacgccagcguggugaacauccagaaggagaucgaccggcugaacgagguggccaagaaccugaacgagagccugaucgaccugcaggagcugggcaaguacgagcaguacaucaaguggcccugguacaucuggcugggcuucaucgccggccugaucgccaucgugauggugaccaucaugcugugcugcaugaccagcugcuguagcugccugaagggcugcugcagcugcggcagcugcugcaaguucgacgaggacgacagcgagccagugcugaagggcgugaagcugcacuacaccugaggacuagucccuguucccagagcccacuuuuuuuucuuuuuuugaaauaaaauagccugucuuucagaucucaaaggcucuuuucagagccaccaaaaaaaaaaaaaaaaaaaaaaaaaaaaaaaaaaaaaaaaaaaaaaaaaaaaaaaaaaaaaaaaaaaaaaaaaaaaaaaaaaaaaaaaaaaaaaaaaaaaa

SEQ ID NO: 23692 - RNA, 4191 nt, Artificial Sequence
  SARS-CoV-2/Wuhan/WIV05/2019__EPI_ISL_402128 spike protein mRNA gc (1-1273)(D614G_M1229I)
aggagagggcgcuuggcuugcaaggacccugagcugcggcauugaagcacacccaacccaacucgacugaagucagccucacugaaccggaucugagaaucuucucucucugggcuugccagggcucuccgaaccuagcuagcauccucuucaauuccaacuagaaagcuuaccauguucguguuccuggugcugcugccccuggugagcagccagugcgugaaccugaccacccggacccagcugcccccugccuacaccaacagcuucacccggggcguguacuaccccgacaagguguuccggagcagcgugcugcacagcacccaggaccuguuccugcccuucuucagcaacgugaccugguuccacgccauccacgugagcggcaccaacggcaccaagcgguucgacaacccagugcugcccuucaacgacggcguguacuucgccagcaccgagaagucaaacaucauccggggcuggaucuucggcaccacccuggacagcaagacacagagccugcugaucgugaacaacgccaccaacguggugaucaaggugugcgaguuucaguucugcaacgaccccuuccugggcguguacuaccacaagaacaacaagagcuggauggagagcgaguuccgggucuacagcagcgcuaacaauugcaccuucgaguacgugagccagcccuuccugauggaccucgagggcaagcagggcaacuucaagaaccugcgggaguucguguucaagaacaucgauggcuacuucaagaucuacagcaagcacacccccaucaaccuggugcgggaccugccccagggauucagcgcccuggagccucugguggaccugcccaucggcaucaacaucaccagguuccagacccugcuggcccugcaccggagcuaccugacccccggcgacagcagcagcggcuggaccgccggcgccgccgcauacuacgugggcuaccugcagccacggaccuuccugcugaaguacaacgagaacggcaccaucaccgacgccguggacugcgcccuggacccccugagcgagaccaagugcacccuaaagagcuucaccguggagaagggcaucuaccagaccagcaacuuccgggugcagcccacugagagcaucgugcgguuccccaacauuaccaaccugugucccuucggcgagguguucaacgccacccgguucgccagcguguacgccuggaaccggaagcggaucagcaacugcguggccgacuacagcgugcuguacaacagcgccagcuucagcaccuucaagugcuacggcgugagcccuaccaagcugaacgaccugugcuucaccaacguguacgcugacagcuucgugauccggggcgacgaggugcggcagaucgcccccggccagaccggcaagaucgccgacuacaacuacaagcugcccgacgacuucaccggcugcgugaucgccuggaacagcaacaaccuggacagcaaggugggcggcaacuacaacuaccuguaccggcuguuccguaagagcaaccugaagccauucgagcgggacaucagcaccgagaucuaccaggccggcagcacccccugcaacgguguggagggcuuuaacugcuacuucccccugcagagcuacggcuuccagcccaccaacggcgugggcuaccagcccuaccgggugguggugcugagcuucgagcugcugcacgcccccgccaccgugugcggcccuaaaaagagcaccaaccuggugaagaacaagugcgugaacuucaauuucaacggccugaccggcaccggcgugcugaccgagagcaacaagaaguuccugcccuuccagcaguucggccgggauaucgccgacaccaccgacgcagugcgggacccccagacccuggagauccuggacaucaccccaugcagcuucggcggcgugagcgucaucacccccggcacaaacaccagcaaccagguggccgugcuguaccagggagugaacugcaccgaggugcccguggccauccacgccgaccagcugacccccaccuggcggguguacagcaccggcagcaacguguuccagacccgggccggcugccugaucggcgccgagcacgugaacaacuccuacgagugcgacauccccaucggcgcuggcaucugcgccagcuaccagacccagaccaacagcccccggcgggcccggagcguggccagccagagcaucaucgccuacaccaugagcuuaggcgccgagaacagcguggccuacagcaacaacagcaucgcgaucccuaccaacuucaccaucagcgugaccaccgagauacugcccgugagcaugaccaagaccagcguggacuguaccauguacaucugcggcgacagcaccgagugcagcaaccugcugcugcaguacggcagcuucugcacccagcugaaccgggcccugaccggcaucgccguggagcaggacaagaacacccaagagguguucgcccaggugaagcagaucuacaagacucccccaaucaaggacuucggcggcuucaacuucagccagauccugcccgaccccagcaagcccagcaagcggagcuucaucgaggaccugcuguucaacaaggugacccuggccgacgccggcuucaucaagcaguacggcgacugccugggggauaucgccgcucgggaccugaucugcgcccagaaguucaacggccugaccgugcugcccccucugcugaccgacgagaugaucgcccaguacaccagcgcccugcuugccggcaccaucaccagcggcuggaccuucggcgccggcgcagcccugcagauccccuucgccaugcagauggccuaccgguucaacggcaucggcgugacccagaacgugcuguacgagaaccagaagcugaucgccaaccaguucaacagcgccaucggcaagauccaggacagccugagcagcaccgccagcgcccugggcaagcugcaggacguggugaaccagaacgcucaggcccugaacacccuggugaagcagcugagcagcaacuucggcgccaucagcucagugcugaaugacauccugagcaggcuggacaagguggaggccgaggugcagaucgaccggcugaucaccggccggcugcagagccugcagaccuacgugacccagcagcugauccgggccgccgagauccgggccagcgccaaccuggcagccaccaagaugagcgagugcgugcugggccagagcaagcggguggacuuuugcggcaagggcuaccaccugaugagcuucccccagagcgccccacacggcgugguguuccuccacgucacauacgugcccgcccaggagaagaacuucaccaccgcccccgccauuugccacgacggcaaggcucacuucccccgggagggaguguucgugagcaacggcacccacugguucgugacccagcggaacuucuacgagccccagaucaucaccaccgacaacaccuucgugagcggcaacugcgacguggugaucggcaucgugaacaacaccguguacgacccccugcagccugagcuggacagcuucaaggaggagcuggacaaguacuucaagaaccacaccagccccgacguggaucugggcgacaucagcggcaucaacgccagcguggugaacauccagaaggagaucgaccggcugaacgagguggccaagaaccugaacgagagccugaucgaccugcaggagcugggcaaguacgagcaguacaucaaguggcccugguacaucuggcugggcuucaucgccggccugaucgccaucgugaucgugaccaucaugcugugcugcaugaccagcugcuguagcugccugaagggcugcugcagcugcggcagcugcugcaaguucgacgaggacgacagcgagccagugcugaagggcgugaagcugcacuacaccugaggacuagucccuguucccagagcccacuuuuuuuucuuuuuuugaaauaaaauagccugucuuucagaucucaaaggcucuuuucagagccaccaaaaaaaaaaaaaaaaaaaaaaaaaaaaaaaaaaaaaaaaaaaaaaaaaaaaaaaaaaaaaaaaaaaaaaaaaaaaaaaaaaaaaaaaaaaaaaaaaaaaa

SEQ ID NO: 23693 - RNA, 4185 nt, Artificial Sequence
  SARS-CoV-2/Wuhan/WIV05/2019__EPI_ISL_402128 spike protein mRNA gc (1-1273)(H69del_V70del_A222V_Y453F_S477N_D614G_I692V)
aggagagggcgcuuggcuugcaaggacccugagcugcggcauugaagcacacccaacccaacucgacugaagucagccucacugaaccggaucugagaaucuucucucucugggcuugccagggcucuccgaaccuagcuagcauccucuucaauuccaacuagaaagcuuaccauguucguguuccuggugcugcugccccuggugagcagccagugcgugaaccugaccacccggacccagcugcccccugccuacaccaacagcuucacccggggcguguacuaccccgacaagguguuccggagcagcgugcugcacagcacccaggaccuguuccugcccuucuucagcaacgugaccugguuccacgccaucagcggcaccaacggcaccaagcgguucgacaacccagugcugcccuucaacgacggcguguacuucgccagcaccgagaagucaaacaucauccggggcuggaucuucggcaccacccuggacagcaagacacagagccugcugaucgugaacaacgccaccaacguggugaucaaggugugcgaguuucaguucugcaacgaccccuuccugggcguguacuaccacaagaacaacaagagcuggauggagagcgaguuccggguguacagcagcgcuaacaauugcaccuucgaguacgucagccagcccuuccugauggaccucgagggcaagcagggcaacuucaagaaccugcgggaguucguguucaagaacaucgauggcuacuucaagaucuacagcaagcacacccccaucaaccuggugcgggaccugccccagggauucagcgugcuggagccucugguggaccugcccaucggcaucaacaucaccagguuccagacccugcuggcccugcaccggagcuaccugacccccggcgacagcagcagcggcuggaccgccggcgccgccgccuacuacgugggcuaccugcagccacggaccuuccugcugaaguacaacgagaacggcaccaucaccgacgcaguggacugcgcccuggacccccugagcgagaccaagugcacccuaaagagcuucaccguggagaagggcaucuaccagaccagcaacuuccgggugcagcccacugagagcaucgugcgguuccccaacauuaccaaccugugucccuucggcgagguguucaacgccacccgguucgccagcguguacgccuggaaccggaagcggaucagcaacugcguggccgacuacagcgugcuguacaacagcgccagcuucagcaccuucaagugcuacggcgugagcccuaccaagcugaacgaccugugcuucaccaacguguacgccgacagcuucgugauccggggcgacgaggugcggcagaucgcucccggccagaccggcaagaucgccgacuacaacuacaagcugcccgacgacuucaccggcugcgugaucgccuggaacagcaacaaccuggacagcaaggugggcggcaacuacaacuaccuguuccggcuguuccguaagagcaaccugaagccauuugagcgggacaucagcaccgagaucuaccaggccggcaacacccccugcaacgguguggagggcuucaacugcuacuucccccugcagagcuacggcuuccagcccaccaacggcgugggcuaccagcccuaccgggugguggugcugagcuucgagcugcugcacgcccccgccaccgugugcggcccuaaaaagagcaccaaccuggugaagaacaagugcgugaauuucaacuucaacggccugaccggcaccggcgugcugaccgagagcaacaagaaguuccugcccuuccagcaguucggccgggauaucgccgacaccaccgacgccgugcgggacccccagacccuggagauccuggacaucaccccaugcagcuucggcggcgugagcgucaucacccccggcacaaacaccagcaaccagguggcagugcuguaccagggagugaacugcaccgaggugcccguggccauccacgccgaccagcugacccccaccuggcggguguacagcaccggcagcaacguguuccagacccgggccggcugccugaucggcgccgagcacgugaacaacagcuacgagugcgacauccccaucggcgccggcaucugcgcuuccuaccagacccagaccaacagcccccggcgggcccggagcguggccagccagagcgugaucgccuacaccaugagcuuaggcgccgagaacagcguggccuacagcaacaacagcaucgccaucccuaccaacuucaccaucagcgugaccaccgagauccugcccgugagcaugaccaagaccagcguggacuguaccauguacauaugcggcgacagcaccgagugcagcaaccugcugcugcaguacggcagcuucugcacccagcugaaccgggcgcugaccggcaucgccguggagcaggacaagaacacccaagagguguucgcccaggugaagcagaucuacaagacucccccaaucaaggacuucggcggcuucaacuucagccagauccugcccgaccccagcaagcccagcaagcggagcuucaucgaggaccugcuguucaacaaggugacccuggccgacgccggcuucaucaagcaguacggcgacugccugggggauaucgccgcccgggaccugaucugcgcucagaaguucaacggccugaccgugcugcccccucugcugaccgacgagaugaucgcccaguacaccagcgcccugcuugccggcaccaucaccagcggcuggaccuucggcgccggcgccgcacugcagauccccuucgccaugcagauggccuaccgguucaacggcaucggcgugacccagaacgugcuguacgagaaccagaagcugaucgccaaccaguucaacagcgccaucggcaagauccaggacagccugagcagcaccgccagcgcccugggcaagcugcaggacguggugaaccagaacgcccaggcucugaacacccuggugaagcagcugagcagcaauuuuggcgccaucagcagcgugcugaacgacauccugucaaggcuggacaagguggaggccgaggugcagaucgaccggcugaucaccggccggcugcagagccugcagaccuacgugacccagcagcugauccgggccgccgagauccgggccagcgccaaccuggccgcaaccaagaugagcgagugcgugcugggccagagcaagcggguggacuucugcggcaagggcuaccaccugaugagcuucccccagagcgccccacacggcguggucuuccuccacgugacauacgugcccgcccaggagaagaacuucaccaccgcccccgccaucugccacgacggcaaggcccacuucccccgggagggaguguucgugagcaacggcacccacugguucgugacccagcggaacuucuacgagccccagauuaucaccaccgacaacaccuucgugagcggcaacugcgacguggugaucggcaucgugaacaacaccguguacgacccccugcagccugagcuggacagcuucaaggaggagcuggacaaguacuucaagaaccacaccagccccgacguggaucugggcgacaucagcggcaucaacgcuagcguggugaacauccagaaggagaucgaccggcugaacgagguggccaagaaccugaacgagagccugaucgaccugcaggagcugggcaaguacgagcaguacaucaaguggcccugguacaucuggcugggcuucaucgccggccugaucgccaucgugauggugaccaucaugcugugcugcaugaccagcugcuguagcugccugaagggcugcugcagcugcggcagcugcugcaaguucgacgaggacgacagcgagccagugcugaagggcgugaagcugcacuacaccugaggacuagucccuguucccagagcccacuuuuuuuucuuuuuuugaaauaaaauagccugucuuucagaucucaaaggcucuuuucagagccaccaaaaaaaaaaaaaaaaaaaaaaaaaaaaaaaaaaaaaaaaaaaaaaaaaaaaaaaaaaaaaaaaaaaaaaaaaaaaaaaaaaaaaaaaaaaaaaaaaaaaa

SEQ ID NO: 23694 - RNA, 4185 nt, Artificial Sequence
  SARS-CoV-2/Wuhan/WIV05/2019__EPI_ISL_402128 spike protein mRNA gc (1-1273)(H69del_V70del_Y453F_D614G_I692V_M1229I)
aggagagggcgcuuggcuugcaaggacccugagcugcggcauugaagcacacccaacccaacucgacugaagucagccucacugaaccggaucugagaaucuucucucucugggcuugccagggcucuccgaaccuagcuagcauccucuucaauuccaacuagaaagcuuaccauguucguguuccuggugcugcugccccuggugagcagccagugcgugaaccugaccacccggacccagcugcccccugccuacaccaacagcuucacccggggcguguacuaccccgacaagguguuccggagcagcgugcugcacagcacccaggaccuguuccugcccuucuucagcaacgugaccugguuccacgccaucagcggcaccaacggcaccaagcgguucgacaacccagugcugcccuucaacgacggcguguacuucgccagcaccgagaagucaaacaucauccggggcuggaucuucggcaccacccuggacagcaagacacagagccugcugaucgugaacaacgccaccaacguggugaucaaggugugcgaguuucaguucugcaacgaccccuuccugggcguguacuaccacaagaacaacaagagcuggauggagagcgaguuccggguguacagcagcgcuaacaauugcaccuucgaguacgucagccagcccuuccugauggaccucgagggcaagcagggcaacuucaagaaccugcgggaguucguguucaagaacaucgauggcuacuucaagaucuacagcaagcacacccccaucaaccuggugcgggaccugccccagggauucagcgcccuggagccucugguggaccugcccaucggcaucaacaucaccagguuccagacccugcuggcccugcaccggagcuaccugacccccggcgacagcagcagcggcuggaccgccggcgccgccgcauacuacgugggcuaccugcagccacggaccuuccugcugaaguacaacgagaacggcaccaucaccgacgccguggacugcgcccuggacccccugagcgagaccaagugcacccuaaagagcuucaccguggagaagggcaucuaccagaccagcaacuuccgggugcagcccacugagagcaucgugcgguuccccaacauuaccaaccugugucccuucggcgagguguucaacgccacccgguucgccagcguguacgccuggaaccggaagcggaucagcaacugcguggccgacuacagcgugcuguacaacagcgccagcuucagcaccuucaagugcuacggcgugagcccuaccaagcugaacgaccugugcuucaccaacguguacgcugacagcuucgugauccggggcgacgaggugcggcagaucgcccccggccagaccggcaagaucgccgacuacaacuacaagcugcccgacgacuucaccggcugcgugaucgccuggaacagcaacaaccuggacagcaaggugggcggcaacuacaacuaccuguuccggcuguuccguaagagcaaccugaagccauuugagcgggacaucagcaccgagaucuaccaggccggcagcacccccugcaacgguguggagggcuucaacugcuacuucccccugcagagcuacggcuuccagcccaccaacggcgugggcuaccagcccuaccgggugguggugcugagcuucgagcugcugcacgcccccgccaccgugugcggcccuaaaaagagcaccaaccuggugaagaacaagugcgugaacuucaauuucaacggccugaccggcaccggcgugcugaccgagagcaacaagaaguuccugcccuuccagcaguucggccgggauaucgccgacaccaccgacgcagugcgggacccccagacccuggagauccuggacaucaccccaugcagcuucggcggcgugagcgugaucacccccggcacaaacaccagcaaccaggucgccgugcuguaccagggagugaacugcaccgaggugcccguggccauccacgccgaccagcugacccccaccuggcggguguacagcaccggcagcaacguguuccagacccgggccggcugccugaucggcgccgagcacgugaacaacuccuacgagugcgacauccccaucggcgcuggcaucugcgccagcuaccagacccagaccaacagcccccggcgggcccggagcguggccagccagagcgugaucgccuacaccaugagcuuaggcgccgagaacagcguggccuacagcaacaacagcaucgcgaucccuaccaacuucaccaucagcgugaccaccgagauccugcccgugagcaugaccaagaccagcguggacuguaccauguacauaugcggcgacagcaccgagugcagcaaccugcugcugcaguacggcagcuucugcacccagcugaaccgggcccugaccggcaucgccguggagcaggacaagaacacccaagagguguucgcccaggugaagcagaucuacaagacucccccaaucaaggacuucggcggcuucaacuucagccagauccugcccgaccccagcaagcccagcaagcggagcuucaucgaggaccugcuguucaacaaggugacccuggccgacgccggcuucaucaagcaguacggcgacugccugggggauaucgccgcucgggaccugaucugcgcccagaaguucaacggccugaccgugcugcccccucugcugaccgacgagaugaucgcccaguacaccagcgcccugcuugccggcaccaucaccagcggcuggaccuucggcgccggcgcagcccugcagauccccuucgccaugcagauggccuaccgguucaacggcaucggcgugacccagaacgugcuguacgagaaccagaagcugaucgccaaccaguucaacagcgccaucggcaagauccaggacagccugagcagcaccgccagcgcccugggcaagcugcaggacguggugaaccagaacgcucaggcccugaacacccuggugaagcagcugagcagcaacuuuggcgccaucagcucagugcugaaugacauccugagcaggcuggacaagguggaggccgaggugcagaucgaccggcugaucaccggccggcugcagagccugcagaccuacgugacccagcagcugauccgggccgccgagauccgggccagcgccaaccuggcagccaccaagaugagcgagugcgugcugggccagagcaagcggguggacuucugcggcaagggcuaccaccugaugagcuucccccagagcgccccacacggcgugguguuccuccacgucacauacgugcccgcccaggagaagaacuucaccaccgcccccgccaucugccacgacggcaaggcucacuucccccgggagggaguguucgugagcaacggcacccacugguucgugacccagcggaacuucuacgagccccagauuaucaccaccgacaacaccuucgugagcggcaacugcgacguggugaucggcaucgugaacaacaccguguacgacccccugcagccugagcuggacagcuucaaggaggagcuggacaaguacuucaagaaccacaccagccccgacguggaucugggcgacaucagcggcaucaacgccagcguggugaacauccagaaggagaucgaccggcugaacgagguggccaagaaccugaacgagagccugaucgaccugcaggagcugggcaaguacgagcaguacaucaaguggcccugguacaucuggcugggcuucaucgccggccugaucgccaucgugaucgugaccaucaugcugugcugcaugaccagcugcuguagcugccugaagggcugcugcagcugcggcagcugcugcaaguucgacgaggacgacagcgagccagugcugaagggcgugaagcugcacuacaccugaggacuagucccuguucccagagcccacuuuuuuuucuuuuuuugaaauaaaauagccugucuuucagaucucaaaggcucuuuucagagccaccaaaaaaaaaaaaaaaaaaaaaaaaaaaaaaaaaaaaaaaaaaaaaaaaaaaaaaaaaaaaaaaaaaaaaaaaaaaaaaaaaaaaaaaaaaaaaaaaaaaaa

SEQ ID NO: 23695 - RNA, 4182 nt, Artificial Sequence
  SARS-CoV-2/Wuhan/WIV05/2019__EPI_ISL_402128 spike protein mRNA gc (1-1273)(H69del_V70del_Y144del_N501Y_A570D_D614G_P681H_T716I_S982 A_D1118H)
aggagagggcgcuuggcuugcaaggacccugagcugcggcauugaagcacacccaacccaacucgacugaagucagccucacugaaccggaucugagaaucuucucucucugggcuugccagggcucuccgaaccuagcuagcauccucuucaauuccaacuagaaagcuuaccauguucguguuccuggugcugcugccccuggugagcagccagugcgugaaccugaccacccggacccagcugcccccugccuacaccaacagcuucacccggggcguguacuaccccgacaagguguuccggagcagcgugcugcacagcacccaggaccuguuccugcccuucuucagcaacgugaccugguuccacgccaucagcggcaccaacggcaccaagcgguucgacaacccagugcugcccuucaacgacggcguguacuucgccagcaccgagaagucaaacaucauccggggcuggaucuucggcaccacccuggacagcaagacacagagccugcugaucgugaacaacgccaccaacguggugaucaaggugugcgaguuucaguucugcaacgaccccuuccugggcguguaccacaagaacaacaagagcuggauggagagcgaguuccggguguacagcagcgcuaacaauugcaccuucgaguacgucagccagcccuuccugauggaccucgagggcaagcagggcaacuucaagaaccugcgggaguucguguucaagaacaucgauggcuacuucaagaucuacagcaagcacacccccaucaaccuggugcgggaccugccccagggauucagcgcccuggagccucugguggaccugcccaucggcaucaacaucaccagguuccagacccugcuggcccugcaccggagcuaccugacccccggcgacagcagcagcggcuggaccgccggcgccgccgcauacuacgugggcuaccugcagccacggaccuuccugcugaaguacaacgagaacggcaccaucaccgacgccguggacugcgcccuggacccccugagcgagaccaagugcacccuaaagagcuucaccguggagaagggcaucuaccagaccagcaacuuccgggugcagcccacugagagcaucgugcgguuccccaacauuaccaaccugugucccuucggcgagguguucaacgccacccgguucgccagcguguacgccuggaaccggaagcggaucagcaacugcguggccgacuacagcgugcuguacaacagcgccagcuucagcaccuucaagugcuacggcgugagcccuaccaagcugaacgaccugugcuucaccaacguguacgcugacagcuucgugauccggggcgacgaggugcggcagaucgcccccggccagaccggcaagaucgccgacuacaacuacaagcugcccgacgacuucaccggcugcgugaucgccuggaacagcaacaaccuggacagcaaggugggcggcaacuacaacuaccuguaccggcuguuccguaagagcaaccugaagccauucgagcgggacaucagcaccgagaucuaccaggccggcagcacccccugcaacgguguggagggcuuuaacugcuacuucccccugcagagcuacggcuuccagcccaccuacggcgugggcuaccagcccuaccgggugguggugcugagcuucgagcugcugcacgcccccgccaccgugugcggcccuaaaaagagcaccaaccuggugaagaacaagugcgugaacuucaacuucaauggccugaccggcaccggcgugcugaccgagagcaacaagaaguuccugcccuuccagcaguucggccgggauaucgacgacaccaccgacgccgugcgggacccccagacccuggagauccuggacaucaccccaugcagcuucggcggcgugagcgugaucacccccggcacaaacaccagcaaccaggucgcagugcuguaccagggagugaacugcaccgaggugcccguggccauccacgccgaccagcugacccccaccuggcggguguacagcaccggcagcaacguguuccagacccgggccggcugccugaucggcgccgagcacgugaacaacuccuacgagugcgacauccccaucggcgccggcaucugcgcuagcuaccagacccagaccaacagccaccggcgggcccggagcguggccagccagagcaucaucgccuacaccaugagcuuaggcgccgagaacagcguggccuacagcaacaacagcaucgccauccccaucaacuucaccauaagcgugaccaccgagauccugccugugagcaugaccaagaccagcguggacuguaccauguacaucugcggcgacagcaccgagugcagcaaccugcugcugcaguacggcagcuucugcacccagcugaaccgggcgcugaccggcaucgccguggagcaggacaagaacacccaagagguguucgcccaggugaagcagaucuacaagaccccacccaucaaggacuucggcggcuucaacuucagccagauccugcccgaccccagcaagcccagcaagcggagcuucaucgaggaccugcuguucaacaaggugacucuggccgacgccggcuucaucaagcaguacggcgauugccugggggacaucgccgcccgggaccugaucugcgcucagaaguucaacggccugaccgugcugccuccccugcugaccgacgagaugaucgcccaguacaccagcgcccugcuugccggcaccaucaccagcggcuggaccuucggcgccggcgccgcacugcagauccccuucgccaugcagauggccuaccgguucaacggcaucggcgugacccagaacgugcuguacgagaaccagaagcugaucgccaaccaguucaacagcgccaucggcaagauccaggacagccugagcagcaccgccagcgcccugggcaagcugcaggacguggugaaccagaacgcccaggcucugaacacccuggugaagcagcugagcagcaacuucggcgccaucagcucagugcugaacgacauccuggccaggcuggacaagguggaggccgaggugcagaucgaccggcugaucaccggccggcugcagagccugcagaccuacgugacccagcagcugauccgggccgccgagauucgggccagcgccaaucuggcagccaccaagaugagcgagugcgugcugggccagagcaagcggguggacuuuugcggcaagggcuaccaccugaugagcuucccccagagcgcuccccacggcgugguguuccuccacgugaccuacgucccagcccaggagaagaacuucacaaccgcccccgccaucugccacgacggcaaggcccacuucccccgggagggaguguucgugagcaacggcacccacugguucgugacccagcggaacuucuacgagccccagaucaucaccacccacaacaccuucgugagcggcaacugcgacguggugaucggcaucgugaacaacaccguguacgacccccugcagcccgagcuggacagcuucaaggaggagcuggacaaguacuucaagaaccacaccagcccugacguggaucugggcgacaucagcggcaucaacgccagcguggugaacauccagaaggagaucgaccggcugaacgagguggccaagaaccugaacgagagccugaucgaccugcaggagcugggcaaguacgagcaguacaucaaguggcccugguacaucuggcugggcuucaucgccggccugaucgccaucgugauggugaccaucaugcugugcugcaugaccagcugcuguagcugccugaagggcugcugcagcugcggcagcugcugcaaguucgacgaggacgacagcgagcccgugcugaagggcgugaagcugcacuacaccugaggacuagucccuguucccagagcccacuuuuuuuucuuuuuuugaaauaaaauagccugucuuucagaucucaaaggcucuuuucagagccaccaaaaaaaaaaaaaaaaaaaaaaaaaaaaaaaaaaaaaaaaaaaaaaaaaaaaaaaaaaaaaaaaaaaaaaaaaaaaaaaaaaaaaaaaaaaaaaaaaaaaa

SEQ ID NO: 23696 - RNA, 4191 nt, Artificial Sequence
  SARS-CoV-2/Wuhan/WIV05/2019__EPI_ISL_402128 spike protein mRNA gc (1-1273)(K417N_E484K_N501Y_D614G)
aggagagggcgcuuggcuugcaaggacccugagcugcggcauugaagcacacccaacccaacucgacugaagucagccucacugaaccggaucugagaaucuucucucucugggcuugccagggcucuccgaaccuagcuagcauccucuucaauuccaacuagaaagcuuaccauguucguguuccuggugcugcugccccuggugagcagccagugcgugaaccugaccacccggacccagcugcccccugccuacaccaacagcuucacccggggcguguacuaccccgacaagguguuccggagcagcgugcugcacagcacccaggaccuguuccugcccuucuucagcaacgugaccugguuccacgccauccacgugagcggcaccaacggcaccaagcgguucgacaacccagugcugcccuucaacgacggcguguacuucgccagcaccgagaagucaaacaucauccggggcuggaucuucggcaccacccuggacagcaagacacagagccugcugaucgugaacaacgccaccaacguggugaucaaggugugcgaguuucaguucugcaacgaccccuuccugggcguguacuaccacaagaacaacaagagcuggauggagagcgaguuccgggucuacagcagcgcuaacaauugcaccuucgaguacgugagccagcccuuccugauggaccucgagggcaagcagggcaacuucaagaaccugcgggaguucguguucaagaacaucgauggcuacuucaagaucuacagcaagcacacccccaucaaccuggugcgggaccugccccagggauucagcgcccuggagccucugguggaccugcccaucggcaucaacaucaccagguuccagacccugcuggcccugcaccggagcuaccugacccccggcgacagcagcagcggcuggaccgccggcgccgccgcauacuacgugggcuaccugcagccacggaccuuccugcugaaguacaacgagaacggcaccaucaccgacgccguggacugcgcccuggacccccugagcgagaccaagugcacccuaaagagcuucaccguggagaagggcaucuaccagaccagcaacuuccgggugcagcccacugagagcaucgugcgguuccccaacauuaccaaccugugucccuucggcgagguguucaacgccacccgguucgccagcguguacgccuggaaccggaagcggaucagcaacugcguggccgacuacagcgugcuguacaacagcgccagcuucagcaccuucaagugcuacggcgugagcccuaccaagcugaacgaccugugcuucaccaacguguacgcugacagcuucgugauccggggcgacgaggugcggcagaucgcccccggccagaccggcaacaucgccgacuacaacuacaagcugcccgacgacuucaccggcugcgugaucgccuggaacagcaacaaccuggacagcaaggugggcggcaacuacaacuaccuguaccggcuguuccguaagagcaaccugaagccauucgagcgggacaucagcaccgagaucuaccaggccggcagcacccccugcaacggugugaagggcuuuaacugcuacuucccccugcagagcuacggcuuccagcccaccuacggcgugggcuaccagcccuaccgggugguggugcugagcuucgagcugcugcacgcccccgccaccgugugcggcccuaaaaagagcaccaaccuggugaagaacaagugcgugaacuucaauuucaacggccugaccggcaccggcgugcugaccgagagcaacaagaaguuccugcccuuccagcaguucggccgggauaucgccgacaccaccgacgcagugcgggacccccagacccuggagauccuggacaucaccccaugcagcuucggcggcgugagcgucaucacccccggcacaaacaccagcaaccagguggccgugcuguaccagggagugaacugcaccgaggugcccguggccauccacgccgaccagcugacccccaccuggcggguguacagcaccggcagcaacguguuccagacccgggccggcugccugaucggcgccgagcacgugaacaacuccuacgagugcgacauccccaucggcgcuggcaucugcgccagcuaccagacccagaccaacagcccccggcgggcccggagcguggccagccagagcaucaucgccuacaccaugagcuuaggcgccgagaacagcguggccuacagcaacaacagcaucgcgaucccuaccaacuucaccaucagcgugaccaccgagauacugcccgugagcaugaccaagaccagcguggacuguaccauguacaucugcggcgacagcaccgagugcagcaaccugcugcugcaguacggcagcuucugcacccagcugaaccgggcccugaccggcaucgccguggagcaggacaagaacacccaagagguguucgcccaggugaagcagaucuacaagacucccccaaucaaggacuucggcggcuucaacuucagccagauccugcccgaccccagcaagcccagcaagcggagcuucaucgaggaccugcuguucaacaaggugacccuggccgacgccggcuucaucaagcaguacggcgacugccugggggauaucgccgcucgggaccugaucugcgcccagaaguucaacggccugaccgugcugcccccucugcugaccgacgagaugaucgcccaguacaccagcgcccugcuugccggcaccaucaccagcggcuggaccuucggcgccggcgcagcccugcagauccccuucgccaugcagauggccuaccgguucaacggcaucggcgugacccagaacgugcuguacgagaaccagaagcugaucgccaaccaguucaacagcgccaucggcaagauccaggacagccugagcagcaccgccagcgcccugggcaagcugcaggacguggugaaccagaacgcucaggcccugaacacccuggugaagcagcugagcagcaacuucggcgccaucagcucagugcugaaugacauccugagcaggcuggacaagguggaggccgaggugcagaucgaccggcugaucaccggccggcugcagagccugcagaccuacgugacccagcagcugauccgggccgccgagauccgggccagcgccaaccuggcagccaccaagaugagcgagugcgugcugggccagagcaagcggguggacuuuugcggcaagggcuaccaccugaugagcuucccccagagcgccccacacggcgugguguuccuccacgucacauacgugcccgcccaggagaagaacuucaccaccgcccccgccauuugccacgacggcaaggcucacuucccccgggagggaguguucgugagcaacggcacccacugguucgugacccagcggaacuucuacgagccccagaucaucaccaccgacaacaccuucgugagcggcaacugcgacguggugaucggcaucgugaacaacaccguguacgacccccugcagccugagcuggacagcuucaaggaggagcuggacaaguacuucaagaaccacaccagccccgacguggaucugggcgacaucagcggcaucaacgccagcguggugaacauccagaaggagaucgaccggcugaacgagguggccaagaaccugaacgagagccugaucgaccugcaggagcugggcaaguacgagcaguacaucaaguggcccugguacaucuggcugggcuucaucgccggccugaucgccaucgugauggugaccaucaugcugugcugcaugaccagcugcuguagcugccugaagggcugcugcagcugcggcagcugcugcaaguucgacgaggacgacagcgagccagugcugaagggcgugaagcugcacuacaccugaggacuagucccuguucccagagcccacuuuuuuuucuuuuuuugaaauaaaauagccugucuuucagaucucaaaggcucuuuucagagccaccaaaaaaaaaaaaaaaaaaaaaaaaaaaaaaaaaaaaaaaaaaaaaaaaaaaaaaaaaaaaaaaaaaaaaaaaaaaaaaaaaaaaaaaaaaaaaaaaaaaaa

SEQ ID NO: 23697 - RNA, 4182 nt, Artificial Sequence
  SARS-CoV-2/Wuhan/WIV05/2019__EPI_ISL_402128 spike protein mRNA gc (1-1273)(L18F_D80A_D215G_L242del_A243del_L244del_R246I_K417N_E484 K_N501Y_D614G_A701V)
aggagagggcgcuuggcuugcaaggacccugagcugcggcauugaagcacacccaacccaacucgacugaagucagccucacugaaccggaucugagaaucuucucucucugggcuugccagggcucuccgaaccuagcuagcauccucuucaauuccaacuagaaagcuuaccauguucguguuccuggugcugcugccccuggugagcagccagugcgugaacuucaccacccggacccagcugcccccugccuacaccaacagcuucacccggggcguguacuaccccgacaagguguuccggagcagcgugcugcacagcacccaggaccuguuccugcccuucuucagcaacgugaccugguuccacgccauccacgugagcggcaccaacggcaccaagcgguucgccaacccagugcugcccuucaacgacggcguguacuucgccagcaccgagaagucaaacaucauccggggcuggaucuuuggcaccacccuggacagcaagacacagagccugcugaucgugaacaacgcuaccaacguggugaucaaggugugcgaguuccaguucugcaacgaccccuuccugggcguguacuaccacaagaacaacaagagcuggauggagagcgaguuccgggucuacagcagcgccaacaauugcaccuucgaguacgugagccagcccuuccugauggaccuggagggcaagcagggcaacuucaagaaccuccgggaguucguguucaagaacaucgacggcuacuucaagaucuacagcaagcacacccccaucaaccuggugcggggacugccccagggcuucagcgcccuggagccucugguggaucugcccaucggcaucaacaucaccagguuccagacccugcacaucagcuaccugacccccggcgacagcagcagcggcuggaccgccggcgccgccgcauacuacgugggcuaccugcagccacggaccuuccugcugaaguacaacgagaacggcaccaucaccgacgccguggacugcgcccuggacccccugagcgagaccaagugcacccuuaagagcuucaccguggagaagggcaucuaccagaccagcaacuuccgggugcagcccacugagagcauugugcgguuccccaacaucaccaaccugugucccuucggcgagguguucaacgccacccgguucgccagcguguacgccuggaaccggaagcggaucagcaacugcguggccgacuacagcgugcuguacaacagcgccagcuucagcaccuucaagugcuacggcgugagcccuaccaagcugaacgaccugugcuucaccaacguguacgcugacagcuucgugauccggggcgacgaggugcggcagaucgcccccggccagaccggcaacaucgccgacuacaacuacaagcugcccgacgacuucaccggcugcgugaucgccuggaacagcaacaaccuggacagcaaggugggcggcaacuacaacuaccuguaccggcuauuccguaagagcaaccugaagccauuugagcgggacaucagcaccgagaucuaccaggccgguagcacccccugcaacggcgugaagggcuucaacugcuacuucccccugcagagcuacggcuuccagcccaccuacggcgugggcuaccagcccuaccgggugguggugcugagcuucgagcugcugcacgcccccgccaccgugugcggcccuaaaaagagcaccaaccuggugaagaacaagugcgugaacuucaauuucaacggccugaccggcaccggcgugcugaccgagagcaacaagaaguuccugcccuuccagcaguucggccgggacaucgccgacaccaccgaugcagugcgggacccccagacccuggagauccuggacaucaccccaugcagcuucggcggcgugagcgucaucacccccggaacaaacaccagcaaccagguggccgugcuguaccagggcgugaacugcaccgaggugcccguggccauccacgccgaccagcugacccccaccuggcggguguacagcaccggcagcaacguguuccagacccgggccggcugccugaucggcgccgagcacgugaacaacuccuacgagugcgacauccccaucggcgcuggcaucugcgccagcuaccagacccagaccaacagcccccggcgggcccggagcguggccagccagagcaucaucgccuacaccaugagccugggcguggagaacagcguggccuacagcaacaacagcaucgccaucccuaccaacuucaccauaagcgugaccaccgagauccugcccgugagcaugaccaagaccagcguggacuguaccauguacaucugcggcgacagcaccgagugcagcaaccuguuacugcaguacggcagcuucugcacccagcugaaccgggcgcugaccggcaucgccguggagcaggacaagaacacccaagagguguucgcccaggugaagcagaucuacaagacucccccaaucaaggacuucggcggcuucaacuucagccagauccugcccgaccccagcaagcccagcaagcggagcuucaucgaggaccugcuguucaacaaggugacccuggccgacgccggcuucaucaagcaguacggggacugccugggcgacaucgccgcccgggaccugaucugcgcucagaaguucaacggccugaccgugcugcccccucugcugaccgaugagaugaucgcccaguacaccagcgcccugcuggccggcaccaucaccagcggcuggaccuucggcgccggcgccgcacugcagauccccuucgccaugcagauggccuaccgguucaacggcaucggcgugacccagaacgugcuguacgagaaccagaagcugaucgccaaccaguucaacagcgccaucggcaagauccaggacagccugagcagcaccgccagcgcccugggcaagcugcaggacguggugaaccagaacgcccaggcucugaacacccuggugaagcagcugagcagcaacuuuggcgccaucagcucagugcugaaugacauccugagccggcuggacaagguggaggccgaggugcagaucgacaggcugaucaccggccggcugcagagccugcagaccuacgugacccagcagcugauccgggccgccgagauucgggccagcgccaaccuggccgcaaccaagaugagcgagugcgugcugggccagagcaagcggguggacuucugcggcaagggcuaccaccugaugagcuucccccagagcgccccacacggcguggucuuccugcacgugacauacgugcccgcccaggagaagaacuucaccaccgcccccgccaucugccacgacggaaaggcccacuucccccgggagggcguguucgugagcaacggcacccacugguucgugacccagcggaacuucuacgagccccagaucaucaccaccgacaacaccuucgugagcggcaacugcgacguggugaucggcaucgugaacaacaccguguacgacccccugcagccugagcuggacagcuucaaggaggagcucgacaaguacuucaagaaccacaccagccccgacguggaccugggcgacaucagcggcaucaacgcuagcguggugaacauccagaaggagaucgaucggcugaacgagguggccaagaaccugaacgagagccugaucgaccugcaggagcugggcaaguacgagcaguacaucaaguggcccugguacaucuggcugggcuucaucgccggccugaucgccaucgugauggugaccaucaugcugugcugcaugaccagcugcuguagcugccugaagggcugcugcagcugcggcagcugcugcaaguucgacgaggacgacagcgagccagugcugaagggcgugaagcugcacuacaccugaggacuagucccuguucccagagcccacuuuuuuuucuuuuuuugaaauaaaauagccugucuuucagaucucaaaggcucuuuucagagccaccaaaaaaaaaaaaaaaaaaaaaaaaaaaaaaaaaaaaaaaaaaaaaaaaaaaaaaaaaaaaaaaaaaaaaaaaaaaaaaaaaaaaaaaaaaaaaaaaaaaaa

SEQ ID NO: 23698 - RNA, 4191 nt, Artificial Sequence
  SARS-CoV-2/Wuhan/WIV05/2019__EPI_ISL_402128 spike protein mRNA gc (1-1273)(E484K_D614G)
aggagagggcgcuuggcuugcaaggacccugagcugcggcauugaagcacacccaacccaacucgacugaagucagccucacugaaccggaucugagaaucuucucucucugggcuugccagggcucuccgaaccuagcuagcauccucuucaauuccaacuagaaagcuuaccauguucguguuccuggugcugcugccccuggugagcagccagugcgugaaccugaccacccggacccagcugcccccugccuacaccaacagcuucacccggggcguguacuaccccgacaagguguuccggagcagcgugcugcacagcacccaggaccuguuccugcccuucuucagcaacgugaccugguuccacgccauccacgugagcggcaccaacggcaccaagcgguucgacaacccagugcugcccuucaacgacggcguguacuucgccagcaccgagaagucaaacaucauccggggcuggaucuucggcaccacccuggacagcaagacacagagccugcugaucgugaacaacgccaccaacguggugaucaaggugugcgaguuucaguucugcaacgaccccuuccugggcguguacuaccacaagaacaacaagagcuggauggagagcgaguuccgggucuacagcagcgcuaacaauugcaccuucgaguacgugagccagcccuuccugauggaccucgagggcaagcagggcaacuucaagaaccugcgggaguucguguucaagaacaucgauggcuacuucaagaucuacagcaagcacacccccaucaaccuggugcgggaccugccccagggauucagcgcccuggagccucugguggaccugcccaucggcaucaacaucaccagguuccagacccugcuggcccugcaccggagcuaccugacccccggcgacagcagcagcggcuggaccgccggcgccgccgcauacuacgugggcuaccugcagccacggaccuuccugcugaaguacaacgagaacggcaccaucaccgacgccguggacugcgcccuggacccccugagcgagaccaagugcacccuaaagagcuucaccguggagaagggcaucuaccagaccagcaacuuccgggugcagcccacugagagcaucgugcgguuccccaacauuaccaaccugugucccuucggcgagguguucaacgccacccgguucgccagcguguacgccuggaaccggaagcggaucagcaacugcguggccgacuacagcgugcuguacaacagcgccagcuucagcaccuucaagugcuacggcgugagcccuaccaagcugaacgaccugugcuucaccaacguguacgcugacagcuucgugauccggggcgacgaggugcggcagaucgcccccggccagaccggcaagaucgccgacuacaacuacaagcugcccgacgacuucaccggcugcgugaucgccuggaacagcaacaaccuggacagcaaggugggcggcaacuacaacuaccuguaccggcuguuccguaagagcaaccugaagccauucgagcgggacaucagcaccgagaucuaccaggccggcagcacccccugcaacggugugaagggcuuuaacugcuacuucccccugcagagcuacggcuuccagcccaccaacggcgugggcuaccagcccuaccgggugguggugcugagcuucgagcugcugcacgcccccgccaccgugugcggcccuaaaaagagcaccaaccuggugaagaacaagugcgugaacuucaauuucaacggccugaccggcaccggcgugcugaccgagagcaacaagaaguuccugcccuuccagcaguucggccgggauaucgccgacaccaccgacgcagugcgggacccccagacccuggagauccuggacaucaccccaugcagcuucggcggcgugagcgucaucacccccggcacaaacaccagcaaccagguggccgugcuguaccagggagugaacugcaccgaggugcccguggccauccacgccgaccagcugacccccaccuggcggguguacagcaccggcagcaacguguuccagacccgggccggcugccugaucggcgccgagcacgugaacaacuccuacgagugcgacauccccaucggcgcuggcaucugcgccagcuaccagacccagaccaacagcccccggcgggcccggagcguggccagccagagcaucaucgccuacaccaugagcuuaggcgccgagaacagcguggccuacagcaacaacagcaucgcgaucccuaccaacuucaccaucagcgugaccaccgagauacugcccgugagcaugaccaagaccagcguggacuguaccauguacaucugcggcgacagcaccgagugcagcaaccugcugcugcaguacggcagcuucugcacccagcugaaccgggcccugaccggcaucgccguggagcaggacaagaacacccaagagguguucgcccaggugaagcagaucuacaagacucccccaaucaaggacuucggcggcuucaacuucagccagauccugcccgaccccagcaagcccagcaagcggagcuucaucgaggaccugcuguucaacaaggugacccuggccgacgccggcuucaucaagcaguacggcgacugccugggggauaucgccgcucgggaccugaucugcgcccagaaguucaacggccugaccgugcugcccccucugcugaccgacgagaugaucgcccaguacaccagcgcccugcuugccggcaccaucaccagcggcuggaccuucggcgccggcgcagcccugcagauccccuucgccaugcagauggccuaccgguucaacggcaucggcgugacccagaacgugcuguacgagaaccagaagcugaucgccaaccaguucaacagcgccaucggcaagauccaggacagccugagcagcaccgccagcgcccugggcaagcugcaggacguggugaaccagaacgcucaggcccugaacacccuggugaagcagcugagcagcaacuucggcgccaucagcucagugcugaaugacauccugagcaggcuggacaagguggaggccgaggugcagaucgaccggcugaucaccggccggcugcagagccugcagaccuacgugacccagcagcugauccgggccgccgagauccgggccagcgccaaccuggcagccaccaagaugagcgagugcgugcugggccagagcaagcggguggacuuuugcggcaagggcuaccaccugaugagcuucccccagagcgccccacacggcgugguguuccuccacgucacauacgugcccgcccaggagaagaacuucaccaccgcccccgccauuugccacgacggcaaggcucacuucccccgggagggaguguucgugagcaacggcacccacugguucgugacccagcggaacuucuacgagccccagaucaucaccaccgacaacaccuucgugagcggcaacugcgacguggugaucggcaucgugaacaacaccguguacgacccccugcagccugagcuggacagcuucaaggaggagcuggacaaguacuucaagaaccacaccagccccgacguggaucugggcgacaucagcggcaucaacgccagcguggugaacauccagaaggagaucgaccggcugaacgagguggccaagaaccugaacgagagccugaucgaccugcaggagcugggcaaguacgagcaguacaucaaguggcccugguacaucuggcugggcuucaucgccggccugaucgccaucgugauggugaccaucaugcugugcugcaugaccagcugcuguagcugccugaagggcugcugcagcugcggcagcugcugcaaguucgacgaggacgacagcgagccagugcugaagggcgugaagcugcacuacaccugaggacuagucccuguucccagagcccacuuuuuuuucuuuuuuugaaauaaaauagccugucuuucagaucucaaaggcucuuuucagagccaccaaaaaaaaaaaaaaaaaaaaaaaaaaaaaaaaaaaaaaaaaaaaaaaaaaaaaaaaaaaaaaaaaaaaaaaaaaaaaaaaaaaaaaaaaaaaaaaaaaaaa

SEQ ID NO: 23699 - RNA, 4191 nt, Artificial Sequence
  SARS-CoV-2/Wuhan/WIV05/2019__EPI_ISL_402128 spike protein mRNA gc (1-1273)(L18F_T20N_P26S_D138Y_R190S_K417T_E484K_N501Y_D614G_H655Y _T1027I)
aggagagggcgcuuggcuugcaaggacccugagcugcggcauugaagcacacccaacccaacucgacugaagucagccucacugaaccggaucugagaaucuucucucucugggcuugccagggcucuccgaaccuagcuagcauccucuucaauuccaacuagaaagcuuaccauguucguguuccuggugcugcugccccuggugagcagccagugcgugaacuucaccaaccggacccagcugcccagcgccuacaccaacagcuucacccggggcguguacuacccugacaagguguuccggagcagcgugcugcacagcacccaggaccuguuccugcccuucuucagcaacgugaccugguuccacgccauccacgugagcggcaccaacggcaccaagcgguucgacaaccccgugcugccauucaacgacggcguguacuucgccagcaccgagaagucaaacaucauccggggcuggaucuuuggcaccacccuggacagcaagacccagagccugcugaucgugaacaacgccacaaacguggugaucaaggugugcgaguuccaguucugcaacuaccccuuccugggcguguacuaccacaagaacaacaagagcuggauggagagcgaguuccgggucuacagcagcgcuaauaacugcaccuucgaguacgugagccagcccuuccugauggaccuggagggcaagcagggcaacuucaagaaccucagcgaguucguguucaagaacaucgacggcuacuucaagaucuacagcaagcacacccccaucaaccuggugcgggaucugccccagggauucagcgcccuggagccccugguggaccugccuaucggcaucaacaucacccgguuccagacccugcuggcccugcacaggagcuaccugacccccggcgacagcagcagcggcuggaccgccggcgccgccgcauacuacgugggcuaccugcagccccggaccuuccugcugaaguacaacgagaacggcaccaucaccgacgccguggacugcgcccuggacccacugagcgagaccaagugcacccuaaagagcuucaccguggagaagggcaucuaccagaccagcaacuuccgggugcagcccaccgagagcaucgugcgguuccccaacauuacuaaccugugucccuucggcgagguguucaacgccacccgguucgccagcguguacgccuggaaccggaagcggaucagcaacugcguggccgacuacagcgugcuguacaacagcgccagcuucagcaccuucaagugcuacggcgugagccccaccaagcugaacgaccugugcuucaccaacguguacgcugacagcuucgugauccggggcgacgaggugcggcagaucgccccuggccagaccggcaccaucgccgacuacaacuacaagcugcccgacgacuucaccggcugcgugaucgccuggaacagcaacaaccuggacagcaaggugggcggcaacuacaacuaccuguaccggcuguuccguaagagcaaccugaagcccuuugagcgggacaucagcaccgagaucuaccaggccggcagcaccccaugcaacggugugaagggcuucaacugcuacuucccccugcagagcuacggcuuccagcccaccuacggcgugggcuaccagcccuaccgggugguggugcugagcuucgagcugcugcacgcccccgccaccgugugcggccccaaaaagagcaccaaccuggugaagaacaagugcgugaacuucaauuucaacggccugaccggcaccggcgugcugaccgagagcaacaagaaguuccugccuuuccagcaguucggccgggacaucgccgauaccaccgacgcagugcgggacccccagacccuggagauccuggacaucacccccugcagcuucggcggcgugagcgucaucaccccaggcacaaacaccagcaaccagguggccgugcuguaccagggagugaacugcaccgaggugcccguggccauccacgccgaccagcugacccccaccuggcggguguacuccaccggcagcaacguguuccagacccgggccggcugccugaucggcgccgaguacgugaacaacagcuacgagugcgacauccccaucggcgcuggcaucugcgccagcuaccagacccagaccaacagcccccggcgggcccggagcguggccagccagagcaucaucgccuacaccaugagccugggcgccgagaacagcguggccuacagcaacaacagcaucgcgauccccaccaacuucaccaucagcgugaccaccgagauauuaccugugagcaugaccaagaccagcguggacuguaccauguacaucugcggcgacagcaccgagugcagcaaccugcugcugcaguacggcagcuucugcacccagcugaaccgggcccugaccggcaucgccguggagcaggacaagaacacccaagagguguucgcccaggugaagcagaucuacaagacuccacccaucaaggacuucggcggcuucaacuucagccagauccugcccgaccccagcaagcccagcaagcggagcuucaucgaggaccugcuguucaacaaggugacccuggccgacgccggcuucaucaagcaguacggcgacugccugggggacaucgccgcucgggaucugaucugcgcccagaaguucaacggccugaccgugcugccuccccugcugaccgacgagaugaucgcccaguacaccagcgcccugcuggccggcaccaucaccagcggcuggaccuucggcgccggcgcagcccuucagauccccuucgccaugcagauggccuaccgguucaacggcaucggcgugacccagaacgugcuguacgagaaccagaagcugaucgccaaccaguucaacagcgccaucggcaagauccaggacagccugagcagcaccgccagcgcccugggcaagcugcaggacguggugaaccagaacgcucaggcccugaacacccuggugaagcagcugagcucaaacuuuggcgccaucagcagcgugcugaaugacauccugagccggcuggacaagguggaggccgaggugcagaucgacaggcugaucaccggccggcugcagagccugcagaccuacgugacccagcagcugauccgggccgccgagauccgggccagcgccaaccuggcagccauuaagaugagcgagugcgugcugggccagagcaagcggguggacuucugcggcaagggcuaccaccugaugagcuucccccagagcgcuccccacggcgugguguuccugcacgucaccuacgugccagcccaggagaagaacuucacaaccgcccccgccaucugccacgacggcaaggcccacuucccccgggagggaguguucgugagcaacggcacccacugguucgugacccagcggaacuucuacgagccccagaucaucaccaccgacaacaccuucgugagcggcaacugcgacguggugaucggcaucgugaacaacaccguguacgacccccuccagcccgagcuggacagcuucaaggaggagcuggacaaguacuucaagaaccacaccagcccugacguggaccugggcgauaucagcggcaucaacgccagcguggugaacauccagaaggagaucgaccggcugaacgagguggccaagaaccugaacgagagccugaucgaccugcaggagcugggcaaguacgagcaguacaucaaguggcccugguacaucuggcugggcuucaucgccggccugaucgccaucgugauggugaccaucaugcugugcugcaugaccagcugcuguagcugccugaagggcugcugcagcugcggcagcugcugcaaguucgacgaggacgacagcgagcccgugcugaagggcgugaagcugcacuacaccugaggacuagucccuguucccagagcccacuuuuuuuucuuuuuuugaaauaaaauagccugucuuucagaucucaaaggcucuuuucagagccaccaaaaaaaaaaaaaaaaaaaaaaaaaaaaaaaaaaaaaaaaaaaaaaaaaaaaaaaaaaaaaaaaaaaaaaaaaaaaaaaaaaaaaaaaaaaaaaaaaaaaa

SEQ ID NO: 23700 - RNA, 4191 nt, Artificial Sequence
  SARS-CoV-2/Wuhan/WIV05/2019__EPI_ISL_402128 spike protein mRNA gc (1-1273)(S13I_W152C_L452R_D614G)
aggagagggcgcuuggcuugcaaggacccugagcugcggcauugaagcacacccaacccaacucgacugaagucagccucacugaaccggaucugagaaucuucucucucugggcuugccagggcucuccgaaccuagcuagcauccucuucaauuccaacuagaaagcuuaccauguucguguuccuggugcugcugccccuggugagcauccagugcgugaaccugaccacccggacccagcugcccccugccuacaccaacagcuucacccggggcguguacuaccccgacaagguguuccggagcagcgugcugcacagcacccaggaccuguuccugcccuucuucagcaacgugaccugguuccacgccauccacgugagcggcaccaacggcaccaagcgguucgacaacccagugcugcccuucaacgacggcguguacuucgccagcaccgagaagucaaacaucauccggggcuggaucuucggcaccacccuggacagcaagacacagagccugcugaucgugaacaacgccaccaacguggugaucaaggugugcgaguuucaguucugcaacgaccccuuccugggcguguacuaccacaagaacaacaagagcugcauggagagcgaguuccgggucuacagcagcgcuaacaauugcaccuucgaguacgugagccagcccuuccugauggaccucgagggcaagcagggcaacuucaagaaccugcgggaguucguguucaagaacaucgauggcuacuucaagaucuacagcaagcacacccccaucaaccuggugcgggaccugccccagggauucagcgcccuggagccucugguggaccugcccaucggcaucaacaucaccagguuccagacccugcuggcccugcaccggagcuaccugacccccggcgacagcagcagcggcuggaccgccggcgccgccgcauacuacgugggcuaccugcagccacggaccuuccugcugaaguacaacgagaacggcaccaucaccgacgccguggacugcgcccuggacccccugagcgagaccaaguguacccuaaagagcuucaccguggagaagggcaucuaccagaccagcaacuuccgggugcagcccacugagagcauugugcgguuccccaacaucaccaaccugugccccuucggcgagguguucaacgccacccgguucgccagcguguacgccuggaaccggaagcggaucagcaacugcguggccgacuacagcgugcuguacaacagcgccagcuucagcaccuucaagugcuacggcgugagcccuaccaagcugaacgaccugugcuucaccaacguguacgcugacagcuucgugauccggggcgacgaggugcggcagaucgcccccggccagaccggcaagaucgccgacuacaacuacaagcugcccgacgacuucaccggcugcgugaucgccuggaacagcaacaaccuggacagcaaggugggcggcaacuacaacuaccgguaccggcuguuccguaagagcaaccugaagccauucgagcgggacaucagcaccgagaucuaccaggccggcagcacccccugcaacgguguggagggcuuuaacugcuacuucccccugcagagcuacggcuuccagcccaccaacggcgugggcuaccagcccuaccgggugguggugcugagcuucgagcugcugcacgcccccgccaccgugugcggcccuaaaaagagcaccaaccuggugaagaacaagugcgugaacuucaauuucaacggccugaccggcaccggcgugcugaccgagagcaacaagaaguuccugcccuuccagcaguucggccgggauaucgccgacaccaccgacgcagugcgggacccccagacccuggagauccuggacaucaccccaugcagcuucggcggcgugagcgucaucacccccggcacaaacaccagcaaccagguggccgugcuguaccagggagugaacugcaccgaggugcccguggccauccacgccgaccagcugacccccaccuggcggguguacagcaccggcagcaacguguuccagacccgggccggcugccugaucggcgccgagcacgugaacaacagcuacgagugcgacauccccaucggcgcuggcaucugugccuccuaccagacccagaccaacagcccccggcgggcccggagcguggccagccagagcaucaucgccuacaccaugagccugggcgccgagaacagcguggccuacagcaacaacagcaucgcgaucccuaccaacuucaccauaagcgugaccaccgagaucuuacccgugagcaugaccaagaccagcguggacugcaccauguacaucugcggcgacagcaccgagugcagcaaccugcugcugcaguacggcagcuucugcacccagcugaaccgggcccugaccggcaucgccguggagcaggacaagaacacccaagagguguucgcccaggugaagcagaucuacaagacucccccaaucaaggacuucggcggcuucaacuucagccagauccugcccgaccccagcaagcccagcaagcggagcuucaucgaggaccugcuguucaacaaggugacccuggccgacgccggcuucaucaagcaguacggcgacugccugggggauaucgccgcucgggaccugaucugcgcccagaaguucaacggccugaccgugcugcccccucugcugaccgacgagaugaucgcccaguacaccagcgcccugcuggccggcaccaucaccagcggcuggaccuucggcgccggcgcagcccuucagauccccuucgccaugcagauggccuacagguucaacggcaucggcgugacccagaacgugcuguacgagaaccagaagcugaucgccaaccaguucaacagcgccaucggcaagauccaggacagccugagcagcaccgccagcgcccugggcaagcugcaggacguggugaaccagaacgcucaggcccugaacacccuggugaagcagcugagcagcaacuucggcgccaucagcagcgugcugaaugacauccugucacggcuggacaagguggaggccgaggugcagaucgaccggcugaucaccggccggcugcagagccugcagaccuacgugacccagcagcugauccgggccgccgagauucgggccagcgccaaccuggcagccaccaagaugagcgagugcgugcugggccagagcaagcggguggacuuuugcggcaagggcuaccaccugaugagcuucccccagagcgccccacacggcgugguguuccugcacgucacauacgugcccgcccaggagaagaacuucaccaccgcccccgccaucugccacgacggcaaggcucacuucccccgggagggaguguucgugagcaacggcacccacugguucgugacccagcggaacuucuacgagccccagaucaucaccaccgacaacaccuucgugagcggcaacugcgacguggugaucggcaucgugaacaacaccguguacgacccccuccagccugagcuggacagcuucaaggaggagcuggacaaguacuucaagaaccacaccagccccgacguggaucugggcgacaucagcggcaucaacgccagcguggugaacauccagaaggagaucgaccggcugaacgagguggccaagaaccugaacgagagccugaucgaccugcaggagcugggcaaguacgagcaguacaucaaguggcccugguacaucuggcugggcuucaucgccggccugaucgccaucgugauggugaccaucaugcugugcugcaugaccagcuguugcagcugccugaagggcugcugcagcugcggcagcugcugcaaguucgacgaggacgacagcgagccagugcugaagggcgugaagcugcacuacaccugaggacuagucccuguucccagagcccacuuuuuuuucuuuuuuugaaauaaaauagccugucuuucagaucucaaaggcucuuuucagagccaccaaaaaaaaaaaaaaaaaaaaaaaaaaaaaaaaaaaaaaaaaaaaaaaaaaaaaaaaaaaaaaaaaaaaaaaaaaaaaaaaaaaaaaaaaaaaaaaaaaaaa

SEQ ID NO: 23701 - RNA, 4191 nt, Artificial Sequence
  SARS-CoV-2/Wuhan/WIV05/2019__EPI_ISL_402128 spike protein mRNA gc mod (1-1273)
aggagagggcgcuuggcuugcaaggacccugagcugcggcauugaagcacacccaacccaacucgacugaagucagccucacugaaccggaucugagaaucuucucucucugggcuugccagggcucuccgaaccuagcuagcauccucuucaauuccaacuagaaagcuuaccauguucguguuucuggugcugcugccccugguguccagccagugugugaaccugaccaccagaacacagcugccuccagccuacaccaacagcuucaccagaggcguguacuaccccgacaagguguucagauccagcgugcugcacucuacccaggaccuguuccugccuuucuucagcaacgugaccugguuccacgccauccacguguccggcaccaauggcaccaagagauucgacaaccccgugcugcccuucaacgacgggguguacuuugccagcaccgagaaguccaacaucaucagaggcuggaucuucggcaccacacuggacagcaagacccagagccugcugaucgugaacaacgccaccaacguggucaucaaagugugcgaguuccaguucugcaacgaccccuuccugggcgucuacuaccacaagaacaacaagagcuggauggaaagcgaguuccggguguacagcagcgccaacaacugcaccuucgaguacgugucccagccuuuccugauggaccuggaaggcaagcagggcaacuucaagaaccugcgcgaguucguguucaagaacaucgacggcuacuucaaaaucuacagcaagcacaccccuaucaaccucgugcgggaucugccucagggcuucucugcucuggaaccccugguggaucugcccaucggcaucaacaucacccgguuucagacacugcuggcccugcacagaagcuaccugacaccuggcgauagcagcagcggauggacagcuggugccgccgcuuacuaugugggcuaccugcagccuagaaccuuccugcugaaguacaacgagaacggcaccaucaccgacgccguggauugugcucuggauccucugagcgagacaaagugcacccugaaguccuucaccguggaaaagggcaucuaccagaccagcaacuuccgggugcagcccaccgaauccaucgugcgguuccccaauaucaccaaucugugccccuucggcgagguguucaaugccaccagauucgccucuguguacgccuggaaccggaagcggaucagcaauugcguggccgacuacuccgugcuguacaacuccgccagcuucagcaccuucaagugcuacggcguguccccuaccaagcugaacgaccugugcuucacaaacguguacgccgacagcuucgugauccggggagaugaagugcggcagauugccccuggacagacaggcaagaucgccgacuacaacuacaagcugcccgacgacuucaccggcugugugauugccuggaacagcaacaaccuggacuccaaagucggcggcaacuacaauuaccuguaccggcuguuccggaaguccaaucugaagcccuucgagcgggacaucagcaccgaaaucuaucaggccggcagcaccccuugcaacggcguggaaggcuucaacugcuacuucccacugcaguccuacggcuuucagcccacaaauggcgugggcuaucagcccuacagagugguggugcugagcuucgaacugcugcaugcuccugccacagugugcggcccuaagaaaagcaccaaucucgugaagaacaaaugcgugaacuucaacuucaacggccugaccggcaccggcgugcugacagagagcaacaagaaguuccugccauuccagcaguuuggccgggauaucgccgauaccacagacgccguuagagauccccagacacuggaaauccuggacaucaccccaugcagcuucggcggagugucugugaucaccccuggcaccaacaccagcaaucagguggcagugcuguaccaggacgugaacuguaccgaagugcccguggccauucacgccgaucagcugacaccuacauggcggguguacuccaccggcagcaauguguuucagaccagagccggcugucugaucggagccgagcacgugaacaauagcuacgagugcgacauccccaucggcgcuggcaucugugccagcuaccagacacagacaaacagccccagacgggcuagaagcguggccagccagagcaucauugccuacacaaugucucugggcgccgagaacagcguggccuacuccaacaacucuaucgcuauccccaccaacuucaccaucagcgugaccaccgagauccugccuguguccaugaccaagaccagcguggacugcaccauguacaucugcggcgauuccaccgagugcuccaaccugcugcugcaguacggcagcuucugcacccagcugaauagagcccugacagggaucgccguggaacaggacaagaacacccaagagguguucgcccaagugaagcaaaucuacaagaccccuccuaucaaggacuucggcggcuucaauuucagccagauucugcccgauccuagcaagcccagcaagcggagcuucaucgaggaccugcuguucaacaaagugacacuggccgacgccggcuucaucaagcaguauggcgauugucugggcgacauugccgccagggaucugauuugcgcccagaaguuuaacggacugacagugcugccuccucugcugaccgaugagaugaucgcccaguacacaucugcccugcuggccggcacaaucacaagcggcuggacauuuggagcuggcgccgcucugcagauccccuuugcuaugcagauggccuaccgguucaacggcaucggagugacccagaaugugcuguacgagaaccagaagcugaucgccaaccaguucaacagcgccaucggcaagauccaggacagccugagcagcacagcaagcgcccugggaaagcugcaggacguggucaaccagaaugcccaggcacugaacacccuggucaagcagcuguccuccaacuucggcgccaucagcucugugcugaacgauauccugagcagacuggacaaggucgaggccgaggugcagaucgacagacugaucacaggcagacugcagagccuccagacauacgugacccagcagcugaucagagccgccgagauuagagccucugccaaucuggccgccaccaagaugucugagugugugcugggccagagcaagagaguggacuuuugcggcaagggcuaccaccugaugagcuucccucagucugccccucacggcgugguguuucugcacgugacauaugugcccgcucaagagaagaauuucaccaccgcuccagccaucugccacgacggcaaagcccacuuuccuagagaaggcguguucguguccaacggcacccauugguucgugacacagcggaacuucuacgagccccagaucaucaccaccgacaacaccuucgugucuggcaacugcgacguugugaucggcauugugaacaauaccguguacgacccucugcagcccgagcuggacagcuucaaagaggaacuggacaaguacuuuaagaaccacacaagccccgacguggaccugggcgauaucagcggaaucaaugccagcgucgugaacauccagaaagagaucgaccggcugaacgagguggccaagaaucugaacgagagccugaucgaccugcaagaacuggggaaguacgagcaguacaucaaguggcccugguacaucuggcugggcuuuaucgccggacugauugccaucgugauggucacaaucaugcuguguugcaugaccagcugcuguagcugccugaagggcuguuguagcuguggcagcugcugcaaguucgacgaggacgauucugagcccgugcugaagggcgugaaacugcacuacaccugaggacuagucccuguucccagagcccacuuuuuuuucuuuuuuugaaauaaaauagccugucuuucagaucucaaaggcucuuuucagagccaccaaaaaaaaaaaaaaaaaaaaaaaaaaaaaaaaaaaaaaaaaaaaaaaaaaaaaaaaaaaaaaaaaaaaaaaaaaaaaaaaaaaaaaaaaaaaaaaaaaaaa

SEQ ID NO: 23702 - RNA, 4191 nt, Artificial Sequence
  SARS-CoV-2/Wuhan/WIV05/2019__EPI_ISL_402128 spike protein mRNA gc mod (1-1273)(D614G)
aggagagggcgcuuggcuugcaaggacccugagcugcggcauugaagcacacccaacccaacucgacugaagucagccucacugaaccggaucugagaaucuucucucucugggcuugccagggcucuccgaaccuagcuagcauccucuucaauuccaacuagaaagcuuaccauguucguguuucuggugcugcugccccugguguccagccagugugugaaccugaccaccagaacacagcugccuccagccuacaccaacagcuucaccagaggcguguacuaccccgacaagguguucagauccagcgugcugcacucuacccaggaccuguuccugccuuucuucagcaacgugaccugguuccacgccauccacguguccggcaccaauggcaccaagagauucgacaaccccgugcugcccuucaacgacgggguguacuuugccagcaccgagaaguccaacaucaucagaggcuggaucuucggcaccacacuggacagcaagacccagagccugcugaucgugaacaacgccaccaacguggucaucaaagugugcgaguuccaguucugcaacgaccccuuccugggcgucuacuaccacaagaacaacaagagcuggauggaaagcgaguuccggguguacagcagcgccaacaacugcaccuucgaguacgugucccagccuuuccugauggaccuggaaggcaagcagggcaacuucaagaaccugcgcgaguucguguucaagaacaucgacggcuacuucaaaaucuacagcaagcacaccccuaucaaccucgugcgggaucugccucagggcuucucugcucuggaaccccugguggaucugcccaucggcaucaacaucacccgguuucagacacugcuggcccugcacagaagcuaccugacaccuggcgauagcagcagcggauggacagcuggugccgccgcuuacuaugugggcuaccugcagccuagaaccuuccugcugaaguacaacgagaacggcaccaucaccgacgccguggauugugcucuggauccucugagcgagacaaagugcacccugaaguccuucaccguggaaaagggcaucuaccagaccagcaacuuccgggugcagcccaccgaauccaucgugcgguuccccaauaucaccaaucugugccccuucggcgagguguucaaugccaccagauucgccucuguguacgccuggaaccggaagcggaucagcaauugcguggccgacuacuccgugcuguacaacuccgccagcuucagcaccuucaagugcuacggcguguccccuaccaagcugaacgaccugugcuucacaaacguguacgccgacagcuucgugauccggggagaugaagugcggcagauugccccuggacagacaggcaagaucgccgacuacaacuacaagcugcccgacgacuucaccggcugugugauugccuggaacagcaacaaccuggacuccaaagucggcggcaacuacaauuaccuguaccggcuguuccggaaguccaaucugaagcccuucgagcgggacaucagcaccgaaaucuaucaggccggcagcaccccuugcaacggcguggaaggcuucaacugcuacuucccacugcaguccuacggcuuucagcccacaaauggcgugggcuaucagcccuacagagugguggugcugagcuucgaacugcugcaugcuccugccacagugugcggcccuaagaaaagcaccaaucucgugaagaacaaaugcgugaacuucaacuucaacggccugaccggcaccggcgugcugacagagagcaacaagaaguuccugccauuccagcaguuuggccgggauaucgccgauaccacagacgccguuagagauccccagacacuggaaauccuggacaucaccccaugcagcuucggcggagugucugugaucaccccuggcaccaacaccagcaaucagguggcagugcuguaccagggcgugaacuguaccgaagugcccguggccauucacgccgaucagcugacaccuacauggcggguguacuccaccggcagcaauguguuucagaccagagccggcugucugaucggagccgagcacgugaacaauagcuacgagugcgacauccccaucggcgcuggcaucugugccagcuaccagacacagacaaacagccccagacgggcuagaagcguggccagccagagcaucauugccuacacaaugucucugggcgccgagaacagcguggccuacuccaacaacucuaucgcuauccccaccaacuucaccaucagcgugaccaccgagauccugccuguguccaugaccaagaccagcguggacugcaccauguacaucugcggcgauuccaccgagugcuccaaccugcugcugcaguacggcagcuucugcacccagcugaauagagcccugacagggaucgccguggaacaggacaagaacacccaagagguguucgcccaagugaagcaaaucuacaagaccccuccuaucaaggacuucggcggcuucaauuucagccagauucugcccgauccuagcaagcccagcaagcggagcuucaucgaggaccugcuguucaacaaagugacacuggccgacgccggcuucaucaagcaguauggcgauugucugggcgacauugccgccagggaucugauuugcgcccagaaguuuaacggacugacagugcugccuccucugcugaccgaugagaugaucgcccaguacacaucugcccugcuggccggcacaaucacaagcggcuggacauuuggagcuggcgccgcucugcagauccccuuugcuaugcagauggccuaccgguucaacggcaucggagugacccagaaugugcuguacgagaaccagaagcugaucgccaaccaguucaacagcgccaucggcaagauccaggacagccugagcagcacagcaagcgcccugggaaagcugcaggacguggucaaccagaaugcccaggcacugaacacccuggucaagcagcuguccuccaacuucggcgccaucagcucugugcugaacgauauccugagcagacuggacaaggucgaggccgaggugcagaucgacagacugaucacaggcagacugcagagccuccagacauacgugacccagcagcugaucagagccgccgagauuagagccucugccaaucuggccgccaccaagaugucugagugugugcugggccagagcaagagaguggacuuuugcggcaagggcuaccaccugaugagcuucccucagucugccccucacggcgugguguuucugcacgugacauaugugcccgcucaagagaagaauuucaccaccgcuccagccaucugccacgacggcaaagcccacuuuccuagagaaggcguguucguguccaacggcacccauugguucgugacacagcggaacuucuacgagccccagaucaucaccaccgacaacaccuucgugucuggcaacugcgacguugugaucggcauugugaacaauaccguguacgacccucugcagcccgagcuggacagcuucaaagaggaacuggacaaguacuuuaagaaccacacaagccccgacguggaccugggcgauaucagcggaaucaaugccagcgucgugaacauccagaaagagaucgaccggcugaacgagguggccaagaaucugaacgagagccugaucgaccugcaagaacuggggaaguacgagcaguacaucaaguggcccugguacaucuggcugggcuuuaucgccggacugauugccaucgugauggucacaaucaugcuguguugcaugaccagcugcuguagcugccugaagggcuguuguagcuguggcagcugcugcaaguucgacgaggacgauucugagcccgugcugaagggcgugaaacugcacuacaccugaggacuagucccuguucccagagcccacuuuuuuuucuuuuuuugaaauaaaauagccugucuuucagaucucaaaggcucuuuucagagccaccaaaaaaaaaaaaaaaaaaaaaaaaaaaaaaaaaaaaaaaaaaaaaaaaaaaaaaaaaaaaaaaaaaaaaaaaaaaaaaaaaaaaaaaaaaaaaaaaaaaaa

SEQ ID NO: 23703 - RNA, 4191 nt, Artificial Sequence
  SARS-CoV-2/Wuhan/WIV05/2019__EPI_ISL_402128 spike protein mRNA gc mod (1-1273)(A222V_D614G)
aggagagggcgcuuggcuugcaaggacccugagcugcggcauugaagcacacccaacccaacucgacugaagucagccucacugaaccggaucugagaaucuucucucucugggcuugccagggcucuccgaaccuagcuagcauccucuucaauuccaacuagaaagcuuaccauguucguguuucuggugcugcugccccugguguccagccagugugugaaccugaccaccagaacacagcugccuccagccuacaccaacagcuucaccagaggcguguacuaccccgacaagguguucagauccagcgugcugcacucuacccaggaccuguuccugccuuucuucagcaacgugaccugguuccacgccauccacguguccggcaccaauggcaccaagagauucgacaaccccgugcugcccuucaacgacgggguguacuuugccagcaccgagaaguccaacaucaucagaggcuggaucuucggcaccacacuggacagcaagacccagagccugcugaucgugaacaacgccaccaacguggucaucaaagugugcgaguuccaguucugcaacgaccccuuccugggcgucuacuaccacaagaacaacaagagcuggauggaaagcgaguuccggguguacagcagcgccaacaacugcaccuucgaguacgugucccagccuuuccugauggaccuggaaggcaagcagggcaacuucaagaaccugcgcgaguucguguucaagaacaucgacggcuacuucaaaaucuacagcaagcacaccccuaucaaccucgugcgggaucugccucagggcuucucugugcuggaaccccugguggaucugcccaucggcaucaacaucacccgguuucagacacugcuggcccugcacagaagcuaccugacaccuggcgauagcagcagcggauggacagcuggugccgccgcuuacuaugugggcuaccugcagccuagaaccuuccugcugaaguacaacgagaacggcaccaucaccgacgccguggauugugcucuggauccucugagcgagacaaagugcacccugaaguccuucaccguggaaaagggcaucuaccagaccagcaacuuccgggugcagcccaccgaauccaucgugcgguuccccaauaucaccaaucugugccccuucggcgagguguucaaugccaccagauucgccucuguguacgccuggaaccggaagcggaucagcaauugcguggccgacuacuccgugcuguacaacuccgccagcuucagcaccuucaagugcuacggcguguccccuaccaagcugaacgaccugugcuucacaaacguguacgccgacagcuucgugauccggggagaugaagugcggcagauugccccuggacagacaggcaagaucgccgacuacaacuacaagcugcccgacgacuucaccggcugugugauugccuggaacagcaacaaccuggacuccaaagucggcggcaacuacaauuaccuguaccggcuguuccggaaguccaaucugaagcccuucgagcgggacaucagcaccgaaaucuaucaggccggcagcaccccuugcaacggcguggaaggcuucaacugcuacuucccacugcaguccuacggcuuucagcccacaaauggcgugggcuaucagcccuacagagugguggugcugagcuucgaacugcugcaugcuccugccacagugugcggcccuaagaaaagcaccaaucucgugaagaacaaaugcgugaacuucaacuucaacggccugaccggcaccggcgugcugacagagagcaacaagaaguuccugccauuccagcaguuuggccgggauaucgccgauaccacagacgccguuagagauccccagacacuggaaauccuggacaucaccccaugcagcuucggcggagugucugugaucaccccuggcaccaacaccagcaaucagguggcagugcuguaccagggcgugaacuguaccgaagugcccguggccauucacgccgaucagcugacaccuacauggcggguguacuccaccggcagcaauguguuucagaccagagccggcugucugaucggagccgagcacgugaacaauagcuacgagugcgacauccccaucggcgcuggcaucugugccagcuaccagacacagacaaacagccccagacgggcuagaagcguggccagccagagcaucauugccuacacaaugucucugggcgccgagaacagcguggccuacuccaacaacucuaucgcuauccccaccaacuucaccaucagcgugaccaccgagauccugccuguguccaugaccaagaccagcguggacugcaccauguacaucugcggcgauuccaccgagugcuccaaccugcugcugcaguacggcagcuucugcacccagcugaauagagcccugacagggaucgccguggaacaggacaagaacacccaagagguguucgcccaagugaagcaaaucuacaagaccccuccuaucaaggacuucggcggcuucaauuucagccagauucugcccgauccuagcaagcccagcaagcggagcuucaucgaggaccugcuguucaacaaagugacacuggccgacgccggcuucaucaagcaguauggcgauugucugggcgacauugccgccagggaucugauuugcgcccagaaguuuaacggacugacagugcugccuccucugcugaccgaugagaugaucgcccaguacacaucugcccugcuggccggcacaaucacaagcggcuggacauuuggagcuggcgccgcucugcagauccccuuugcuaugcagauggccuaccgguucaacggcaucggagugacccagaaugugcuguacgagaaccagaagcugaucgccaaccaguucaacagcgccaucggcaagauccaggacagccugagcagcacagcaagcgcccugggaaagcugcaggacguggucaaccagaaugcccaggcacugaacacccuggucaagcagcuguccuccaacuucggcgccaucagcucugugcugaacgauauccugagcagacuggacaaggucgaggccgaggugcagaucgacagacugaucacaggcagacugcagagccuccagacauacgugacccagcagcugaucagagccgccgagauuagagccucugccaaucuggccgccaccaagaugucugagugugugcugggccagagcaagagaguggacuuuugcggcaagggcuaccaccugaugagcuucccucagucugccccucacggcgugguguuucugcacgugacauaugugcccgcucaagagaagaauuucaccaccgcuccagccaucugccacgacggcaaagcccacuuuccuagagaaggcguguucguguccaacggcacccauugguucgugacacagcggaacuucuacgagccccagaucaucaccaccgacaacaccuucgugucuggcaacugcgacguugugaucggcauugugaacaauaccguguacgacccucugcagcccgagcuggacagcuucaaagaggaacuggacaaguacuuuaagaaccacacaagccccgacguggaccugggcgauaucagcggaaucaaugccagcgucgugaacauccagaaagagaucgaccggcugaacgagguggccaagaaucugaacgagagccugaucgaccugcaagaacuggggaaguacgagcaguacaucaaguggcccugguacaucuggcugggcuuuaucgccggacugauugccaucgugauggucacaaucaugcuguguugcaugaccagcugcuguagcugccugaagggcuguuguagcuguggcagcugcugcaaguucgacgaggacgauucugagcccgugcugaagggcgugaaacugcacuacaccugaggacuagucccuguucccagagcccacuuuuuuuucuuuuuuugaaauaaaauagccugucuuucagaucucaaaggcucuuuucagagccaccaaaaaaaaaaaaaaaaaaaaaaaaaaaaaaaaaaaaaaaaaaaaaaaaaaaaaaaaaaaaaaaaaaaaaaaaaaaaaaaaaaaaaaaaaaaaaaaaaaaaa

SEQ ID NO: 23704 - RNA, 4191 nt, Artificial Sequence
  SARS-CoV-2/Wuhan/WIV05/2019__EPI_ISL_402128 spike protein mRNA gc mod (1-1273)(N439K_D614G)
aggagagggcgcuuggcuugcaaggacccugagcugcggcauugaagcacacccaacccaacucgacugaagucagccucacugaaccggaucugagaaucuucucucucugggcuugccagggcucuccgaaccuagcuagcauccucuucaauuccaacuagaaagcuuaccauguucguguuucuggugcugcugccccugguguccagccagugugugaaccugaccaccagaacacagcugccuccagccuacaccaacagcuucaccagaggcguguacuaccccgacaagguguucagauccagcgugcugcacucuacccaggaccuguuccugccuuucuucagcaacgugaccugguuccacgccauccacguguccggcaccaauggcaccaagagauucgacaaccccgugcugcccuucaacgacgggguguacuuugccagcaccgagaaguccaacaucaucagaggcuggaucuucggcaccacacuggacagcaagacccagagccugcugaucgugaacaacgccaccaacguggucaucaaagugugcgaguuccaguucugcaacgaccccuuccugggcgucuacuaccacaagaacaacaagagcuggauggaaagcgaguuccggguguacagcagcgccaacaacugcaccuucgaguacgugucccagccuuuccugauggaccuggaaggcaagcagggcaacuucaagaaccugcgcgaguucguguucaagaacaucgacggcuacuucaaaaucuacagcaagcacaccccuaucaaccucgugcgggaucugccucagggcuucucugcucuggaaccccugguggaucugcccaucggcaucaacaucacccgguuucagacacugcuggcccugcacagaagcuaccugacaccuggcgauagcagcagcggauggacagcuggugccgccgcuuacuaugugggcuaccugcagccuagaaccuuccugcugaaguacaacgagaacggcaccaucaccgacgccguggauugugcucuggauccucugagcgagacaaagugcacccugaaguccuucaccguggaaaagggcaucuaccagaccagcaacuuccgggugcagcccaccgaauccaucgugcgguuccccaauaucaccaaucugugccccuucggcgagguguucaaugccaccagauucgccucuguguacgccuggaaccggaagcggaucagcaauugcguggccgacuacuccgugcuguacaacuccgccagcuucagcaccuucaagugcuacggcguguccccuaccaagcugaacgaccugugcuucacaaacguguacgccgacagcuucgugauccggggagaugaagugcggcagauugccccuggacagacaggcaagaucgccgacuacaacuacaagcugcccgacgacuucaccggcugugugauugccuggaacagcaagaaccuggacuccaaagucggcggcaacuacaauuaccuguaccggcuguuccggaaguccaaucugaagcccuucgagcgggacaucagcaccgaaaucuaucaggccggcagcaccccuugcaacggcguggaaggcuucaacugcuacuucccacugcaguccuacggcuuucagcccacaaauggcgugggcuaucagcccuacagagugguggugcugagcuucgaacugcugcaugcuccugccacagugugcggcccuaagaaaagcaccaaucucgugaagaacaaaugcgugaacuucaacuucaacggccugaccggcaccggcgugcugacagagagcaacaagaaguuccugccauuccagcaguuuggccgggauaucgccgauaccacagacgccguuagagauccccagacacuggaaauccuggacaucaccccaugcagcuucggcggagugucugugaucaccccuggcaccaacaccagcaaucagguggcagugcuguaccagggcgugaacuguaccgaagugcccguggccauucacgccgaucagcugacaccuacauggcggguguacuccaccggcagcaauguguuucagaccagagccggcugucugaucggagccgagcacgugaacaauagcuacgagugcgacauccccaucggcgcuggcaucugugccagcuaccagacacagacaaacagccccagacgggcuagaagcguggccagccagagcaucauugccuacacaaugucucugggcgccgagaacagcguggccuacuccaacaacucuaucgcuauccccaccaacuucaccaucagcgugaccaccgagauccugccuguguccaugaccaagaccagcguggacugcaccauguacaucugcggcgauuccaccgagugcuccaaccugcugcugcaguacggcagcuucugcacccagcugaauagagcccugacagggaucgccguggaacaggacaagaacacccaagagguguucgcccaagugaagcaaaucuacaagaccccuccuaucaaggacuucggcggcuucaauuucagccagauucugcccgauccuagcaagcccagcaagcggagcuucaucgaggaccugcuguucaacaaagugacacuggccgacgccggcuucaucaagcaguauggcgauugucugggcgacauugccgccagggaucugauuugcgcccagaaguuuaacggacugacagugcugccuccucugcugaccgaugagaugaucgcccaguacacaucugcccugcuggccggcacaaucacaagcggcuggacauuuggagcuggcgccgcucugcagauccccuuugcuaugcagauggccuaccgguucaacggcaucggagugacccagaaugugcuguacgagaaccagaagcugaucgccaaccaguucaacagcgccaucggcaagauccaggacagccugagcagcacagcaagcgcccugggaaagcugcaggacguggucaaccagaaugcccaggcacugaacacccuggucaagcagcuguccuccaacuucggcgccaucagcucugugcugaacgauauccugagcagacuggacaaggucgaggccgaggugcagaucgacagacugaucacaggcagacugcagagccuccagacauacgugacccagcagcugaucagagccgccgagauuagagccucugccaaucuggccgccaccaagaugucugagugugugcugggccagagcaagagaguggacuuuugcggcaagggcuaccaccugaugagcuucccucagucugccccucacggcgugguguuucugcacgugacauaugugcccgcucaagagaagaauuucaccaccgcuccagccaucugccacgacggcaaagcccacuuuccuagagaaggcguguucguguccaacggcacccauugguucgugacacagcggaacuucuacgagccccagaucaucaccaccgacaacaccuucgugucuggcaacugcgacguugugaucggcauugugaacaauaccguguacgacccucugcagcccgagcuggacagcuucaaagaggaacuggacaaguacuuuaagaaccacacaagccccgacguggaccugggcgauaucagcggaaucaaugccagcgucgugaacauccagaaagagaucgaccggcugaacgagguggccaagaaucugaacgagagccugaucgaccugcaagaacuggggaaguacgagcaguacaucaaguggcccugguacaucuggcugggcuuuaucgccggacugauugccaucgugauggucacaaucaugcuguguugcaugaccagcugcuguagcugccugaagggcuguuguagcuguggcagcugcugcaaguucgacgaggacgauucugagcccgugcugaagggcgugaaacugcacuacaccugaggacuagucccuguucccagagcccacuuuuuuuucuuuuuuugaaauaaaauagccugucuuucagaucucaaaggcucuuuucagagccaccaaaaaaaaaaaaaaaaaaaaaaaaaaaaaaaaaaaaaaaaaaaaaaaaaaaaaaaaaaaaaaaaaaaaaaaaaaaaaaaaaaaaaaaaaaaaaaaaaaaaa

SEQ ID NO: 23705 - RNA, 4191 nt, Artificial Sequence
  SARS-CoV-2/Wuhan/WIV05/2019__EPI_ISL_402128 spike protein mRNA gc mod (1-1273)(S477N_D614G)
aggagagggcgcuuggcuugcaaggacccugagcugcggcauugaagcacacccaacccaacucgacugaagucagccucacugaaccggaucugagaaucuucucucucugggcuugccagggcucuccgaaccuagcuagcauccucuucaauuccaacuagaaagcuuaccauguucguguuucuggugcugcugccccugguguccagccagugugugaaccugaccaccagaacacagcugccuccagccuacaccaacagcuucaccagaggcguguacuaccccgacaagguguucagauccagcgugcugcacucuacccaggaccuguuccugccuuucuucagcaacgugaccugguuccacgccauccacguguccggcaccaauggcaccaagagauucgacaaccccgugcugcccuucaacgacgggguguacuuugccagcaccgagaaguccaacaucaucagaggcuggaucuucggcaccacacuggacagcaagacccagagccugcugaucgugaacaacgccaccaacguggucaucaaagugugcgaguuccaguucugcaacgaccccuuccugggcgucuacuaccacaagaacaacaagagcuggauggaaagcgaguuccggguguacagcagcgccaacaacugcaccuucgaguacgugucccagccuuuccugauggaccuggaaggcaagcagggcaacuucaagaaccugcgcgaguucguguucaagaacaucgacggcuacuucaaaaucuacagcaagcacaccccuaucaaccucgugcgggaucugccucagggcuucucugcucuggaaccccugguggaucugcccaucggcaucaacaucacccgguuucagacacugcuggcccugcacagaagcuaccugacaccuggcgauagcagcagcggauggacagcuggugccgccgcuuacuaugugggcuaccugcagccuagaaccuuccugcugaaguacaacgagaacggcaccaucaccgacgccguggauugugcucuggauccucugagcgagacaaagugcacccugaaguccuucaccguggaaaagggcaucuaccagaccagcaacuuccgggugcagcccaccgaauccaucgugcgguuccccaauaucaccaaucugugccccuucggcgagguguucaaugccaccagauucgccucuguguacgccuggaaccggaagcggaucagcaauugcguggccgacuacuccgugcuguacaacuccgccagcuucagcaccuucaagugcuacggcguguccccuaccaagcugaacgaccugugcuucacaaacguguacgccgacagcuucgugauccggggagaugaagugcggcagauugccccuggacagacaggcaagaucgccgacuacaacuacaagcugcccgacgacuucaccggcugugugauugccuggaacagcaacaaccuggacuccaaagucggcggcaacuacaauuaccuguaccggcuguuccggaaguccaaucugaagcccuucgagcgggacaucagcaccgaaaucuaucaggccggcaacaccccuugcaacggcguggaaggcuucaacugcuacuucccacugcaguccuacggcuuucagcccacaaauggcgugggcuaucagcccuacagagugguggugcugagcuucgaacugcugcaugcuccugccacagugugcggcccuaagaaaagcaccaaucucgugaagaacaaaugcgugaacuucaacuucaacggccugaccggcaccggcgugcugacagagagcaacaagaaguuccugccauuccagcaguuuggccgggauaucgccgauaccacagacgccguuagagauccccagacacuggaaauccuggacaucaccccaugcagcuucggcggagugucugugaucaccccuggcaccaacaccagcaaucagguggcagugcuguaccagggcgugaacuguaccgaagugcccguggccauucacgccgaucagcugacaccuacauggcggguguacuccaccggcagcaauguguuucagaccagagccggcugucugaucggagccgagcacgugaacaauagcuacgagugcgacauccccaucggcgcuggcaucugugccagcuaccagacacagacaaacagccccagacgggcuagaagcguggccagccagagcaucauugccuacacaaugucucugggcgccgagaacagcguggccuacuccaacaacucuaucgcuauccccaccaacuucaccaucagcgugaccaccgagauccugccuguguccaugaccaagaccagcguggacugcaccauguacaucugcggcgauuccaccgagugcuccaaccugcugcugcaguacggcagcuucugcacccagcugaauagagcccugacagggaucgccguggaacaggacaagaacacccaagagguguucgcccaagugaagcaaaucuacaagaccccuccuaucaaggacuucggcggcuucaauuucagccagauucugcccgauccuagcaagcccagcaagcggagcuucaucgaggaccugcuguucaacaaagugacacuggccgacgccggcuucaucaagcaguauggcgauugucugggcgacauugccgccagggaucugauuugcgcccagaaguuuaacggacugacagugcugccuccucugcugaccgaugagaugaucgcccaguacacaucugcccugcuggccggcacaaucacaagcggcuggacauuuggagcuggcgccgcucugcagauccccuuugcuaugcagauggccuaccgguucaacggcaucggagugacccagaaugugcuguacgagaaccagaagcugaucgccaaccaguucaacagcgccaucggcaagauccaggacagccugagcagcacagcaagcgcccugggaaagcugcaggacguggucaaccagaaugcccaggcacugaacacccuggucaagcagcuguccuccaacuucggcgccaucagcucugugcugaacgauauccugagcagacuggacaaggucgaggccgaggugcagaucgacagacugaucacaggcagacugcagagccuccagacauacgugacccagcagcugaucagagccgccgagauuagagccucugccaaucuggccgccaccaagaugucugagugugugcugggccagagcaagagaguggacuuuugcggcaagggcuaccaccugaugagcuucccucagucugccccucacggcgugguguuucugcacgugacauaugugcccgcucaagagaagaauuucaccaccgcuccagccaucugccacgacggcaaagcccacuuuccuagagaaggcguguucguguccaacggcacccauugguucgugacacagcggaacuucuacgagccccagaucaucaccaccgacaacaccuucgugucuggcaacugcgacguugugaucggcauugugaacaauaccguguacgacccucugcagcccgagcuggacagcuucaaagaggaacuggacaaguacuuuaagaaccacacaagccccgacguggaccugggcgauaucagcggaaucaaugccagcgucgugaacauccagaaagagaucgaccggcugaacgagguggccaagaaucugaacgagagccugaucgaccugcaagaacuggggaaguacgagcaguacaucaaguggcccugguacaucuggcugggcuuuaucgccggacugauugccaucgugauggucacaaucaugcuguguugcaugaccagcugcuguagcugccugaagggcuguuguagcuguggcagcugcugcaaguucgacgaggacgauucugagcccgugcugaagggcgugaaacugcacuacaccugaggacuagucccuguucccagagcccacuuuuuuuucuuuuuuugaaauaaaauagccugucuuucagaucucaaaggcucuuuucagagccaccaaaaaaaaaaaaaaaaaaaaaaaaaaaaaaaaaaaaaaaaaaaaaaaaaaaaaaaaaaaaaaaaaaaaaaaaaaaaaaaaaaaaaaaaaaaaaaaaaaaaa

SEQ ID NO: 23706 - RNA, 4191 nt, Artificial Sequence
  SARS-CoV-2/Wuhan/WIV05/2019__EPI_ISL_402128 spike protein mRNA gc mod (1-1273)(N501Y_D614G)
aggagagggcgcuuggcuugcaaggacccugagcugcggcauugaagcacacccaacccaacucgacugaagucagccucacugaaccggaucugagaaucuucucucucugggcuugccagggcucuccgaaccuagcuagcauccucuucaauuccaacuagaaagcuuaccauguucguguuucuggugcugcugccccugguguccagccagugugugaaccugaccaccagaacacagcugccuccagccuacaccaacagcuucaccagaggcguguacuaccccgacaagguguucagauccagcgugcugcacucuacccaggaccuguuccugccuuucuucagcaacgugaccugguuccacgccauccacguguccggcaccaauggcaccaagagauucgacaaccccgugcugcccuucaacgacgggguguacuuugccagcaccgagaaguccaacaucaucagaggcuggaucuucggcaccacacuggacagcaagacccagagccugcugaucgugaacaacgccaccaacguggucaucaaagugugcgaguuccaguucugcaacgaccccuuccugggcgucuacuaccacaagaacaacaagagcuggauggaaagcgaguuccggguguacagcagcgccaacaacugcaccuucgaguacgugucccagccuuuccugauggaccuggaaggcaagcagggcaacuucaagaaccugcgcgaguucguguucaagaacaucgacggcuacuucaaaaucuacagcaagcacaccccuaucaaccucgugcgggaucugccucagggcuucucugcucuggaaccccugguggaucugcccaucggcaucaacaucacccgguuucagacacugcuggcccugcacagaagcuaccugacaccuggcgauagcagcagcggauggacagcuggugccgccgcuuacuaugugggcuaccugcagccuagaaccuuccugcugaaguacaacgagaacggcaccaucaccgacgccguggauugugcucuggauccucugagcgagacaaagugcacccugaaguccuucaccguggaaaagggcaucuaccagaccagcaacuuccgggugcagcccaccgaauccaucgugcgguuccccaauaucaccaaucugugccccuucggcgagguguucaaugccaccagauucgccucuguguacgccuggaaccggaagcggaucagcaauugcguggccgacuacuccgugcuguacaacuccgccagcuucagcaccuucaagugcuacggcguguccccuaccaagcugaacgaccugugcuucacaaacguguacgccgacagcuucgugauccggggagaugaagugcggcagauugccccuggacagacaggcaagaucgccgacuacaacuacaagcugcccgacgacuucaccggcugugugauugccuggaacagcaacaaccuggacuccaaagucggcggcaacuacaauuaccuguaccggcuguuccggaaguccaaucugaagcccuucgagcgggacaucagcaccgaaaucuaucaggccggcagcaccccuugcaacggcguggaaggcuucaacugcuacuucccacugcaguccuacggcuuucagcccacauacggcgugggcuaucagcccuacagagugguggugcugagcuucgaacugcugcaugcuccugccacagugugcggcccuaagaaaagcaccaaucucgugaagaacaaaugcgugaacuucaacuucaacggccugaccggcaccggcgugcugacagagagcaacaagaaguuccugccauuccagcaguuuggccgggauaucgccgauaccacagacgccguuagagauccccagacacuggaaauccuggacaucaccccaugcagcuucggcggagugucugugaucaccccuggcaccaacaccagcaaucagguggcagugcuguaccagggcgugaacuguaccgaagugcccguggccauucacgccgaucagcugacaccuacauggcggguguacuccaccggcagcaauguguuucagaccagagccggcugucugaucggagccgagcacgugaacaauagcuacgagugcgacauccccaucggcgcuggcaucugugccagcuaccagacacagacaaacagccccagacgggcuagaagcguggccagccagagcaucauugccuacacaaugucucugggcgccgagaacagcguggccuacuccaacaacucuaucgcuauccccaccaacuucaccaucagcgugaccaccgagauccugccuguguccaugaccaagaccagcguggacugcaccauguacaucugcggcgauuccaccgagugcuccaaccugcugcugcaguacggcagcuucugcacccagcugaauagagcccugacagggaucgccguggaacaggacaagaacacccaagagguguucgcccaagugaagcaaaucuacaagaccccuccuaucaaggacuucggcggcuucaauuucagccagauucugcccgauccuagcaagcccagcaagcggagcuucaucgaggaccugcuguucaacaaagugacacuggccgacgccggcuucaucaagcaguauggcgauugucugggcgacauugccgccagggaucugauuugcgcccagaaguuuaacggacugacagugcugccuccucugcugaccgaugagaugaucgcccaguacacaucugcccugcuggccggcacaaucacaagcggcuggacauuuggagcuggcgccgcucugcagauccccuuugcuaugcagauggccuaccgguucaacggcaucggagugacccagaaugugcuguacgagaaccagaagcugaucgccaaccaguucaacagcgccaucggcaagauccaggacagccugagcagcacagcaagcgcccugggaaagcugcaggacguggucaaccagaaugcccaggcacugaacacccuggucaagcagcuguccuccaacuucggcgccaucagcucugugcugaacgauauccugagcagacuggacaaggucgaggccgaggugcagaucgacagacugaucacaggcagacugcagagccuccagacauacgugacccagcagcugaucagagccgccgagauuagagccucugccaaucuggccgccaccaagaugucugagugugugcugggccagagcaagagaguggacuuuugcggcaagggcuaccaccugaugagcuucccucagucugccccucacggcgugguguuucugcacgugacauaugugcccgcucaagagaagaauuucaccaccgcuccagccaucugccacgacggcaaagcccacuuuccuagagaaggcguguucguguccaacggcacccauugguucgugacacagcggaacuucuacgagccccagaucaucaccaccgacaacaccuucgugucuggcaacugcgacguugugaucggcauugugaacaauaccguguacgacccucugcagcccgagcuggacagcuucaaagaggaacuggacaaguacuuuaagaaccacacaagccccgacguggaccugggcgauaucagcggaaucaaugccagcgucgugaacauccagaaagagaucgaccggcugaacgagguggccaagaaucugaacgagagccugaucgaccugcaagaacuggggaaguacgagcaguacaucaaguggcccugguacaucuggcugggcuuuaucgccggacugauugccaucgugauggucacaaucaugcuguguugcaugaccagcugcuguagcugccugaagggcuguuguagcuguggcagcugcugcaaguucgacgaggacgauucugagcccgugcugaagggcgugaaacugcacuacaccugaggacuagucccuguucccagagcccacuuuuuuuucuuuuuuugaaauaaaauagccugucuuucagaucucaaaggcucuuuucagagccaccaaaaaaaaaaaaaaaaaaaaaaaaaaaaaaaaaaaaaaaaaaaaaaaaaaaaaaaaaaaaaaaaaaaaaaaaaaaaaaaaaaaaaaaaaaaaaaaaaaaaa

SEQ ID NO: 23707 - RNA, 4185 nt, Artificial Sequence
  SARS-CoV-2/Wuhan/WIV05/2019__EPI_ISL_402128 spike protein mRNA gc mod (1-1273)(H69del_V70del_D614G)
aggagagggcgcuuggcuugcaaggacccugagcugcggcauugaagcacacccaacccaacucgacugaagucagccucacugaaccggaucugagaaucuucucucucugggcuugccagggcucuccgaaccuagcuagcauccucuucaauuccaacuagaaagcuuaccauguucguguuucuggugcugcugccccugguguccagccagugugugaaccugaccaccagaacacagcugccuccagccuacaccaacagcuucaccagaggcguguacuaccccgacaagguguucagauccagcgugcugcacucuacccaggaccuguuccugccuuucuucagcaacgugaccugguuccacgccaucuccggcaccaauggcaccaagagauucgacaaccccgugcugcccuucaacgacgggguguacuuugccagcaccgagaaguccaacaucaucagaggcuggaucuucggcaccacacuggacagcaagacccagagccugcugaucgugaacaacgccaccaacguggucaucaaagugugcgaguuccaguucugcaacgaccccuuccugggcgucuacuaccacaagaacaacaagagcuggauggaaagcgaguuccggguguacagcagcgccaacaacugcaccuucgaguacgugucccagccuuuccugauggaccuggaaggcaagcagggcaacuucaagaaccugcgcgaguucguguucaagaacaucgacggcuacuucaaaaucuacagcaagcacaccccuaucaaccucgugcgggaucugccucagggcuucucugcucuggaaccccugguggaucugcccaucggcaucaacaucacccgguuucagacacugcuggcccugcacagaagcuaccugacaccuggcgauagcagcagcggauggacagcuggugccgccgcuuacuaugugggcuaccugcagccuagaaccuuccugcugaaguacaacgagaacggcaccaucaccgacgccguggauugugcucuggauccucugagcgagacaaagugcacccugaaguccuucaccguggaaaagggcaucuaccagaccagcaacuuccgggugcagcccaccgaauccaucgugcgguuccccaauaucaccaaucugugccccuucggcgagguguucaaugccaccagauucgccucuguguacgccuggaaccggaagcggaucagcaauugcguggccgacuacuccgugcuguacaacuccgccagcuucagcaccuucaagugcuacggcguguccccuaccaagcugaacgaccugugcuucacaaacguguacgccgacagcuucgugauccggggagaugaagugcggcagauugccccuggacagacaggcaagaucgccgacuacaacuacaagcugcccgacgacuucaccggcugugugauugccuggaacagcaacaaccuggacuccaaagucggcggcaacuacaauuaccuguaccggcuguuccggaaguccaaucugaagcccuucgagcgggacaucagcaccgaaaucuaucaggccggcagcaccccuugcaacggcguggaaggcuucaacugcuacuucccacugcaguccuacggcuuucagcccacaaauggcgugggcuaucagcccuacagagugguggugcugagcuucgaacugcugcaugcuccugccacagugugcggcccuaagaaaagcaccaaucucgugaagaacaaaugcgugaacuucaacuucaacggccugaccggcaccggcgugcugacagagagcaacaagaaguuccugccauuccagcaguuuggccgggauaucgccgauaccacagacgccguuagagauccccagacacuggaaauccuggacaucaccccaugcagcuucggcggagugucugugaucaccccuggcaccaacaccagcaaucagguggcagugcuguaccagggcgugaacuguaccgaagugcccguggccauucacgccgaucagcugacaccuacauggcggguguacuccaccggcagcaauguguuucagaccagagccggcugucugaucggagccgagcacgugaacaauagcuacgagugcgacauccccaucggcgcuggcaucugugccagcuaccagacacagacaaacagccccagacgggcuagaagcguggccagccagagcaucauugccuacacaaugucucugggcgccgagaacagcguggccuacuccaacaacucuaucgcuauccccaccaacuucaccaucagcgugaccaccgagauccugccuguguccaugaccaagaccagcguggacugcaccauguacaucugcggcgauuccaccgagugcuccaaccugcugcugcaguacggcagcuucugcacccagcugaauagagcccugacagggaucgccguggaacaggacaagaacacccaagagguguucgcccaagugaagcaaaucuacaagaccccuccuaucaaggacuucggcggcuucaauuucagccagauucugcccgauccuagcaagcccagcaagcggagcuucaucgaggaccugcuguucaacaaagugacacuggccgacgccggcuucaucaagcaguauggcgauugucugggcgacauugccgccagggaucugauuugcgcccagaaguuuaacggacugacagugcugccuccucugcugaccgaugagaugaucgcccaguacacaucugcccugcuggccggcacaaucacaagcggcuggacauuuggagcuggcgccgcucugcagauccccuuugcuaugcagauggccuaccgguucaacggcaucggagugacccagaaugugcuguacgagaaccagaagcugaucgccaaccaguucaacagcgccaucggcaagauccaggacagccugagcagcacagcaagcgcccugggaaagcugcaggacguggucaaccagaaugcccaggcacugaacacccuggucaagcagcuguccuccaacuucggcgccaucagcucugugcugaacgauauccugagcagacuggacaaggucgaggccgaggugcagaucgacagacugaucacaggcagacugcagagccuccagacauacgugacccagcagcugaucagagccgccgagauuagagccucugccaaucuggccgccaccaagaugucugagugugugcugggccagagcaagagaguggacuuuugcggcaagggcuaccaccugaugagcuucccucagucugccccucacggcgugguguuucugcacgugacauaugugcccgcucaagagaagaauuucaccaccgcuccagccaucugccacgacggcaaagcccacuuuccuagagaaggcguguucguguccaacggcacccauugguucgugacacagcggaacuucuacgagccccagaucaucaccaccgacaacaccuucgugucuggcaacugcgacguugugaucggcauugugaacaauaccguguacgacccucugcagcccgagcuggacagcuucaaagaggaacuggacaaguacuuuaagaaccacacaagccccgacguggaccugggcgauaucagcggaaucaaugccagcgucgugaacauccagaaagagaucgaccggcugaacgagguggccaagaaucugaacgagagccugaucgaccugcaagaacuggggaaguacgagcaguacaucaaguggcccugguacaucuggcugggcuuuaucgccggacugauugccaucgugauggucacaaucaugcuguguugcaugaccagcugcuguagcugccugaagggcuguuguagcuguggcagcugcugcaaguucgacgaggacgauucugagcccgugcugaagggcgugaaacugcacuacaccugaggacuagucccuguucccagagcccacuuuuuuuucuuuuuuugaaauaaaauagccugucuuucagaucucaaaggcucuuuucagagccaccaaaaaaaaaaaaaaaaaaaaaaaaaaaaaaaaaaaaaaaaaaaaaaaaaaaaaaaaaaaaaaaaaaaaaaaaaaaaaaaaaaaaaaaaaaaaaaaaaaaaa

SEQ ID NO: 23708 - RNA, 4191 nt, Artificial Sequence
  SARS-CoV-2/Wuhan/WIV05/2019__EPI_ISL_402128 spike protein mRNA gc mod (1-1273)(Y453F_D614G)
aggagagggcgcuuggcuugcaaggacccugagcugcggcauugaagcacacccaacccaacucgacugaagucagccucacugaaccggaucugagaaucuucucucucugggcuugccagggcucuccgaaccuagcuagcauccucuucaauuccaacuagaaagcuuaccauguucguguuucuggugcugcugccccugguguccagccagugugugaaccugaccaccagaacacagcugccuccagccuacaccaacagcuucaccagaggcguguacuaccccgacaagguguucagauccagcgugcugcacucuacccaggaccuguuccugccuuucuucagcaacgugaccugguuccacgccauccacguguccggcaccaauggcaccaagagauucgacaaccccgugcugcccuucaacgacgggguguacuuugccagcaccgagaaguccaacaucaucagaggcuggaucuucggcaccacacuggacagcaagacccagagccugcugaucgugaacaacgccaccaacguggucaucaaagugugcgaguuccaguucugcaacgaccccuuccugggcgucuacuaccacaagaacaacaagagcuggauggaaagcgaguuccggguguacagcagcgccaacaacugcaccuucgaguacgugucccagccuuuccugauggaccuggaaggcaagcagggcaacuucaagaaccugcgcgaguucguguucaagaacaucgacggcuacuucaaaaucuacagcaagcacaccccuaucaaccucgugcgggaucugccucagggcuucucugcucuggaaccccugguggaucugcccaucggcaucaacaucacccgguuucagacacugcuggcccugcacagaagcuaccugacaccuggcgauagcagcagcggauggacagcuggugccgccgcuuacuaugugggcuaccugcagccuagaaccuuccugcugaaguacaacgagaacggcaccaucaccgacgccguggauugugcucuggauccucugagcgagacaaagugcacccugaaguccuucaccguggaaaagggcaucuaccagaccagcaacuuccgggugcagcccaccgaauccaucgugcgguuccccaauaucaccaaucugugccccuucggcgagguguucaaugccaccagauucgccucuguguacgccuggaaccggaagcggaucagcaauugcguggccgacuacuccgugcuguacaacuccgccagcuucagcaccuucaagugcuacggcguguccccuaccaagcugaacgaccugugcuucacaaacguguacgccgacagcuucgugauccggggagaugaagugcggcagauugccccuggacagacaggcaagaucgccgacuacaacuacaagcugcccgacgacuucaccggcugugugauugccuggaacagcaacaaccuggacuccaaagucggcggcaacuacaauuaccuguuccggcuguuccggaaguccaaucugaagcccuucgagcgggacaucagcaccgaaaucuaucaggccggcagcaccccuugcaacggcguggaaggcuucaacugcuacuucccacugcaguccuacggcuuucagcccacaaauggcgugggcuaucagcccuacagagugguggugcugagcuucgaacugcugcaugcuccugccacagugugcggcccuaagaaaagcaccaaucucgugaagaacaaaugcgugaacuucaacuucaacggccugaccggcaccggcgugcugacagagagcaacaagaaguuccugccauuccagcaguuuggccgggauaucgccgauaccacagacgccguuagagauccccagacacuggaaauccuggacaucaccccaugcagcuucggcggagugucugugaucaccccuggcaccaacaccagcaaucagguggcagugcuguaccagggcgugaacuguaccgaagugcccguggccauucacgccgaucagcugacaccuacauggcggguguacuccaccggcagcaauguguuucagaccagagccggcugucugaucggagccgagcacgugaacaauagcuacgagugcgacauccccaucggcgcuggcaucugugccagcuaccagacacagacaaacagccccagacgggcuagaagcguggccagccagagcaucauugccuacacaaugucucugggcgccgagaacagcguggccuacuccaacaacucuaucgcuauccccaccaacuucaccaucagcgugaccaccgagauccugccuguguccaugaccaagaccagcguggacugcaccauguacaucugcggcgauuccaccgagugcuccaaccugcugcugcaguacggcagcuucugcacccagcugaauagagcccugacagggaucgccguggaacaggacaagaacacccaagagguguucgcccaagugaagcaaaucuacaagaccccuccuaucaaggacuucggcggcuucaauuucagccagauucugcccgauccuagcaagcccagcaagcggagcuucaucgaggaccugcuguucaacaaagugacacuggccgacgccggcuucaucaagcaguauggcgauugucugggcgacauugccgccagggaucugauuugcgcccagaaguuuaacggacugacagugcugccuccucugcugaccgaugagaugaucgcccaguacacaucugcccugcuggccggcacaaucacaagcggcuggacauuuggagcuggcgccgcucugcagauccccuuugcuaugcagauggccuaccgguucaacggcaucggagugacccagaaugugcuguacgagaaccagaagcugaucgccaaccaguucaacagcgccaucggcaagauccaggacagccugagcagcacagcaagcgcccugggaaagcugcaggacguggucaaccagaaugcccaggcacugaacacccuggucaagcagcuguccuccaacuucggcgccaucagcucugugcugaacgauauccugagcagacuggacaaggucgaggccgaggugcagaucgacagacugaucacaggcagacugcagagccuccagacauacgugacccagcagcugaucagagccgccgagauuagagccucugccaaucuggccgccaccaagaugucugagugugugcugggccagagcaagagaguggacuuuugcggcaagggcuaccaccugaugagcuucccucagucugccccucacggcgugguguuucugcacgugacauaugugcccgcucaagagaagaauuucaccaccgcuccagccaucugccacgacggcaaagcccacuuuccuagagaaggcguguucguguccaacggcacccauugguucgugacacagcggaacuucuacgagccccagaucaucaccaccgacaacaccuucgugucuggcaacugcgacguugugaucggcauugugaacaauaccguguacgacccucugcagcccgagcuggacagcuucaaagaggaacuggacaaguacuuuaagaaccacacaagccccgacguggaccugggcgauaucagcggaaucaaugccagcgucgugaacauccagaaagagaucgaccggcugaacgagguggccaagaaucugaacgagagccugaucgaccugcaagaacuggggaaguacgagcaguacaucaaguggcccugguacaucuggcugggcuuuaucgccggacugauugccaucgugauggucacaaucaugcuguguugcaugaccagcugcuguagcugccugaagggcuguuguagcuguggcagcugcugcaaguucgacgaggacgauucugagcccgugcugaagggcgugaaacugcacuacaccugaggacuagucccuguucccagagcccacuuuuuuuucuuuuuuugaaauaaaauagccugucuuucagaucucaaaggcucuuuucagagccaccaaaaaaaaaaaaaaaaaaaaaaaaaaaaaaaaaaaaaaaaaaaaaaaaaaaaaaaaaaaaaaaaaaaaaaaaaaaaaaaaaaaaaaaaaaaaaaaaaaaaa

SEQ ID NO: 23709 - RNA, 4191 nt, Artificial Sequence
  SARS-CoV-2/Wuhan/WIV05/2019__EPI_ISL_402128 spike protein mRNA gc mod (1-1273)(D614G_I692V)
aggagagggcgcuuggcuugcaaggacccugagcugcggcauugaagcacacccaacccaacucgacugaagucagccucacugaaccggaucugagaaucuucucucucugggcuugccagggcucuccgaaccuagcuagcauccucuucaauuccaacuagaaagcuuaccauguucguguuucuggugcugcugccccugguguccagccagugugugaaccugaccaccagaacacagcugccuccagccuacaccaacagcuucaccagaggcguguacuaccccgacaagguguucagauccagcgugcugcacucuacccaggaccuguuccugccuuucuucagcaacgugaccugguuccacgccauccacguguccggcaccaauggcaccaagagauucgacaaccccgugcugcccuucaacgacgggguguacuuugccagcaccgagaaguccaacaucaucagaggcuggaucuucggcaccacacuggacagcaagacccagagccugcugaucgugaacaacgccaccaacguggucaucaaagugugcgaguuccaguucugcaacgaccccuuccugggcgucuacuaccacaagaacaacaagagcuggauggaaagcgaguuccggguguacagcagcgccaacaacugcaccuucgaguacgugucccagccuuuccugauggaccuggaaggcaagcagggcaacuucaagaaccugcgcgaguucguguucaagaacaucgacggcuacuucaaaaucuacagcaagcacaccccuaucaaccucgugcgggaucugccucagggcuucucugcucuggaaccccugguggaucugcccaucggcaucaacaucacccgguuucagacacugcuggcccugcacagaagcuaccugacaccuggcgauagcagcagcggauggacagcuggugccgccgcuuacuaugugggcuaccugcagccuagaaccuuccugcugaaguacaacgagaacggcaccaucaccgacgccguggauugugcucuggauccucugagcgagacaaagugcacccugaaguccuucaccguggaaaagggcaucuaccagaccagcaacuuccgggugcagcccaccgaauccaucgugcgguuccccaauaucaccaaucugugccccuucggcgagguguucaaugccaccagauucgccucuguguacgccuggaaccggaagcggaucagcaauugcguggccgacuacuccgugcuguacaacuccgccagcuucagcaccuucaagugcuacggcguguccccuaccaagcugaacgaccugugcuucacaaacguguacgccgacagcuucgugauccggggagaugaagugcggcagauugccccuggacagacaggcaagaucgccgacuacaacuacaagcugcccgacgacuucaccggcugugugauugccuggaacagcaacaaccuggacuccaaagucggcggcaacuacaauuaccuguaccggcuguuccggaaguccaaucugaagcccuucgagcgggacaucagcaccgaaaucuaucaggccggcagcaccccuugcaacggcguggaaggcuucaacugcuacuucccacugcaguccuacggcuuucagcccacaaauggcgugggcuaucagcccuacagagugguggugcugagcuucgaacugcugcaugcuccugccacagugugcggcccuaagaaaagcaccaaucucgugaagaacaaaugcgugaacuucaacuucaacggccugaccggcaccggcgugcugacagagagcaacaagaaguuccugccauuccagcaguuuggccgggauaucgccgauaccacagacgccguuagagauccccagacacuggaaauccuggacaucaccccaugcagcuucggcggagugucugugaucaccccuggcaccaacaccagcaaucagguggcagugcuguaccagggcgugaacuguaccgaagugcccguggccauucacgccgaucagcugacaccuacauggcggguguacuccaccggcagcaauguguuucagaccagagccggcugucugaucggagccgagcacgugaacaauagcuacgagugcgacauccccaucggcgcuggcaucugugccagcuaccagacacagacaaacagccccagacgggcuagaagcguggccagccagagcgugauugccuacacaaugucucugggcgccgagaacagcguggccuacuccaacaacucuaucgcuauccccaccaacuucaccaucagcgugaccaccgagauccugccuguguccaugaccaagaccagcguggacugcaccauguacaucugcggcgauuccaccgagugcuccaaccugcugcugcaguacggcagcuucugcacccagcugaauagagcccugacagggaucgccguggaacaggacaagaacacccaagagguguucgcccaagugaagcaaaucuacaagaccccuccuaucaaggacuucggcggcuucaauuucagccagauucugcccgauccuagcaagcccagcaagcggagcuucaucgaggaccugcuguucaacaaagugacacuggccgacgccggcuucaucaagcaguauggcgauugucugggcgacauugccgccagggaucugauuugcgcccagaaguuuaacggacugacagugcugccuccucugcugaccgaugagaugaucgcccaguacacaucugcccugcuggccggcacaaucacaagcggcuggacauuuggagcuggcgccgcucugcagauccccuuugcuaugcagauggccuaccgguucaacggcaucggagugacccagaaugugcuguacgagaaccagaagcugaucgccaaccaguucaacagcgccaucggcaagauccaggacagccugagcagcacagcaagcgcccugggaaagcugcaggacguggucaaccagaaugcccaggcacugaacacccuggucaagcagcuguccuccaacuucggcgccaucagcucugugcugaacgauauccugagcagacuggacaaggucgaggccgaggugcagaucgacagacugaucacaggcagacugcagagccuccagacauacgugacccagcagcugaucagagccgccgagauuagagccucugccaaucuggccgccaccaagaugucugagugugugcugggccagagcaagagaguggacuuuugcggcaagggcuaccaccugaugagcuucccucagucugccccucacggcgugguguuucugcacgugacauaugugcccgcucaagagaagaauuucaccaccgcuccagccaucugccacgacggcaaagcccacuuuccuagagaaggcguguucguguccaacggcacccauugguucgugacacagcggaacuucuacgagccccagaucaucaccaccgacaacaccuucgugucuggcaacugcgacguugugaucggcauugugaacaauaccguguacgacccucugcagcccgagcuggacagcuucaaagaggaacuggacaaguacuuuaagaaccacacaagccccgacguggaccugggcgauaucagcggaaucaaugccagcgucgugaacauccagaaagagaucgaccggcugaacgagguggccaagaaucugaacgagagccugaucgaccugcaagaacuggggaaguacgagcaguacaucaaguggcccugguacaucuggcugggcuuuaucgccggacugauugccaucgugauggucacaaucaugcuguguugcaugaccagcugcuguagcugccugaagggcuguuguagcuguggcagcugcugcaaguucgacgaggacgauucugagcccgugcugaagggcgugaaacugcacuacaccugaggacuagucccuguucccagagcccacuuuuuuuucuuuuuuugaaauaaaauagccugucuuucagaucucaaaggcucuuuucagagccaccaaaaaaaaaaaaaaaaaaaaaaaaaaaaaaaaaaaaaaaaaaaaaaaaaaaaaaaaaaaaaaaaaaaaaaaaaaaaaaaaaaaaaaaaaaaaaaaaaaaaa

SEQ ID NO: 23710 - RNA, 4191 nt, Artificial Sequence
  SARS-CoV-2/Wuhan/WIV05/2019__EPI_ISL_402128 spike protein mRNA gc mod (1-1273)(D614G_M1229I)
aggagagggcgcuuggcuugcaaggacccugagcugcggcauugaagcacacccaacccaacucgacugaagucagccucacugaaccggaucugagaaucuucucucucugggcuugccagggcucuccgaaccuagcuagcauccucuucaauuccaacuagaaagcuuaccauguucguguuucuggugcugcugccccugguguccagccagugugugaaccugaccaccagaacacagcugccuccagccuacaccaacagcuucaccagaggcguguacuaccccgacaagguguucagauccagcgugcugcacucuacccaggaccuguuccugccuuucuucagcaacgugaccugguuccacgccauccacguguccggcaccaauggcaccaagagauucgacaaccccgugcugcccuucaacgacgggguguacuuugccagcaccgagaaguccaacaucaucagaggcuggaucuucggcaccacacuggacagcaagacccagagccugcugaucgugaacaacgccaccaacguggucaucaaagugugcgaguuccaguucugcaacgaccccuuccugggcgucuacuaccacaagaacaacaagagcuggauggaaagcgaguuccggguguacagcagcgccaacaacugcaccuucgaguacgugucccagccuuuccugauggaccuggaaggcaagcagggcaacuucaagaaccugcgcgaguucguguucaagaacaucgacggcuacuucaaaaucuacagcaagcacaccccuaucaaccucgugcgggaucugccucagggcuucucugcucuggaaccccugguggaucugcccaucggcaucaacaucacccgguuucagacacugcuggcccugcacagaagcuaccugacaccuggcgauagcagcagcggauggacagcuggugccgccgcuuacuaugugggcuaccugcagccuagaaccuuccugcugaaguacaacgagaacggcaccaucaccgacgccguggauugugcucuggauccucugagcgagacaaagugcacccugaaguccuucaccguggaaaagggcaucuaccagaccagcaacuuccgggugcagcccaccgaauccaucgugcgguuccccaauaucaccaaucugugccccuucggcgagguguucaaugccaccagauucgccucuguguacgccuggaaccggaagcggaucagcaauugcguggccgacuacuccgugcuguacaacuccgccagcuucagcaccuucaagugcuacggcguguccccuaccaagcugaacgaccugugcuucacaaacguguacgccgacagcuucgugauccggggagaugaagugcggcagauugccccuggacagacaggcaagaucgccgacuacaacuacaagcugcccgacgacuucaccggcugugugauugccuggaacagcaacaaccuggacuccaaagucggcggcaacuacaauuaccuguaccggcuguuccggaaguccaaucugaagcccuucgagcgggacaucagcaccgaaaucuaucaggccggcagcaccccuugcaacggcguggaaggcuucaacugcuacuucccacugcaguccuacggcuuucagcccacaaauggcgugggcuaucagcccuacagagugguggugcugagcuucgaacugcugcaugcuccugccacagugugcggcccuaagaaaagcaccaaucucgugaagaacaaaugcgugaacuucaacuucaacggccugaccggcaccggcgugcugacagagagcaacaagaaguuccugccauuccagcaguuuggccgggauaucgccgauaccacagacgccguuagagauccccagacacuggaaauccuggacaucaccccaugcagcuucggcggagugucugugaucaccccuggcaccaacaccagcaaucagguggcagugcuguaccagggcgugaacuguaccgaagugcccguggccauucacgccgaucagcugacaccuacauggcggguguacuccaccggcagcaauguguuucagaccagagccggcugucugaucggagccgagcacgugaacaauagcuacgagugcgacauccccaucggcgcuggcaucugugccagcuaccagacacagacaaacagccccagacgggcuagaagcguggccagccagagcaucauugccuacacaaugucucugggcgccgagaacagcguggccuacuccaacaacucuaucgcuauccccaccaacuucaccaucagcgugaccaccgagauccugccuguguccaugaccaagaccagcguggacugcaccauguacaucugcggcgauuccaccgagugcuccaaccugcugcugcaguacggcagcuucugcacccagcugaauagagcccugacagggaucgccguggaacaggacaagaacacccaagagguguucgcccaagugaagcaaaucuacaagaccccuccuaucaaggacuucggcggcuucaauuucagccagauucugcccgauccuagcaagcccagcaagcggagcuucaucgaggaccugcuguucaacaaagugacacuggccgacgccggcuucaucaagcaguauggcgauugucugggcgacauugccgccagggaucugauuugcgcccagaaguuuaacggacugacagugcugccuccucugcugaccgaugagaugaucgcccaguacacaucugcccugcuggccggcacaaucacaagcggcuggacauuuggagcuggcgccgcucugcagauccccuuugcuaugcagauggccuaccgguucaacggcaucggagugacccagaaugugcuguacgagaaccagaagcugaucgccaaccaguucaacagcgccaucggcaagauccaggacagccugagcagcacagcaagcgcccugggaaagcugcaggacguggucaaccagaaugcccaggcacugaacacccuggucaagcagcuguccuccaacuucggcgccaucagcucugugcugaacgauauccugagcagacuggacaaggucgaggccgaggugcagaucgacagacugaucacaggcagacugcagagccuccagacauacgugacccagcagcugaucagagccgccgagauuagagccucugccaaucuggccgccaccaagaugucugagugugugcugggccagagcaagagaguggacuuuugcggcaagggcuaccaccugaugagcuucccucagucugccccucacggcgugguguuucugcacgugacauaugugcccgcucaagagaagaauuucaccaccgcuccagccaucugccacgacggcaaagcccacuuuccuagagaaggcguguucguguccaacggcacccauugguucgugacacagcggaacuucuacgagccccagaucaucaccaccgacaacaccuucgugucuggcaacugcgacguugugaucggcauugugaacaauaccguguacgacccucugcagcccgagcuggacagcuucaaagaggaacuggacaaguacuuuaagaaccacacaagccccgacguggaccugggcgauaucagcggaaucaaugccagcgucgugaacauccagaaagagaucgaccggcugaacgagguggccaagaaucugaacgagagccugaucgaccugcaagaacuggggaaguacgagcaguacaucaaguggcccugguacaucuggcugggcuuuaucgccggacugauugccaucgugaucgucacaaucaugcuguguugcaugaccagcugcuguagcugccugaagggcuguuguagcuguggcagcugcugcaaguucgacgaggacgauucugagcccgugcugaagggcgugaaacugcacuacaccugaggacuagucccuguucccagagcccacuuuuuuuucuuuuuuugaaauaaaauagccugucuuucagaucucaaaggcucuuuucagagccaccaaaaaaaaaaaaaaaaaaaaaaaaaaaaaaaaaaaaaaaaaaaaaaaaaaaaaaaaaaaaaaaaaaaaaaaaaaaaaaaaaaaaaaaaaaaaaaaaaaaaa

SEQ ID NO: 23711 - RNA, 4185 nt, Artificial Sequence
  SARS-CoV-2/Wuhan/WIV05/2019__EPI_ISL_402128 spike protein mRNA gc mod (1-1273)(H69del_V70del_A222V_Y453F_S477N_D614G_I692V)
aggagagggcgcuuggcuugcaaggacccugagcugcggcauugaagcacacccaacccaacucgacugaagucagccucacugaaccggaucugagaaucuucucucucugggcuugccagggcucuccgaaccuagcuagcauccucuucaauuccaacuagaaagcuuaccauguucguguuucuggugcugcugccccugguguccagccagugugugaaccugaccaccagaacacagcugccuccagccuacaccaacagcuucaccagaggcguguacuaccccgacaagguguucagauccagcgugcugcacucuacccaggaccuguuccugccuuucuucagcaacgugaccugguuccacgccaucuccggcaccaauggcaccaagagauucgacaaccccgugcugcccuucaacgacgggguguacuuugccagcaccgagaaguccaacaucaucagaggcuggaucuucggcaccacacuggacagcaagacccagagccugcugaucgugaacaacgccaccaacguggucaucaaagugugcgaguuccaguucugcaacgaccccuuccugggcgucuacuaccacaagaacaacaagagcuggauggaaagcgaguuccggguguacagcagcgccaacaacugcaccuucgaguacgugucccagccuuuccugauggaccuggaaggcaagcagggcaacuucaagaaccugcgcgaguucguguucaagaacaucgacggcuacuucaaaaucuacagcaagcacaccccuaucaaccucgugcgggaucugccucagggcuucucugugcuggaaccccugguggaucugcccaucggcaucaacaucacccgguuucagacacugcuggcccugcacagaagcuaccugacaccuggcgauagcagcagcggauggacagcuggugccgccgcuuacuaugugggcuaccugcagccuagaaccuuccugcugaaguacaacgagaacggcaccaucaccgacgccguggauugugcucuggauccucugagcgagacaaagugcacccugaaguccuucaccguggaaaagggcaucuaccagaccagcaacuuccgggugcagcccaccgaauccaucgugcgguuccccaauaucaccaaucugugccccuucggcgagguguucaaugccaccagauucgccucuguguacgccuggaaccggaagcggaucagcaauugcguggccgacuacuccgugcuguacaacuccgccagcuucagcaccuucaagugcuacggcguguccccuaccaagcugaacgaccugugcuucacaaacguguacgccgacagcuucgugauccggggagaugaagugcggcagauugccccuggacagacaggcaagaucgccgacuacaacuacaagcugcccgacgacuucaccggcugugugauugccuggaacagcaacaaccuggacuccaaagucggcggcaacuacaauuaccuguuccggcuguuccggaaguccaaucugaagcccuucgagcgggacaucagcaccgaaaucuaucaggccggcaacaccccuugcaacggcguggaaggcuucaacugcuacuucccacugcaguccuacggcuuucagcccacaaauggcgugggcuaucagcccuacagagugguggugcugagcuucgaacugcugcaugcuccugccacagugugcggcccuaagaaaagcaccaaucucgugaagaacaaaugcgugaacuucaacuucaacggccugaccggcaccggcgugcugacagagagcaacaagaaguuccugccauuccagcaguuuggccgggauaucgccgauaccacagacgccguuagagauccccagacacuggaaauccuggacaucaccccaugcagcuucggcggagugucugugaucaccccuggcaccaacaccagcaaucagguggcagugcuguaccagggcgugaacuguaccgaagugcccguggccauucacgccgaucagcugacaccuacauggcggguguacuccaccggcagcaauguguuucagaccagagccggcugucugaucggagccgagcacgugaacaauagcuacgagugcgacauccccaucggcgcuggcaucugugccagcuaccagacacagacaaacagccccagacgggcuagaagcguggccagccagagcgugauugccuacacaaugucucugggcgccgagaacagcguggccuacuccaacaacucuaucgcuauccccaccaacuucaccaucagcgugaccaccgagauccugccuguguccaugaccaagaccagcguggacugcaccauguacaucugcggcgauuccaccgagugcuccaaccugcugcugcaguacggcagcuucugcacccagcugaauagagcccugacagggaucgccguggaacaggacaagaacacccaagagguguucgcccaagugaagcaaaucuacaagaccccuccuaucaaggacuucggcggcuucaauuucagccagauucugcccgauccuagcaagcccagcaagcggagcuucaucgaggaccugcuguucaacaaagugacacuggccgacgccggcuucaucaagcaguauggcgauugucugggcgacauugccgccagggaucugauuugcgcccagaaguuuaacggacugacagugcugccuccucugcugaccgaugagaugaucgcccaguacacaucugcccugcuggccggcacaaucacaagcggcuggacauuuggagcuggcgccgcucugcagauccccuuugcuaugcagauggccuaccgguucaacggcaucggagugacccagaaugugcuguacgagaaccagaagcugaucgccaaccaguucaacagcgccaucggcaagauccaggacagccugagcagcacagcaagcgcccugggaaagcugcaggacguggucaaccagaaugcccaggcacugaacacccuggucaagcagcuguccuccaacuucggcgccaucagcucugugcugaacgauauccugagcagacuggacaaggucgaggccgaggugcagaucgacagacugaucacaggcagacugcagagccuccagacauacgugacccagcagcugaucagagccgccgagauuagagccucugccaaucuggccgccaccaagaugucugagugugugcugggccagagcaagagaguggacuuuugcggcaagggcuaccaccugaugagcuucccucagucugccccucacggcgugguguuucugcacgugacauaugugcccgcucaagagaagaauuucaccaccgcuccagccaucugccacgacggcaaagcccacuuuccuagagaaggcguguucguguccaacggcacccauugguucgugacacagcggaacuucuacgagccccagaucaucaccaccgacaacaccuucgugucuggcaacugcgacguugugaucggcauugugaacaauaccguguacgacccucugcagcccgagcuggacagcuucaaagaggaacuggacaaguacuuuaagaaccacacaagccccgacguggaccugggcgauaucagcggaaucaaugccagcgucgugaacauccagaaagagaucgaccggcugaacgagguggccaagaaucugaacgagagccugaucgaccugcaagaacuggggaaguacgagcaguacaucaaguggcccugguacaucuggcugggcuuuaucgccggacugauugccaucgugauggucacaaucaugcuguguugcaugaccagcugcuguagcugccugaagggcuguuguagcuguggcagcugcugcaaguucgacgaggacgauucugagcccgugcugaagggcgugaaacugcacuacaccugaggacuagucccuguucccagagcccacuuuuuuuucuuuuuuugaaauaaaauagccugucuuucagaucucaaaggcucuuuucagagccaccaaaaaaaaaaaaaaaaaaaaaaaaaaaaaaaaaaaaaaaaaaaaaaaaaaaaaaaaaaaaaaaaaaaaaaaaaaaaaaaaaaaaaaaaaaaaaaaaaaaaa

SEQ ID NO: 23712 - RNA, 4185 nt, Artificial Sequence
  SARS-CoV-2/Wuhan/WIV05/2019__EPI_ISL_402128 spike protein mRNA gc mod (1-1273)(H69del_V70del_Y453F_D614G_I692V_M1229I)
aggagagggcgcuuggcuugcaaggacccugagcugcggcauugaagcacacccaacccaacucgacugaagucagccucacugaaccggaucugagaaucuucucucucugggcuugccagggcucuccgaaccuagcuagcauccucuucaauuccaacuagaaagcuuaccauguucguguuucuggugcugcugccccugguguccagccagugugugaaccugaccaccagaacacagcugccuccagccuacaccaacagcuucaccagaggcguguacuaccccgacaagguguucagauccagcgugcugcacucuacccaggaccuguuccugccuuucuucagcaacgugaccugguuccacgccaucuccggcaccaauggcaccaagagauucgacaaccccgugcugcccuucaacgacgggguguacuuugccagcaccgagaaguccaacaucaucagaggcuggaucuucggcaccacacuggacagcaagacccagagccugcugaucgugaacaacgccaccaacguggucaucaaagugugcgaguuccaguucugcaacgaccccuuccugggcgucuacuaccacaagaacaacaagagcuggauggaaagcgaguuccggguguacagcagcgccaacaacugcaccuucgaguacgugucccagccuuuccugauggaccuggaaggcaagcagggcaacuucaagaaccugcgcgaguucguguucaagaacaucgacggcuacuucaaaaucuacagcaagcacaccccuaucaaccucgugcgggaucugccucagggcuucucugcucuggaaccccugguggaucugcccaucggcaucaacaucacccgguuucagacacugcuggcccugcacagaagcuaccugacaccuggcgauagcagcagcggauggacagcuggugccgccgcuuacuaugugggcuaccugcagccuagaaccuuccugcugaaguacaacgagaacggcaccaucaccgacgccguggauugugcucuggauccucugagcgagacaaagugcacccugaaguccuucaccguggaaaagggcaucuaccagaccagcaacuuccgggugcagcccaccgaauccaucgugcgguuccccaauaucaccaaucugugccccuucggcgagguguucaaugccaccagauucgccucuguguacgccuggaaccggaagcggaucagcaauugcguggccgacuacuccgugcuguacaacuccgccagcuucagcaccuucaagugcuacggcguguccccuaccaagcugaacgaccugugcuucacaaacguguacgccgacagcuucgugauccggggagaugaagugcggcagauugccccuggacagacaggcaagaucgccgacuacaacuacaagcugcccgacgacuucaccggcugugugauugccuggaacagcaacaaccuggacuccaaagucggcggcaacuacaauuaccuguuccggcuguuccggaaguccaaucugaagcccuucgagcgggacaucagcaccgaaaucuaucaggccggcagcaccccuugcaacggcguggaaggcuucaacugcuacuucccacugcaguccuacggcuuucagcccacaaauggcgugggcuaucagcccuacagagugguggugcugagcuucgaacugcugcaugcuccugccacagugugcggcccuaagaaaagcaccaaucucgugaagaacaaaugcgugaacuucaacuucaacggccugaccggcaccggcgugcugacagagagcaacaagaaguuccugccauuccagcaguuuggccgggauaucgccgauaccacagacgccguuagagauccccagacacuggaaauccuggacaucaccccaugcagcuucggcggagugucugugaucaccccuggcaccaacaccagcaaucagguggcagugcuguaccagggcgugaacuguaccgaagugcccguggccauucacgccgaucagcugacaccuacauggcggguguacuccaccggcagcaauguguuucagaccagagccggcugucugaucggagccgagcacgugaacaauagcuacgagugcgacauccccaucggcgcuggcaucugugccagcuaccagacacagacaaacagccccagacgggcuagaagcguggccagccagagcgugauugccuacacaaugucucugggcgccgagaacagcguggccuacuccaacaacucuaucgcuauccccaccaacuucaccaucagcgugaccaccgagauccugccuguguccaugaccaagaccagcguggacugcaccauguacaucugcggcgauuccaccgagugcuccaaccugcugcugcaguacggcagcuucugcacccagcugaauagagcccugacagggaucgccguggaacaggacaagaacacccaagagguguucgcccaagugaagcaaaucuacaagaccccuccuaucaaggacuucggcggcuucaauuucagccagauucugcccgauccuagcaagcccagcaagcggagcuucaucgaggaccugcuguucaacaaagugacacuggccgacgccggcuucaucaagcaguauggcgauugucugggcgacauugccgccagggaucugauuugcgcccagaaguuuaacggacugacagugcugccuccucugcugaccgaugagaugaucgcccaguacacaucugcccugcuggccggcacaaucacaagcggcuggacauuuggagcuggcgccgcucugcagauccccuuugcuaugcagauggccuaccgguucaacggcaucggagugacccagaaugugcuguacgagaaccagaagcugaucgccaaccaguucaacagcgccaucggcaagauccaggacagccugagcagcacagcaagcgcccugggaaagcugcaggacguggucaaccagaaugcccaggcacugaacacccuggucaagcagcuguccuccaacuucggcgccaucagcucugugcugaacgauauccugagcagacuggacaaggucgaggccgaggugcagaucgacagacugaucacaggcagacugcagagccuccagacauacgugacccagcagcugaucagagccgccgagauuagagccucugccaaucuggccgccaccaagaugucugagugugugcugggccagagcaagagaguggacuuuugcggcaagggcuaccaccugaugagcuucccucagucugccccucacggcgugguguuucugcacgugacauaugugcccgcucaagagaagaauuucaccaccgcuccagccaucugccacgacggcaaagcccacuuuccuagagaaggcguguucguguccaacggcacccauugguucgugacacagcggaacuucuacgagccccagaucaucaccaccgacaacaccuucgugucuggcaacugcgacguugugaucggcauugugaacaauaccguguacgacccucugcagcccgagcuggacagcuucaaagaggaacuggacaaguacuuuaagaaccacacaagccccgacguggaccugggcgauaucagcggaaucaaugccagcgucgugaacauccagaaagagaucgaccggcugaacgagguggccaagaaucugaacgagagccugaucgaccugcaagaacuggggaaguacgagcaguacaucaaguggcccugguacaucuggcugggcuuuaucgccggacugauugccaucgugaucgucacaaucaugcuguguugcaugaccagcugcuguagcugccugaagggcuguuguagcuguggcagcugcugcaaguucgacgaggacgauucugagcccgugcugaagggcgugaaacugcacuacaccugaggacuagucccuguucccagagcccacuuuuuuuucuuuuuuugaaauaaaauagccugucuuucagaucucaaaggcucuuuucagagccaccaaaaaaaaaaaaaaaaaaaaaaaaaaaaaaaaaaaaaaaaaaaaaaaaaaaaaaaaaaaaaaaaaaaaaaaaaaaaaaaaaaaaaaaaaaaaaaaaaaaaa

SEQ ID NO: 23713 - RNA, 4182 nt, Artificial Sequence
  SARS-CoV-2/Wuhan/WIV05/2019__EPI_ISL_402128 spike protein mRNA gc mod (1-1273)(H69del_V70del_Y144del_N501Y_A570D_D614G_P681H_T716I_S982 A_D1118H)
aggagagggcgcuuggcuugcaaggacccugagcugcggcauugaagcacacccaacccaacucgacugaagucagccucacugaaccggaucugagaaucuucucucucugggcuugccagggcucuccgaaccuagcuagcauccucuucaauuccaacuagaaagcuuaccauguucguguuucuggugcugcugccccugguguccagccagugugugaaccugaccaccagaacacagcugccuccagccuacaccaacagcuucaccagaggcguguacuaccccgacaagguguucagauccagcgugcugcacucuacccaggaccuguuccugccuuucuucagcaacgugaccugguuccacgccaucuccggcaccaauggcaccaagagauucgacaaccccgugcugcccuucaacgacgggguguacuuugccagcaccgagaaguccaacaucaucagaggcuggaucuucggcaccacacuggacagcaagacccagagccugcugaucgugaacaacgccaccaacguggucaucaaagugugcgaguuccaguucugcaacgaccccuuccugggcgucuaccacaagaacaacaagagcuggauggaaagcgaguuccggguguacagcagcgccaacaacugcaccuucgaguacgugucccagccuuuccugauggaccuggaaggcaagcagggcaacuucaagaaccugcgcgaguucguguucaagaacaucgacggcuacuucaaaaucuacagcaagcacaccccuaucaaccucgugcgggaucugccucagggcuucucugcucuggaaccccugguggaucugcccaucggcaucaacaucacccgguuucagacacugcuggcccugcacagaagcuaccugacaccuggcgauagcagcagcggauggacagcuggugccgccgcuuacuaugugggcuaccugcagccuagaaccuuccugcugaaguacaacgagaacggcaccaucaccgacgccguggauugugcucuggauccucugagcgagacaaagugcacccugaaguccuucaccguggaaaagggcaucuaccagaccagcaacuuccgggugcagcccaccgaauccaucgugcgguuccccaauaucaccaaucugugccccuucggcgagguguucaaugccaccagauucgccucuguguacgccuggaaccggaagcggaucagcaauugcguggccgacuacuccgugcuguacaacuccgccagcuucagcaccuucaagugcuacggcguguccccuaccaagcugaacgaccugugcuucacaaacguguacgccgacagcuucgugauccggggagaugaagugcggcagauugccccuggacagacaggcaagaucgccgacuacaacuacaagcugcccgacgacuucaccggcugugugauugccuggaacagcaacaaccuggacuccaaagucggcggcaacuacaauuaccuguaccggcuguuccggaaguccaaucugaagcccuucgagcgggacaucagcaccgaaaucuaucaggccggcagcaccccuugcaacggcguggaaggcuucaacugcuacuucccacugcaguccuacggcuuucagcccacauacggcgugggcuaucagcccuacagagugguggugcugagcuucgaacugcugcaugcuccugccacagugugcggcccuaagaaaagcaccaaucucgugaagaacaaaugcgugaacuucaacuucaacggccugaccggcaccggcgugcugacagagagcaacaagaaguuccugccauuccagcaguuuggccgggauaucgacgauaccacagacgccguuagagauccccagacacuggaaauccuggacaucaccccaugcagcuucggcggagugucugugaucaccccuggcaccaacaccagcaaucagguggcagugcuguaccagggcgugaacuguaccgaagugcccguggccauucacgccgaucagcugacaccuacauggcggguguacuccaccggcagcaauguguuucagaccagagccggcugucugaucggagccgagcacgugaacaauagcuacgagugcgacauccccaucggcgcuggcaucugugccagcuaccagacacagacaaacagccacagacgggcuagaagcguggccagccagagcaucauugccuacacaaugucucugggcgccgagaacagcguggccuacuccaacaacucuaucgcuauccccaucaacuucaccaucagcgugaccaccgagauccugccuguguccaugaccaagaccagcguggacugcaccauguacaucugcggcgauuccaccgagugcuccaaccugcugcugcaguacggcagcuucugcacccagcugaauagagcccugacagggaucgccguggaacaggacaagaacacccaagagguguucgcccaagugaagcaaaucuacaagaccccuccuaucaaggacuucggcggcuucaauuucagccagauucugcccgauccuagcaagcccagcaagcggagcuucaucgaggaccugcuguucaacaaagugacacuggccgacgccggcuucaucaagcaguauggcgauugucugggcgacauugccgccagggaucugauuugcgcccagaaguuuaacggacugacagugcugccuccucugcugaccgaugagaugaucgcccaguacacaucugcccugcuggccggcacaaucacaagcggcuggacauuuggagcuggcgccgcucugcagauccccuuugcuaugcagauggccuaccgguucaacggcaucggagugacccagaaugugcuguacgagaaccagaagcugaucgccaaccaguucaacagcgccaucggcaagauccaggacagccugagcagcacagcaagcgcccugggaaagcugcaggacguggucaaccagaaugcccaggcacugaacacccuggucaagcagcuguccuccaacuucggcgccaucagcucugugcugaacgauauccuggccagacuggacaaggucgaggccgaggugcagaucgacagacugaucacaggcagacugcagagccuccagacauacgugacccagcagcugaucagagccgccgagauuagagccucugccaaucuggccgccaccaagaugucugagugugugcugggccagagcaagagaguggacuuuugcggcaagggcuaccaccugaugagcuucccucagucugccccucacggcgugguguuucugcacgugacauaugugcccgcucaagagaagaauuucaccaccgcuccagccaucugccacgacggcaaagcccacuuuccuagagaaggcguguucguguccaacggcacccauugguucgugacacagcggaacuucuacgagccccagaucaucaccacccacaacaccuucgugucuggcaacugcgacguugugaucggcauugugaacaauaccguguacgacccucugcagcccgagcuggacagcuucaaagaggaacuggacaaguacuuuaagaaccacacaagccccgacguggaccugggcgauaucagcggaaucaaugccagcgucgugaacauccagaaagagaucgaccggcugaacgagguggccaagaaucugaacgagagccugaucgaccugcaagaacuggggaaguacgagcaguacaucaaguggcccugguacaucuggcugggcuuuaucgccggacugauugccaucgugauggucacaaucaugcuguguugcaugaccagcugcuguagcugccugaagggcuguuguagcuguggcagcugcugcaaguucgacgaggacgauucugagcccgugcugaagggcgugaaacugcacuacaccugaggacuagucccuguucccagagcccacuuuuuuuucuuuuuuugaaauaaaauagccugucuuucagaucucaaaggcucuuuucagagccaccaaaaaaaaaaaaaaaaaaaaaaaaaaaaaaaaaaaaaaaaaaaaaaaaaaaaaaaaaaaaaaaaaaaaaaaaaaaaaaaaaaaaaaaaaaaaaaaaaaaaa

SEQ ID NO: 23714 - RNA, 4191 nt, Artificial Sequence
  SARS-CoV-2/Wuhan/WIV05/2019__EPI_ISL_402128 spike protein mRNA gc mod (1-1273)(K417N_E484K_N501Y_D614G)
aggagagggcgcuuggcuugcaaggacccugagcugcggcauugaagcacacccaacccaacucgacugaagucagccucacugaaccggaucugagaaucuucucucucugggcuugccagggcucuccgaaccuagcuagcauccucuucaauuccaacuagaaagcuuaccauguucguguuucuggugcugcugccccugguguccagccagugugugaaccugaccaccagaacacagcugccuccagccuacaccaacagcuucaccagaggcguguacuaccccgacaagguguucagauccagcgugcugcacucuacccaggaccuguuccugccuuucuucagcaacgugaccugguuccacgccauccacguguccggcaccaauggcaccaagagauucgacaaccccgugcugcccuucaacgacgggguguacuuugccagcaccgagaaguccaacaucaucagaggcuggaucuucggcaccacacuggacagcaagacccagagccugcugaucgugaacaacgccaccaacguggucaucaaagugugcgaguuccaguucugcaacgaccccuuccugggcgucuacuaccacaagaacaacaagagcuggauggaaagcgaguuccggguguacagcagcgccaacaacugcaccuucgaguacgugucccagccuuuccugauggaccuggaaggcaagcagggcaacuucaagaaccugcgcgaguucguguucaagaacaucgacggcuacuucaaaaucuacagcaagcacaccccuaucaaccucgugcgggaucugccucagggcuucucugcucuggaaccccugguggaucugcccaucggcaucaacaucacccgguuucagacacugcuggcccugcacagaagcuaccugacaccuggcgauagcagcagcggauggacagcuggugccgccgcuuacuaugugggcuaccugcagccuagaaccuuccugcugaaguacaacgagaacggcaccaucaccgacgccguggauugugcucuggauccucugagcgagacaaagugcacccugaaguccuucaccguggaaaagggcaucuaccagaccagcaacuuccgggugcagcccaccgaauccaucgugcgguuccccaauaucaccaaucugugccccuucggcgagguguucaaugccaccagauucgccucuguguacgccuggaaccggaagcggaucagcaauugcguggccgacuacuccgugcuguacaacuccgccagcuucagcaccuucaagugcuacggcguguccccuaccaagcugaacgaccugugcuucacaaacguguacgccgacagcuucgugauccggggagaugaagugcggcagauugccccuggacagacaggcaacaucgccgacuacaacuacaagcugcccgacgacuucaccggcugugugauugccuggaacagcaacaaccuggacuccaaagucggcggcaacuacaauuaccuguaccggcuguuccggaaguccaaucugaagcccuucgagcgggacaucagcaccgaaaucuaucaggccggcagcaccccuugcaacggcgugaagggcuucaacugcuacuucccacugcaguccuacggcuuucagcccacauacggcgugggcuaucagcccuacagagugguggugcugagcuucgaacugcugcaugcuccugccacagugugcggcccuaagaaaagcaccaaucucgugaagaacaaaugcgugaacuucaacuucaacggccugaccggcaccggcgugcugacagagagcaacaagaaguuccugccauuccagcaguuuggccgggauaucgccgauaccacagacgccguuagagauccccagacacuggaaauccuggacaucaccccaugcagcuucggcggagugucugugaucaccccuggcaccaacaccagcaaucagguggcagugcuguaccagggcgugaacuguaccgaagugcccguggccauucacgccgaucagcugacaccuacauggcggguguacuccaccggcagcaauguguuucagaccagagccggcugucugaucggagccgagcacgugaacaauagcuacgagugcgacauccccaucggcgcuggcaucugugccagcuaccagacacagacaaacagccccagacgggcuagaagcguggccagccagagcaucauugccuacacaaugucucugggcgccgagaacagcguggccuacuccaacaacucuaucgcuauccccaccaacuucaccaucagcgugaccaccgagauccugccuguguccaugaccaagaccagcguggacugcaccauguacaucugcggcgauuccaccgagugcuccaaccugcugcugcaguacggcagcuucugcacccagcugaauagagcccugacagggaucgccguggaacaggacaagaacacccaagagguguucgcccaagugaagcaaaucuacaagaccccuccuaucaaggacuucggcggcuucaauuucagccagauucugcccgauccuagcaagcccagcaagcggagcuucaucgaggaccugcuguucaacaaagugacacuggccgacgccggcuucaucaagcaguauggcgauugucugggcgacauugccgccagggaucugauuugcgcccagaaguuuaacggacugacagugcugccuccucugcugaccgaugagaugaucgcccaguacacaucugcccugcuggccggcacaaucacaagcggcuggacauuuggagcuggcgccgcucugcagauccccuuugcuaugcagauggccuaccgguucaacggcaucggagugacccagaaugugcuguacgagaaccagaagcugaucgccaaccaguucaacagcgccaucggcaagauccaggacagccugagcagcacagcaagcgcccugggaaagcugcaggacguggucaaccagaaugcccaggcacugaacacccuggucaagcagcuguccuccaacuucggcgccaucagcucugugcugaacgauauccugagcagacuggacaaggucgaggccgaggugcagaucgacagacugaucacaggcagacugcagagccuccagacauacgugacccagcagcugaucagagccgccgagauuagagccucugccaaucuggccgccaccaagaugucugagugugugcugggccagagcaagagaguggacuuuugcggcaagggcuaccaccugaugagcuucccucagucugccccucacggcgugguguuucugcacgugacauaugugcccgcucaagagaagaauuucaccaccgcuccagccaucugccacgacggcaaagcccacuuuccuagagaaggcguguucguguccaacggcacccauugguucgugacacagcggaacuucuacgagccccagaucaucaccaccgacaacaccuucgugucuggcaacugcgacguugugaucggcauugugaacaauaccguguacgacccucugcagcccgagcuggacagcuucaaagaggaacuggacaaguacuuuaagaaccacacaagccccgacguggaccugggcgauaucagcggaaucaaugccagcgucgugaacauccagaaagagaucgaccggcugaacgagguggccaagaaucugaacgagagccugaucgaccugcaagaacuggggaaguacgagcaguacaucaaguggcccugguacaucuggcugggcuuuaucgccggacugauugccaucgugauggucacaaucaugcuguguugcaugaccagcugcuguagcugccugaagggcuguuguagcuguggcagcugcugcaaguucgacgaggacgauucugagcccgugcugaagggcgugaaacugcacuacaccugaggacuagucccuguucccagagcccacuuuuuuuucuuuuuuugaaauaaaauagccugucuuucagaucucaaaggcucuuuucagagccaccaaaaaaaaaaaaaaaaaaaaaaaaaaaaaaaaaaaaaaaaaaaaaaaaaaaaaaaaaaaaaaaaaaaaaaaaaaaaaaaaaaaaaaaaaaaaaaaaaaaaa

SEQ ID NO: 23715 - RNA, 4182 nt, Artificial Sequence
  SARS-CoV-2/Wuhan/WIV05/2019__EPI_ISL_402128 spike protein mRNA gc mod (1-1273)(L18F_D80A_D215G_L242del_A243del_L244del_R246I_K417N_E484 K_N501Y_D614G_A701V)
aggagagggcgcuuggcuugcaaggacccugagcugcggcauugaagcacacccaacccaacucgacugaagucagccucacugaaccggaucugagaaucuucucucucugggcuugccagggcucuccgaaccuagcuagcauccucuucaauuccaacuagaaagcuuaccauguucguguuucuggugcugcugccccugguguccagccagugugugaacuucaccaccagaacacagcugccuccagccuacaccaacagcuucaccagaggcguguacuaccccgacaagguguucagauccagcgugcugcacucuacccaggaccuguuccugccuuucuucagcaacgugaccugguuccacgccauccacguguccggcaccaauggcaccaagagauucgccaaccccgugcugcccuucaacgacgggguguacuuugccagcaccgagaaguccaacaucaucagaggcuggaucuucggcaccacacuggacagcaagacccagagccugcugaucgugaacaacgccaccaacguggucaucaaagugugcgaguuccaguucugcaacgaccccuuccugggcgucuacuaccacaagaacaacaagagcuggauggaaagcgaguuccggguguacagcagcgccaacaacugcaccuucgaguacgugucccagccuuuccugauggaccuggaaggcaagcagggcaacuucaagaaccugcgcgaguucguguucaagaacaucgacggcuacuucaaaaucuacagcaagcacaccccuaucaaccucgugcggggccugccucagggcuucucugcucuggaaccccugguggaucugcccaucggcaucaacaucacccgguuucagacacugcacaucagcuaccugacaccuggcgauagcagcagcggauggacagcuggugccgccgcuuacuaugugggcuaccugcagccuagaaccuuccugcugaaguacaacgagaacggcaccaucaccgacgccguggauugugcucuggauccucugagcgagacaaagugcacccugaaguccuucaccguggaaaagggcaucuaccagaccagcaacuuccgggugcagcccaccgaauccaucgugcgguuccccaauaucaccaaucugugccccuucggcgagguguucaaugccaccagauucgccucuguguacgccuggaaccggaagcggaucagcaauugcguggccgacuacuccgugcuguacaacuccgccagcuucagcaccuucaagugcuacggcguguccccuaccaagcugaacgaccugugcuucacaaacguguacgccgacagcuucgugauccggggagaugaagugcggcagauugccccuggacagacaggcaacaucgccgacuacaacuacaagcugcccgacgacuucaccggcugugugauugccuggaacagcaacaaccuggacuccaaagucggcggcaacuacaauuaccuguaccggcuguuccggaaguccaaucugaagcccuucgagcgggacaucagcaccgaaaucuaucaggccggcagcaccccuugcaacggcgugaagggcuucaacugcuacuucccacugcaguccuacggcuuucagcccacauacggcgugggcuaucagcccuacagagugguggugcugagcuucgaacugcugcaugcuccugccacagugugcggcccuaagaaaagcaccaaucucgugaagaacaaaugcgugaacuucaacuucaacggccugaccggcaccggcgugcugacagagagcaacaagaaguuccugccauuccagcaguuuggccgggauaucgccgauaccacagacgccguuagagauccccagacacuggaaauccuggacaucaccccaugcagcuucggcggagugucugugaucaccccuggcaccaacaccagcaaucagguggcagugcuguaccagggcgugaacuguaccgaagugcccguggccauucacgccgaucagcugacaccuacauggcggguguacuccaccggcagcaauguguuucagaccagagccggcugucugaucggagccgagcacgugaacaauagcuacgagugcgacauccccaucggcgcuggcaucugugccagcuaccagacacagacaaacagccccagacgggcuagaagcguggccagccagagcaucauugccuacacaaugucucugggcguggagaacagcguggccuacuccaacaacucuaucgcuauccccaccaacuucaccaucagcgugaccaccgagauccugccuguguccaugaccaagaccagcguggacugcaccauguacaucugcggcgauuccaccgagugcuccaaccugcugcugcaguacggcagcuucugcacccagcugaauagagcccugacagggaucgccguggaacaggacaagaacacccaagagguguucgcccaagugaagcaaaucuacaagaccccuccuaucaaggacuucggcggcuucaauuucagccagauucugcccgauccuagcaagcccagcaagcggagcuucaucgaggaccugcuguucaacaaagugacacuggccgacgccggcuucaucaagcaguauggcgauugucugggcgacauugccgccagggaucugauuugcgcccagaaguuuaacggacugacagugcugccuccucugcugaccgaugagaugaucgcccaguacacaucugcccugcuggccggcacaaucacaagcggcuggacauuuggagcuggcgccgcucugcagauccccuuugcuaugcagauggccuaccgguucaacggcaucggagugacccagaaugugcuguacgagaaccagaagcugaucgccaaccaguucaacagcgccaucggcaagauccaggacagccugagcagcacagcaagcgcccugggaaagcugcaggacguggucaaccagaaugcccaggcacugaacacccuggucaagcagcuguccuccaacuucggcgccaucagcucugugcugaacgauauccugagcagacuggacaaggucgaggccgaggugcagaucgacagacugaucacaggcagacugcagagccuccagacauacgugacccagcagcugaucagagccgccgagauuagagccucugccaaucuggccgccaccaagaugucugagugugugcugggccagagcaagagaguggacuuuugcggcaagggcuaccaccugaugagcuucccucagucugccccucacggcgugguguuucugcacgugacauaugugcccgcucaagagaagaauuucaccaccgcuccagccaucugccacgacggcaaagcccacuuuccuagagaaggcguguucguguccaacggcacccauugguucgugacacagcggaacuucuacgagccccagaucaucaccaccgacaacaccuucgugucuggcaacugcgacguugugaucggcauugugaacaauaccguguacgacccucugcagcccgagcuggacagcuucaaagaggaacuggacaaguacuuuaagaaccacacaagccccgacguggaccugggcgauaucagcggaaucaaugccagcgucgugaacauccagaaagagaucgaccggcugaacgagguggccaagaaucugaacgagagccugaucgaccugcaagaacuggggaaguacgagcaguacaucaaguggcccugguacaucuggcugggcuuuaucgccggacugauugccaucgugauggucacaaucaugcuguguugcaugaccagcugcuguagcugccugaagggcuguuguagcuguggcagcugcugcaaguucgacgaggacgauucugagcccgugcugaagggcgugaaacugcacuacaccugaggacuagucccuguucccagagcccacuuuuuuuucuuuuuuugaaauaaaauagccugucuuucagaucucaaaggcucuuuucagagccaccaaaaaaaaaaaaaaaaaaaaaaaaaaaaaaaaaaaaaaaaaaaaaaaaaaaaaaaaaaaaaaaaaaaaaaaaaaaaaaaaaaaaaaaaaaaaaaaaaaaaa

SEQ ID NO: 23716 - RNA, 4191 nt, Artificial Sequence
  SARS-CoV-2/Wuhan/WIV05/2019__EPI_ISL_402128 spike protein mRNA gc mod (1-1273)(E484K_D614G)
aggagagggcgcuuggcuugcaaggacccugagcugcggcauugaagcacacccaacccaacucgacugaagucagccucacugaaccggaucugagaaucuucucucucugggcuugccagggcucuccgaaccuagcuagcauccucuucaauuccaacuagaaagcuuaccauguucguguuucuggugcugcugccccugguguccagccagugugugaaccugaccaccagaacacagcugccuccagccuacaccaacagcuucaccagaggcguguacuaccccgacaagguguucagauccagcgugcugcacucuacccaggaccuguuccugccuuucuucagcaacgugaccugguuccacgccauccacguguccggcaccaauggcaccaagagauucgacaaccccgugcugcccuucaacgacgggguguacuuugccagcaccgagaaguccaacaucaucagaggcuggaucuucggcaccacacuggacagcaagacccagagccugcugaucgugaacaacgccaccaacguggucaucaaagugugcgaguuccaguucugcaacgaccccuuccugggcgucuacuaccacaagaacaacaagagcuggauggaaagcgaguuccggguguacagcagcgccaacaacugcaccuucgaguacgugucccagccuuuccugauggaccuggaaggcaagcagggcaacuucaagaaccugcgcgaguucguguucaagaacaucgacggcuacuucaaaaucuacagcaagcacaccccuaucaaccucgugcgggaucugccucagggcuucucugcucuggaaccccugguggaucugcccaucggcaucaacaucacccgguuucagacacugcuggcccugcacagaagcuaccugacaccuggcgauagcagcagcggauggacagcuggugccgccgcuuacuaugugggcuaccugcagccuagaaccuuccugcugaaguacaacgagaacggcaccaucaccgacgccguggauugugcucuggauccucugagcgagacaaagugcacccugaaguccuucaccguggaaaagggcaucuaccagaccagcaacuuccgggugcagcccaccgaauccaucgugcgguuccccaauaucaccaaucugugccccuucggcgagguguucaaugccaccagauucgccucuguguacgccuggaaccggaagcggaucagcaauugcguggccgacuacuccgugcuguacaacuccgccagcuucagcaccuucaagugcuacggcguguccccuaccaagcugaacgaccugugcuucacaaacguguacgccgacagcuucgugauccggggagaugaagugcggcagauugccccuggacagacaggcaagaucgccgacuacaacuacaagcugcccgacgacuucaccggcugugugauugccuggaacagcaacaaccuggacuccaaagucggcggcaacuacaauuaccuguaccggcuguuccggaaguccaaucugaagcccuucgagcgggacaucagcaccgaaaucuaucaggccggcagcaccccuugcaacggcgugaagggcuucaacugcuacuucccacugcaguccuacggcuuucagcccacaaauggcgugggcuaucagcccuacagagugguggugcugagcuucgaacugcugcaugcuccugccacagugugcggcccuaagaaaagcaccaaucucgugaagaacaaaugcgugaacuucaacuucaacggccugaccggcaccggcgugcugacagagagcaacaagaaguuccugccauuccagcaguuuggccgggauaucgccgauaccacagacgccguuagagauccccagacacuggaaauccuggacaucaccccaugcagcuucggcggagugucugugaucaccccuggcaccaacaccagcaaucagguggcagugcuguaccagggcgugaacuguaccgaagugcccguggccauucacgccgaucagcugacaccuacauggcggguguacuccaccggcagcaauguguuucagaccagagccggcugucugaucggagccgagcacgugaacaauagcuacgagugcgacauccccaucggcgcuggcaucugugccagcuaccagacacagacaaacagccccagacgggcuagaagcguggccagccagagcaucauugccuacacaaugucucugggcgccgagaacagcguggccuacuccaacaacucuaucgcuauccccaccaacuucaccaucagcgugaccaccgagauccugccuguguccaugaccaagaccagcguggacugcaccauguacaucugcggcgauuccaccgagugcuccaaccugcugcugcaguacggcagcuucugcacccagcugaauagagcccugacagggaucgccguggaacaggacaagaacacccaagagguguucgcccaagugaagcaaaucuacaagaccccuccuaucaaggacuucggcggcuucaauuucagccagauucugcccgauccuagcaagcccagcaagcggagcuucaucgaggaccugcuguucaacaaagugacacuggccgacgccggcuucaucaagcaguauggcgauugucugggcgacauugccgccagggaucugauuugcgcccagaaguuuaacggacugacagugcugccuccucugcugaccgaugagaugaucgcccaguacacaucugcccugcuggccggcacaaucacaagcggcuggacauuuggagcuggcgccgcucugcagauccccuuugcuaugcagauggccuaccgguucaacggcaucggagugacccagaaugugcuguacgagaaccagaagcugaucgccaaccaguucaacagcgccaucggcaagauccaggacagccugagcagcacagcaagcgcccugggaaagcugcaggacguggucaaccagaaugcccaggcacugaacacccuggucaagcagcuguccuccaacuucggcgccaucagcucugugcugaacgauauccugagcagacuggacaaggucgaggccgaggugcagaucgacagacugaucacaggcagacugcagagccuccagacauacgugacccagcagcugaucagagccgccgagauuagagccucugccaaucuggccgccaccaagaugucugagugugugcugggccagagcaagagaguggacuuuugcggcaagggcuaccaccugaugagcuucccucagucugccccucacggcgugguguuucugcacgugacauaugugcccgcucaagagaagaauuucaccaccgcuccagccaucugccacgacggcaaagcccacuuuccuagagaaggcguguucguguccaacggcacccauugguucgugacacagcggaacuucuacgagccccagaucaucaccaccgacaacaccuucgugucuggcaacugcgacguugugaucggcauugugaacaauaccguguacgacccucugcagcccgagcuggacagcuucaaagaggaacuggacaaguacuuuaagaaccacacaagccccgacguggaccugggcgauaucagcggaaucaaugccagcgucgugaacauccagaaagagaucgaccggcugaacgagguggccaagaaucugaacgagagccugaucgaccugcaagaacuggggaaguacgagcaguacaucaaguggcccugguacaucuggcugggcuuuaucgccggacugauugccaucgugauggucacaaucaugcuguguugcaugaccagcugcuguagcugccugaagggcuguuguagcuguggcagcugcugcaaguucgacgaggacgauucugagcccgugcugaagggcgugaaacugcacuacaccugaggacuagucccuguucccagagcccacuuuuuuuucuuuuuuugaaauaaaauagccugucuuucagaucucaaaggcucuuuucagagccaccaaaaaaaaaaaaaaaaaaaaaaaaaaaaaaaaaaaaaaaaaaaaaaaaaaaaaaaaaaaaaaaaaaaaaaaaaaaaaaaaaaaaaaaaaaaaaaaaaaaaa

SEQ ID NO: 23717 - RNA, 4191 nt, Artificial Sequence
  SARS-CoV-2/Wuhan/WIV05/2019__EPI_ISL_402128 spike protein mRNA gc mod (1-1273)(L18F_T20N_P26S_D138Y_R190S_K417T_E484K_N501Y_D614G_H655Y _T1027I)
aggagagggcgcuuggcuugcaaggacccugagcugcggcauugaagcacacccaacccaacucgacugaagucagccucacugaaccggaucugagaaucuucucucucugggcuugccagggcucuccgaaccuagcuagcauccucuucaauuccaacuagaaagcuuaccauguucguguuucuggugcugcugccccugguguccagccagugugugaacuucaccaacagaacacagcugccuagcgccuacaccaacagcuucaccagaggcguguacuaccccgacaagguguucagauccagcgugcugcacucuacccaggaccuguuccugccuuucuucagcaacgugaccugguuccacgccauccacguguccggcaccaauggcaccaagagauucgacaaccccgugcugcccuucaacgacgggguguacuuugccagcaccgagaaguccaacaucaucagaggcuggaucuucggcaccacacuggacagcaagacccagagccugcugaucgugaacaacgccaccaacguggucaucaaagugugcgaguuccaguucugcaacuaccccuuccugggcgucuacuaccacaagaacaacaagagcuggauggaaagcgaguuccggguguacagcagcgccaacaacugcaccuucgaguacgugucccagccuuuccugauggaccuggaaggcaagcagggcaacuucaagaaccugagcgaguucguguucaagaacaucgacggcuacuucaaaaucuacagcaagcacaccccuaucaaccucgugcgggaucugccucagggcuucucugcucuggaaccccugguggaucugcccaucggcaucaacaucacccgguuucagacacugcuggcccugcacagaagcuaccugacaccuggcgauagcagcagcggauggacagcuggugccgccgcuuacuaugugggcuaccugcagccuagaaccuuccugcugaaguacaacgagaacggcaccaucaccgacgccguggauugugcucuggauccucugagcgagacaaagugcacccugaaguccuucaccguggaaaagggcaucuaccagaccagcaacuuccgggugcagcccaccgaauccaucgugcgguuccccaauaucaccaaucugugccccuucggcgagguguucaaugccaccagauucgccucuguguacgccuggaaccggaagcggaucagcaauugcguggccgacuacuccgugcuguacaacuccgccagcuucagcaccuucaagugcuacggcguguccccuaccaagcugaacgaccugugcuucacaaacguguacgccgacagcuucgugauccggggagaugaagugcggcagauugccccuggacagacaggcaccaucgccgacuacaacuacaagcugcccgacgacuucaccggcugugugauugccuggaacagcaacaaccuggacuccaaagucggcggcaacuacaauuaccuguaccggcuguuccggaaguccaaucugaagcccuucgagcgggacaucagcaccgaaaucuaucaggccggcagcaccccuugcaacggcgugaagggcuucaacugcuacuucccacugcaguccuacggcuuucagcccacauacggcgugggcuaucagcccuacagagugguggugcugagcuucgaacugcugcaugcuccugccacagugugcggcccuaagaaaagcaccaaucucgugaagaacaaaugcgugaacuucaacuucaacggccugaccggcaccggcgugcugacagagagcaacaagaaguuccugccauuccagcaguuuggccgggauaucgccgauaccacagacgccguuagagauccccagacacuggaaauccuggacaucaccccaugcagcuucggcggagugucugugaucaccccuggcaccaacaccagcaaucagguggcagugcuguaccagggcgugaacuguaccgaagugcccguggccauucacgccgaucagcugacaccuacauggcggguguacuccaccggcagcaauguguuucagaccagagccggcugucugaucggagccgaguacgugaacaauagcuacgagugcgacauccccaucggcgcuggcaucugugccagcuaccagacacagacaaacagccccagacgggcuagaagcguggccagccagagcaucauugccuacacaaugucucugggcgccgagaacagcguggccuacuccaacaacucuaucgcuauccccaccaacuucaccaucagcgugaccaccgagauccugccuguguccaugaccaagaccagcguggacugcaccauguacaucugcggcgauuccaccgagugcuccaaccugcugcugcaguacggcagcuucugcacccagcugaauagagcccugacagggaucgccguggaacaggacaagaacacccaagagguguucgcccaagugaagcaaaucuacaagaccccuccuaucaaggacuucggcggcuucaauuucagccagauucugcccgauccuagcaagcccagcaagcggagcuucaucgaggaccugcuguucaacaaagugacacuggccgacgccggcuucaucaagcaguauggcgauugucugggcgacauugccgccagggaucugauuugcgcccagaaguuuaacggacugacagugcugccuccucugcugaccgaugagaugaucgcccaguacacaucugcccugcuggccggcacaaucacaagcggcuggacauuuggagcuggcgccgcucugcagauccccuuugcuaugcagauggccuaccgguucaacggcaucggagugacccagaaugugcuguacgagaaccagaagcugaucgccaaccaguucaacagcgccaucggcaagauccaggacagccugagcagcacagcaagcgcccugggaaagcugcaggacguggucaaccagaaugcccaggcacugaacacccuggucaagcagcuguccuccaacuucggcgccaucagcucugugcugaacgauauccugagcagacuggacaaggucgaggccgaggugcagaucgacagacugaucacaggcagacugcagagccuccagacauacgugacccagcagcugaucagagccgccgagauuagagccucugccaaucuggccgccaucaagaugucugagugugugcugggccagagcaagagaguggacuuuugcggcaagggcuaccaccugaugagcuucccucagucugccccucacggcgugguguuucugcacgugacauaugugcccgcucaagagaagaauuucaccaccgcuccagccaucugccacgacggcaaagcccacuuuccuagagaaggcguguucguguccaacggcacccauugguucgugacacagcggaacuucuacgagccccagaucaucaccaccgacaacaccuucgugucuggcaacugcgacguugugaucggcauugugaacaauaccguguacgacccucugcagcccgagcuggacagcuucaaagaggaacuggacaaguacuuuaagaaccacacaagccccgacguggaccugggcgauaucagcggaaucaaugccagcgucgugaacauccagaaagagaucgaccggcugaacgagguggccaagaaucugaacgagagccugaucgaccugcaagaacuggggaaguacgagcaguacaucaaguggcccugguacaucuggcugggcuuuaucgccggacugauugccaucgugauggucacaaucaugcuguguugcaugaccagcugcuguagcugccugaagggcuguuguagcuguggcagcugcugcaaguucgacgaggacgauucugagcccgugcugaagggcgugaaacugcacuacaccugaggacuagucccuguucccagagcccacuuuuuuuucuuuuuuugaaauaaaauagccugucuuucagaucucaaaggcucuuuucagagccaccaaaaaaaaaaaaaaaaaaaaaaaaaaaaaaaaaaaaaaaaaaaaaaaaaaaaaaaaaaaaaaaaaaaaaaaaaaaaaaaaaaaaaaaaaaaaaaaaaaaaa

SEQ ID NO: 23718 - RNA, 4191 nt, Artificial Sequence
  SARS-CoV-2/Wuhan/WIV05/2019__EPI_ISL_402128 spike protein mRNA gc mod (1-1273)(S13I_W152C_L452R_D614G)
aggagagggcgcuuggcuugcaaggacccugagcugcggcauugaagcacacccaacccaacucgacugaagucagccucacugaaccggaucugagaaucuucucucucugggcuugccagggcucuccgaaccuagcuagcauccucuucaauuccaacuagaaagcuuaccauguucguguuucuggugcugcugccccugguguccauccagugugugaaccugaccaccagaacacagcugccuccagccuacaccaacagcuucaccagaggcguguacuaccccgacaagguguucagauccagcgugcugcacucuacccaggaccuguuccugccuuucuucagcaacgugaccugguuccacgccauccacguguccggcaccaauggcaccaagagauucgacaaccccgugcugcccuucaacgacgggguguacuuugccagcaccgagaaguccaacaucaucagaggcuggaucuucggcaccacacuggacagcaagacccagagccugcugaucgugaacaacgccaccaacguggucaucaaagugugcgaguuccaguucugcaacgaccccuuccugggcgucuacuaccacaagaacaacaagagcugcauggaaagcgaguuccggguguacagcagcgccaacaacugcaccuucgaguacgugucccagccuuuccugauggaccuggaaggcaagcagggcaacuucaagaaccugcgcgaguucguguucaagaacaucgacggcuacuucaaaaucuacagcaagcacaccccuaucaaccucgugcgggaucugccucagggcuucucugcucuggaaccccugguggaucugcccaucggcaucaacaucacccgguuucagacacugcuggcccugcacagaagcuaccugacaccuggcgauagcagcagcggauggacagcuggugccgccgcuuacuaugugggcuaccugcagccuagaaccuuccugcugaaguacaacgagaacggcaccaucaccgacgccguggauugugcucuggauccucugagcgagacaaagugcacccugaaguccuucaccguggaaaagggcaucuaccagaccagcaacuuccgggugcagcccaccgaauccaucgugcgguuccccaauaucaccaaucugugccccuucggcgagguguucaaugccaccagauucgccucuguguacgccuggaaccggaagcggaucagcaauugcguggccgacuacuccgugcuguacaacuccgccagcuucagcaccuucaagugcuacggcguguccccuaccaagcugaacgaccugugcuucacaaacguguacgccgacagcuucgugauccggggagaugaagugcggcagauugccccuggacagacaggcaagaucgccgacuacaacuacaagcugcccgacgacuucaccggcugugugauugccuggaacagcaacaaccuggacuccaaagucggcggcaacuacaauuaccgcuaccggcuguuccggaaguccaaucugaagcccuucgagcgggacaucagcaccgaaaucuaucaggccggcagcaccccuugcaacggcguggaaggcuucaacugcuacuucccacugcaguccuacggcuuucagcccacaaauggcgugggcuaucagcccuacagagugguggugcugagcuucgaacugcugcaugcuccugccacagugugcggcccuaagaaaagcaccaaucucgugaagaacaaaugcgugaacuucaacuucaacggccugaccggcaccggcgugcugacagagagcaacaagaaguuccugccauuccagcaguuuggccgggauaucgccgauaccacagacgccguuagagauccccagacacuggaaauccuggacaucaccccaugcagcuucggcggagugucugugaucaccccuggcaccaacaccagcaaucagguggcagugcuguaccagggcgugaacuguaccgaagugcccguggccauucacgccgaucagcugacaccuacauggcggguguacuccaccggcagcaauguguuucagaccagagccggcugucugaucggagccgagcacgugaacaauagcuacgagugcgacauccccaucggcgcuggcaucugugccagcuaccagacacagacaaacagccccagacgggcuagaagcguggccagccagagcaucauugccuacacaaugucucugggcgccgagaacagcguggccuacuccaacaacucuaucgcuauccccaccaacuucaccaucagcgugaccaccgagauccugccuguguccaugaccaagaccagcguggacugcaccauguacaucugcggcgauuccaccgagugcuccaaccugcugcugcaguacggcagcuucugcacccagcugaauagagcccugacagggaucgccguggaacaggacaagaacacccaagagguguucgcccaagugaagcaaaucuacaagaccccuccuaucaaggacuucggcggcuucaauuucagccagauucugcccgauccuagcaagcccagcaagcggagcuucaucgaggaccugcuguucaacaaagugacacuggccgacgccggcuucaucaagcaguauggcgauugucugggcgacauugccgccagggaucugauuugcgcccagaaguuuaacggacugacagugcugccuccucugcugaccgaugagaugaucgcccaguacacaucugcccugcuggccggcacaaucacaagcggcuggacauuuggagcuggcgccgcucugcagauccccuuugcuaugcagauggccuaccgguucaacggcaucggagugacccagaaugugcuguacgagaaccagaagcugaucgccaaccaguucaacagcgccaucggcaagauccaggacagccugagcagcacagcaagcgcccugggaaagcugcaggacguggucaaccagaaugcccaggcacugaacacccuggucaagcagcuguccuccaacuucggcgccaucagcucugugcugaacgauauccugagcagacuggacaaggucgaggccgaggugcagaucgacagacugaucacaggcagacugcagagccuccagacauacgugacccagcagcugaucagagccgccgagauuagagccucugccaaucuggccgccaccaagaugucugagugugugcugggccagagcaagagaguggacuuuugcggcaagggcuaccaccugaugagcuucccucagucugccccucacggcgugguguuucugcacgugacauaugugcccgcucaagagaagaauuucaccaccgcuccagccaucugccacgacggcaaagcccacuuuccuagagaaggcguguucguguccaacggcacccauugguucgugacacagcggaacuucuacgagccccagaucaucaccaccgacaacaccuucgugucuggcaacugcgacguugugaucggcauugugaacaauaccguguacgacccucugcagcccgagcuggacagcuucaaagaggaacuggacaaguacuuuaagaaccacacaagccccgacguggaccugggcgauaucagcggaaucaaugccagcgucgugaacauccagaaagagaucgaccggcugaacgagguggccaagaaucugaacgagagccugaucgaccugcaagaacuggggaaguacgagcaguacaucaaguggcccugguacaucuggcugggcuuuaucgccggacugauugccaucgugauggucacaaucaugcuguguugcaugaccagcugcuguagcugccugaagggcuguuguagcuguggcagcugcugcaaguucgacgaggacgauucugagcccgugcugaagggcgugaaacugcacuacaccugaggacuagucccuguucccagagcccacuuuuuuuucuuuuuuugaaauaaaauagccugucuuucagaucucaaaggcucuuuucagagccaccaaaaaaaaaaaaaaaaaaaaaaaaaaaaaaaaaaaaaaaaaaaaaaaaaaaaaaaaaaaaaaaaaaaaaaaaaaaaaaaaaaaaaaaaaaaaaaaaaaaaa

SEQ ID NO: 23719 - RNA, 4191 nt, Artificial Sequence
  SARS-CoV-2/Wuhan/WIV05/2019__EPI_ISL_402128 spike protein mRNA gc mod (1-1273)
aggagagggcgcuuggcuugcaaggacccugagcugcggcauugaagcacacccaacccaacucgacugaagucagccucacugaaccggaucugagaaucuucucucucugggcuugccagggcucuccgaaccuagcuagcauccucuucaauuccaacuagaaagcuuaccauguucguguuccuggugcugcugccucugguguccagccagugugugaaccugaccaccagaacacagcugccuccagccuacaccaacagcuuuaccagaggcguguacuaccccgacaagguguucagauccagcgugcugcacucuacccaggaccuguuccugccuuucuucagcaacgugaccugguuccacgccauccacguguccggcaccaauggcaccaagagauucgacaaccccgugcugcccuucaacgacgggguguacuuugccagcaccgagaaguccaacaucaucagaggcuggaucuucggcaccacacuggacagcaagacccagagccugcugaucgugaacaacgccaccaacguggucaucaaagugugcgaguuccaguucugcaacgaccccuuccugggcgucuacuaccacaagaacaacaagagcuggauggaaagcgaguuccggguguacagcagcgccaacaacugcaccuucgaguacgugucccagccuuuccugauggaccuggaaggcaagcagggcaacuucaagaaccugcgcgaguucguguuuaagaacaucgacggcuacuucaagaucuacagcaagcacaccccuaucaaccucgugcgggaucugccucagggcuucucugcucuggaaccccugguggaucugcccaucggcaucaacaucacccgguuucagacacugcuggcccugcacagaagcuaccugacaccuggcgauagcagcagcggauggacagcuggugccgccgcuuacuaugugggcuaccugcagccuagaaccuuccugcugaaguacaacgagaacggcaccaucaccgacgccguggauugugcucuggauccucugagcgagacaaagugcacccugaaguccuucaccguggaaaagggcaucuaccagaccagcaacuuccgggugcagcccaccgaauccaucgugcgguuccccaauaucaccaaucugugccccuucggcgagguguucaaugccaccagauucgccucuguguacgccuggaaccggaagcggaucagcaauugcguggccgacuacuccgugcuguacaacuccgccagcuucagcaccuucaagugcuacggcguguccccuaccaagcugaacgaccugugcuucacaaacguguacgccgacagcuucgugauccggggagaugaagugcggcagauugccccuggacagacaggcaagaucgccgacuacaacuacaagcugcccgacgacuucaccggcugugugauugccuggaacagcaacaaccuggacuccaaagucggcggcaacuacaauuaccuguaccggcuguuccggaaguccaaucugaagcccuucgagcgggacaucuccaccgagaucuaucaggccggcagcaccccuuguaacggcguggaaggcuucaacugcuacuucccacugcaguccuacggcuuucagcccacaaauggcgugggcuaucagcccuacagagugguggugcugagcuucgaacugcugcaugccccugccacagugugcggcccuaagaaaagcaccaaucucgugaagaacaaaugcgugaacuucaacuucaacggccugaccggcaccggcgugcugacagagagcaacaagaaguuccugccauuccagcaguuuggccgggauaucgccgauaccacagacgccguuagagauccccagacacuggaaauccuggacaucaccccuugcagcuucggcggagugucugugaucaccccuggcaccaacaccagcaaucagguggcagugcuguaccaggacgugaacuguaccgaagugcccguggccauucacgccgaucagcugacaccuacauggcggguguacuccaccggcagcaauguguuucagaccagagccggcugucugaucggagccgagcacgugaacaauagcuacgagugcgacauccccaucggcgcuggaaucugcgccagcuaccagacacagacaaacagcccucggagagccagaagcguggccagccagagcaucauugccuacacaaugucucugggcgccgagaacagcguggccuacuccaacaacucuaucgcuauccccaccaacuucaccaucagcgugaccacagagauccugccuguguccaugaccaagaccagcguggacugcaccauguacaucugcggcgauuccaccgagugcuccaaccugcugcugcaguacggcagcuucugcacccagcugaauagagcccugacagggaucgccguggaacaggacaagaacacccaagagguguucgcccaagugaagcagaucuacaagaccccuccuaucaaggacuucggcggcuucaauuucagccagauucugcccgauccuagcaagcccagcaagcggagcuucaucgaggaccugcuguucaacaaagugacacuggccgacgccggcuucaucaagcaguauggcgauugucugggcgacauugccgccagggaucugauuugcgcccagaaguuuaacggacugacagugcugccuccucugcugaccgaugagaugaucgcccaguacacaucugcccugcuggccggcacaaucacaagcggcuggacauuuggagcaggcgccgcucugcagauccccuuugcuaugcagauggccuaccgguucaacggcaucggagugacccagaaugugcuguacgagaaccagaagcugaucgccaaccaguucaacagcgccaucggcaagauccaggacagccugagcagcacagcaagcgcccugggaaagcugcaggacguggucaaccagaaugcccaggcacugaacacccuggucaagcagcuguccuccaacuucggcgccaucagcucugugcugaacgauauccugagcagacuggacaaggucgaggccgaggugcagaucgacagacugaucacaggcagacugcagagccuccagacauacgugacccagcagcugaucagagccgccgagauuagagccucugccaaucuggccgccaccaagaugucugagugugugcugggccagagcaagagaguggacuuuugcggcaagggcuaccaccugaugagcuucccucagucugccccucacggcgugguguuucugcacgugacauaugugcccgcucaagagaagaauuucaccaccgcuccagccaucugccacgacggcaaagcccacuuuccuagagaaggcguguucguguccaacggcacccauugguucgugacacagcggaacuucuacgagccccagaucaucaccaccgacaacaccuucgugucuggcaacugcgacgucgugaucggcauugugaacaauaccguguacgacccucugcagcccgagcuggacagcuucaaagaggaacuggacaaguacuuuaagaaccacacaagccccgacguggaccugggcgauaucagcggaaucaaugccagcgucgugaacauccagaaagagaucgaccggcugaacgagguggccaagaaucugaacgagagccugaucgaccugcaagaacuggggaaguacgagcaguacaucaaguggcccugguacaucuggcugggcuuuaucgccggacugauugccaucgugauggucacaaucaugcuguguugcaugaccagcugcuguagcugccugaagggcuguuguagcuguggcagcugcugcaaguucgacgaggacgauucugagcccgugcugaagggcgugaaacugcacuacacaugaggacuagucccuguucccagagcccacuuuuuuuucuuuuuuugaaauaaaauagccugucuuucagaucucaaaggcucuuuucagagccaccaaaaaaaaaaaaaaaaaaaaaaaaaaaaaaaaaaaaaaaaaaaaaaaaaaaaaaaaaaaaaaaaaaaaaaaaaaaaaaaaaaaaaaaaaaaaaaaaaaaaa

SEQ ID NO: 23720 - RNA, 4191 nt, Artificial Sequence
  SARS-CoV-2/Wuhan/WIV05/2019__EPI_ISL_402128 spike protein mRNA gc mod (1-1273)(D614G)
aggagagggcgcuuggcuugcaaggacccugagcugcggcauugaagcacacccaacccaacucgacugaagucagccucacugaaccggaucugagaaucuucucucucugggcuugccagggcucuccgaaccuagcuagcauccucuucaauuccaacuagaaagcuuaccauguucguguuccuggugcugcugccucugguguccagccagugugugaaccugaccaccagaacacagcugccuccagccuacaccaacagcuuuaccagaggcguguacuaccccgacaagguguucagauccagcgugcugcacucuacccaggaccuguuccugccuuucuucagcaacgugaccugguuccacgccauccacguguccggcaccaauggcaccaagagauucgacaaccccgugcugcccuucaacgacgggguguacuuugccagcaccgagaaguccaacaucaucagaggcuggaucuucggcaccacacuggacagcaagacccagagccugcugaucgugaacaacgccaccaacguggucaucaaagugugcgaguuccaguucugcaacgaccccuuccugggcgucuacuaccacaagaacaacaagagcuggauggaaagcgaguuccggguguacagcagcgccaacaacugcaccuucgaguacgugucccagccuuuccugauggaccuggaaggcaagcagggcaacuucaagaaccugcgcgaguucguguuuaagaacaucgacggcuacuucaagaucuacagcaagcacaccccuaucaaccucgugcgggaucugccucagggcuucucugcucuggaaccccugguggaucugcccaucggcaucaacaucacccgguuucagacacugcuggcccugcacagaagcuaccugacaccuggcgauagcagcagcggauggacagcuggugccgccgcuuacuaugugggcuaccugcagccuagaaccuuccugcugaaguacaacgagaacggcaccaucaccgacgccguggauugugcucuggauccucugagcgagacaaagugcacccugaaguccuucaccguggaaaagggcaucuaccagaccagcaacuuccgggugcagcccaccgaauccaucgugcgguuccccaauaucaccaaucugugccccuucggcgagguguucaaugccaccagauucgccucuguguacgccuggaaccggaagcggaucagcaauugcguggccgacuacuccgugcuguacaacuccgccagcuucagcaccuucaagugcuacggcguguccccuaccaagcugaacgaccugugcuucacaaacguguacgccgacagcuucgugauccggggagaugaagugcggcagauugccccuggacagacaggcaagaucgccgacuacaacuacaagcugcccgacgacuucaccggcugugugauugccuggaacagcaacaaccuggacuccaaagucggcggcaacuacaauuaccuguaccggcuguuccggaaguccaaucugaagcccuucgagcgggacaucuccaccgagaucuaucaggccggcagcaccccuuguaacggcguggaaggcuucaacugcuacuucccacugcaguccuacggcuuucagcccacaaauggcgugggcuaucagcccuacagagugguggugcugagcuucgaacugcugcaugccccugccacagugugcggcccuaagaaaagcaccaaucucgugaagaacaaaugcgugaacuucaacuucaacggccugaccggcaccggcgugcugacagagagcaacaagaaguuccugccauuccagcaguuuggccgggauaucgccgauaccacagacgccguuagagauccccagacacuggaaauccuggacaucaccccuugcagcuucggcggagugucugugaucaccccuggcaccaacaccagcaaucagguggcagugcuguaccagggcgugaacuguaccgaagugcccguggccauucacgccgaucagcugacaccuacauggcggguguacuccaccggcagcaauguguuucagaccagagccggcugucugaucggagccgagcacgugaacaauagcuacgagugcgacauccccaucggcgcuggaaucugcgccagcuaccagacacagacaaacagcccucggagagccagaagcguggccagccagagcaucauugccuacacaaugucucugggcgccgagaacagcguggccuacuccaacaacucuaucgcuauccccaccaacuucaccaucagcgugaccacagagauccugccuguguccaugaccaagaccagcguggacugcaccauguacaucugcggcgauuccaccgagugcuccaaccugcugcugcaguacggcagcuucugcacccagcugaauagagcccugacagggaucgccguggaacaggacaagaacacccaagagguguucgcccaagugaagcagaucuacaagaccccuccuaucaaggacuucggcggcuucaauuucagccagauucugcccgauccuagcaagcccagcaagcggagcuucaucgaggaccugcuguucaacaaagugacacuggccgacgccggcuucaucaagcaguauggcgauugucugggcgacauugccgccagggaucugauuugcgcccagaaguuuaacggacugacagugcugccuccucugcugaccgaugagaugaucgcccaguacacaucugcccugcuggccggcacaaucacaagcggcuggacauuuggagcaggcgccgcucugcagauccccuuugcuaugcagauggccuaccgguucaacggcaucggagugacccagaaugugcuguacgagaaccagaagcugaucgccaaccaguucaacagcgccaucggcaagauccaggacagccugagcagcacagcaagcgcccugggaaagcugcaggacguggucaaccagaaugcccaggcacugaacacccuggucaagcagcuguccuccaacuucggcgccaucagcucugugcugaacgauauccugagcagacuggacaaggucgaggccgaggugcagaucgacagacugaucacaggcagacugcagagccuccagacauacgugacccagcagcugaucagagccgccgagauuagagccucugccaaucuggccgccaccaagaugucugagugugugcugggccagagcaagagaguggacuuuugcggcaagggcuaccaccugaugagcuucccucagucugccccucacggcgugguguuucugcacgugacauaugugcccgcucaagagaagaauuucaccaccgcuccagccaucugccacgacggcaaagcccacuuuccuagagaaggcguguucguguccaacggcacccauugguucgugacacagcggaacuucuacgagccccagaucaucaccaccgacaacaccuucgugucuggcaacugcgacgucgugaucggcauugugaacaauaccguguacgacccucugcagcccgagcuggacagcuucaaagaggaacuggacaaguacuuuaagaaccacacaagccccgacguggaccugggcgauaucagcggaaucaaugccagcgucgugaacauccagaaagagaucgaccggcugaacgagguggccaagaaucugaacgagagccugaucgaccugcaagaacuggggaaguacgagcaguacaucaaguggcccugguacaucuggcugggcuuuaucgccggacugauugccaucgugauggucacaaucaugcuguguugcaugaccagcugcuguagcugccugaagggcuguuguagcuguggcagcugcugcaaguucgacgaggacgauucugagcccgugcugaagggcgugaaacugcacuacacaugaggacuagucccuguucccagagcccacuuuuuuuucuuuuuuugaaauaaaauagccugucuuucagaucucaaaggcucuuuucagagccaccaaaaaaaaaaaaaaaaaaaaaaaaaaaaaaaaaaaaaaaaaaaaaaaaaaaaaaaaaaaaaaaaaaaaaaaaaaaaaaaaaaaaaaaaaaaaaaaaaaaaa

SEQ ID NO: 23721 - RNA, 4191 nt, Artificial Sequence
  SARS-CoV-2/Wuhan/WIV05/2019__EPI_ISL_402128 spike protein mRNA gc mod (1-1273)(A222V_D614G)
aggagagggcgcuuggcuugcaaggacccugagcugcggcauugaagcacacccaacccaacucgacugaagucagccucacugaaccggaucugagaaucuucucucucugggcuugccagggcucuccgaaccuagcuagcauccucuucaauuccaacuagaaagcuuaccauguucguguuccuggugcugcugccucugguguccagccagugugugaaccugaccaccagaacacagcugccuccagccuacaccaacagcuuuaccagaggcguguacuaccccgacaagguguucagauccagcgugcugcacucuacccaggaccuguuccugccuuucuucagcaacgugaccugguuccacgccauccacguguccggcaccaauggcaccaagagauucgacaaccccgugcugcccuucaacgacgggguguacuuugccagcaccgagaaguccaacaucaucagaggcuggaucuucggcaccacacuggacagcaagacccagagccugcugaucgugaacaacgccaccaacguggucaucaaagugugcgaguuccaguucugcaacgaccccuuccugggcgucuacuaccacaagaacaacaagagcuggauggaaagcgaguuccggguguacagcagcgccaacaacugcaccuucgaguacgugucccagccuuuccugauggaccuggaaggcaagcagggcaacuucaagaaccugcgcgaguucguguuuaagaacaucgacggcuacuucaagaucuacagcaagcacaccccuaucaaccucgugcgggaucugccucagggcuucucugugcuggaaccccugguggaucugcccaucggcaucaacaucacccgguuucagacacugcuggcccugcacagaagcuaccugacaccuggcgauagcagcagcggauggacagcuggugccgccgcuuacuaugugggcuaccugcagccuagaaccuuccugcugaaguacaacgagaacggcaccaucaccgacgccguggauugugcucuggauccucugagcgagacaaagugcacccugaaguccuucaccguggaaaagggcaucuaccagaccagcaacuuccgggugcagcccaccgaauccaucgugcgguuccccaauaucaccaaucugugccccuucggcgagguguucaaugccaccagauucgccucuguguacgccuggaaccggaagcggaucagcaauugcguggccgacuacuccgugcuguacaacuccgccagcuucagcaccuucaagugcuacggcguguccccuaccaagcugaacgaccugugcuucacaaacguguacgccgacagcuucgugauccggggagaugaagugcggcagauugccccuggacagacaggcaagaucgccgacuacaacuacaagcugcccgacgacuucaccggcugugugauugccuggaacagcaacaaccuggacuccaaagucggcggcaacuacaauuaccuguaccggcuguuccggaaguccaaucugaagcccuucgagcgggacaucuccaccgagaucuaucaggccggcagcaccccuuguaacggcguggaaggcuucaacugcuacuucccacugcaguccuacggcuuucagcccacaaauggcgugggcuaucagcccuacagagugguggugcugagcuucgaacugcugcaugccccugccacagugugcggcccuaagaaaagcaccaaucucgugaagaacaaaugcgugaacuucaacuucaacggccugaccggcaccggcgugcugacagagagcaacaagaaguuccugccauuccagcaguuuggccgggauaucgccgauaccacagacgccguuagagauccccagacacuggaaauccuggacaucaccccuugcagcuucggcggagugucugugaucaccccuggcaccaacaccagcaaucagguggcagugcuguaccagggcgugaacuguaccgaagugcccguggccauucacgccgaucagcugacaccuacauggcggguguacuccaccggcagcaauguguuucagaccagagccggcugucugaucggagccgagcacgugaacaauagcuacgagugcgacauccccaucggcgcuggaaucugcgccagcuaccagacacagacaaacagcccucggagagccagaagcguggccagccagagcaucauugccuacacaaugucucugggcgccgagaacagcguggccuacuccaacaacucuaucgcuauccccaccaacuucaccaucagcgugaccacagagauccugccuguguccaugaccaagaccagcguggacugcaccauguacaucugcggcgauuccaccgagugcuccaaccugcugcugcaguacggcagcuucugcacccagcugaauagagcccugacagggaucgccguggaacaggacaagaacacccaagagguguucgcccaagugaagcagaucuacaagaccccuccuaucaaggacuucggcggcuucaauuucagccagauucugcccgauccuagcaagcccagcaagcggagcuucaucgaggaccugcuguucaacaaagugacacuggccgacgccggcuucaucaagcaguauggcgauugucugggcgacauugccgccagggaucugauuugcgcccagaaguuuaacggacugacagugcugccuccucugcugaccgaugagaugaucgcccaguacacaucugcccugcuggccggcacaaucacaagcggcuggacauuuggagcaggcgccgcucugcagauccccuuugcuaugcagauggccuaccgguucaacggcaucggagugacccagaaugugcuguacgagaaccagaagcugaucgccaaccaguucaacagcgccaucggcaagauccaggacagccugagcagcacagcaagcgcccugggaaagcugcaggacguggucaaccagaaugcccaggcacugaacacccuggucaagcagcuguccuccaacuucggcgccaucagcucugugcugaacgauauccugagcagacuggacaaggucgaggccgaggugcagaucgacagacugaucacaggcagacugcagagccuccagacauacgugacccagcagcugaucagagccgccgagauuagagccucugccaaucuggccgccaccaagaugucugagugugugcugggccagagcaagagaguggacuuuugcggcaagggcuaccaccugaugagcuucccucagucugccccucacggcgugguguuucugcacgugacauaugugcccgcucaagagaagaauuucaccaccgcuccagccaucugccacgacggcaaagcccacuuuccuagagaaggcguguucguguccaacggcacccauugguucgugacacagcggaacuucuacgagccccagaucaucaccaccgacaacaccuucgugucuggcaacugcgacgucgugaucggcauugugaacaauaccguguacgacccucugcagcccgagcuggacagcuucaaagaggaacuggacaaguacuuuaagaaccacacaagccccgacguggaccugggcgauaucagcggaaucaaugccagcgucgugaacauccagaaagagaucgaccggcugaacgagguggccaagaaucugaacgagagccugaucgaccugcaagaacuggggaaguacgagcaguacaucaaguggcccugguacaucuggcugggcuuuaucgccggacugauugccaucgugauggucacaaucaugcuguguugcaugaccagcugcuguagcugccugaagggcuguuguagcuguggcagcugcugcaaguucgacgaggacgauucugagcccgugcugaagggcgugaaacugcacuacacaugaggacuagucccuguucccagagcccacuuuuuuuucuuuuuuugaaauaaaauagccugucuuucagaucucaaaggcucuuuucagagccaccaaaaaaaaaaaaaaaaaaaaaaaaaaaaaaaaaaaaaaaaaaaaaaaaaaaaaaaaaaaaaaaaaaaaaaaaaaaaaaaaaaaaaaaaaaaaaaaaaaaaa

SEQ ID NO: 23722 - RNA, 4191 nt, Artificial Sequence
  SARS-CoV-2/Wuhan/WIV05/2019__EPI_ISL_402128 spike protein mRNA gc mod (1-1273)(N439K_D614G)
aggagagggcgcuuggcuugcaaggacccugagcugcggcauugaagcacacccaacccaacucgacugaagucagccucacugaaccggaucugagaaucuucucucucugggcuugccagggcucuccgaaccuagcuagcauccucuucaauuccaacuagaaagcuuaccauguucguguuccuggugcugcugccucugguguccagccagugugugaaccugaccaccagaacacagcugccuccagccuacaccaacagcuuuaccagaggcguguacuaccccgacaagguguucagauccagcgugcugcacucuacccaggaccuguuccugccuuucuucagcaacgugaccugguuccacgccauccacguguccggcaccaauggcaccaagagauucgacaaccccgugcugcccuucaacgacgggguguacuuugccagcaccgagaaguccaacaucaucagaggcuggaucuucggcaccacacuggacagcaagacccagagccugcugaucgugaacaacgccaccaacguggucaucaaagugugcgaguuccaguucugcaacgaccccuuccugggcgucuacuaccacaagaacaacaagagcuggauggaaagcgaguuccggguguacagcagcgccaacaacugcaccuucgaguacgugucccagccuuuccugauggaccuggaaggcaagcagggcaacuucaagaaccugcgcgaguucguguuuaagaacaucgacggcuacuucaagaucuacagcaagcacaccccuaucaaccucgugcgggaucugccucagggcuucucugcucuggaaccccugguggaucugcccaucggcaucaacaucacccgguuucagacacugcuggcccugcacagaagcuaccugacaccuggcgauagcagcagcggauggacagcuggugccgccgcuuacuaugugggcuaccugcagccuagaaccuuccugcugaaguacaacgagaacggcaccaucaccgacgccguggauugugcucuggauccucugagcgagacaaagugcacccugaaguccuucaccguggaaaagggcaucuaccagaccagcaacuuccgggugcagcccaccgaauccaucgugcgguuccccaauaucaccaaucugugccccuucggcgagguguucaaugccaccagauucgccucuguguacgccuggaaccggaagcggaucagcaauugcguggccgacuacuccgugcuguacaacuccgccagcuucagcaccuucaagugcuacggcguguccccuaccaagcugaacgaccugugcuucacaaacguguacgccgacagcuucgugauccggggagaugaagugcggcagauugccccuggacagacaggcaagaucgccgacuacaacuacaagcugcccgacgacuucaccggcugugugauugccuggaacagcaagaaccuggacuccaaagucggcggcaacuacaauuaccuguaccggcuguuccggaaguccaaucugaagcccuucgagcgggacaucuccaccgagaucuaucaggccggcagcaccccuuguaacggcguggaaggcuucaacugcuacuucccacugcaguccuacggcuuucagcccacaaauggcgugggcuaucagcccuacagagugguggugcugagcuucgaacugcugcaugccccugccacagugugcggcccuaagaaaagcaccaaucucgugaagaacaaaugcgugaacuucaacuucaacggccugaccggcaccggcgugcugacagagagcaacaagaaguuccugccauuccagcaguuuggccgggauaucgccgauaccacagacgccguuagagauccccagacacuggaaauccuggacaucaccccuugcagcuucggcggagugucugugaucaccccuggcaccaacaccagcaaucagguggcagugcuguaccagggcgugaacuguaccgaagugcccguggccauucacgccgaucagcugacaccuacauggcggguguacuccaccggcagcaauguguuucagaccagagccggcugucugaucggagccgagcacgugaacaauagcuacgagugcgacauccccaucggcgcuggaaucugcgccagcuaccagacacagacaaacagcccucggagagccagaagcguggccagccagagcaucauugccuacacaaugucucugggcgccgagaacagcguggccuacuccaacaacucuaucgcuauccccaccaacuucaccaucagcgugaccacagagauccugccuguguccaugaccaagaccagcguggacugcaccauguacaucugcggcgauuccaccgagugcuccaaccugcugcugcaguacggcagcuucugcacccagcugaauagagcccugacagggaucgccguggaacaggacaagaacacccaagagguguucgcccaagugaagcagaucuacaagaccccuccuaucaaggacuucggcggcuucaauuucagccagauucugcccgauccuagcaagcccagcaagcggagcuucaucgaggaccugcuguucaacaaagugacacuggccgacgccggcuucaucaagcaguauggcgauugucugggcgacauugccgccagggaucugauuugcgcccagaaguuuaacggacugacagugcugccuccucugcugaccgaugagaugaucgcccaguacacaucugcccugcuggccggcacaaucacaagcggcuggacauuuggagcaggcgccgcucugcagauccccuuugcuaugcagauggccuaccgguucaacggcaucggagugacccagaaugugcuguacgagaaccagaagcugaucgccaaccaguucaacagcgccaucggcaagauccaggacagccugagcagcacagcaagcgcccugggaaagcugcaggacguggucaaccagaaugcccaggcacugaacacccuggucaagcagcuguccuccaacuucggcgccaucagcucugugcugaacgauauccugagcagacuggacaaggucgaggccgaggugcagaucgacagacugaucacaggcagacugcagagccuccagacauacgugacccagcagcugaucagagccgccgagauuagagccucugccaaucuggccgccaccaagaugucugagugugugcugggccagagcaagagaguggacuuuugcggcaagggcuaccaccugaugagcuucccucagucugccccucacggcgugguguuucugcacgugacauaugugcccgcucaagagaagaauuucaccaccgcuccagccaucugccacgacggcaaagcccacuuuccuagagaaggcguguucguguccaacggcacccauugguucgugacacagcggaacuucuacgagccccagaucaucaccaccgacaacaccuucgugucuggcaacugcgacgucgugaucggcauugugaacaauaccguguacgacccucugcagcccgagcuggacagcuucaaagaggaacuggacaaguacuuuaagaaccacacaagccccgacguggaccugggcgauaucagcggaaucaaugccagcgucgugaacauccagaaagagaucgaccggcugaacgagguggccaagaaucugaacgagagccugaucgaccugcaagaacuggggaaguacgagcaguacaucaaguggcccugguacaucuggcugggcuuuaucgccggacugauugccaucgugauggucacaaucaugcuguguugcaugaccagcugcuguagcugccugaagggcuguuguagcuguggcagcugcugcaaguucgacgaggacgauucugagcccgugcugaagggcgugaaacugcacuacacaugaggacuagucccuguucccagagcccacuuuuuuuucuuuuuuugaaauaaaauagccugucuuucagaucucaaaggcucuuuucagagccaccaaaaaaaaaaaaaaaaaaaaaaaaaaaaaaaaaaaaaaaaaaaaaaaaaaaaaaaaaaaaaaaaaaaaaaaaaaaaaaaaaaaaaaaaaaaaaaaaaaaaa

SEQ ID NO: 23723 - RNA, 4191 nt, Artificial Sequence
  SARS-CoV-2/Wuhan/WIV05/2019__EPI_ISL_402128 spike protein mRNA gc mod (1-1273)(S477N_D614G)
aggagagggcgcuuggcuugcaaggacccugagcugcggcauugaagcacacccaacccaacucgacugaagucagccucacugaaccggaucugagaaucuucucucucugggcuugccagggcucuccgaaccuagcuagcauccucuucaauuccaacuagaaagcuuaccauguucguguuccuggugcugcugccucugguguccagccagugugugaaccugaccaccagaacacagcugccuccagccuacaccaacagcuuuaccagaggcguguacuaccccgacaagguguucagauccagcgugcugcacucuacccaggaccuguuccugccuuucuucagcaacgugaccugguuccacgccauccacguguccggcaccaauggcaccaagagauucgacaaccccgugcugcccuucaacgacgggguguacuuugccagcaccgagaaguccaacaucaucagaggcuggaucuucggcaccacacuggacagcaagacccagagccugcugaucgugaacaacgccaccaacguggucaucaaagugugcgaguuccaguucugcaacgaccccuuccugggcgucuacuaccacaagaacaacaagagcuggauggaaagcgaguuccggguguacagcagcgccaacaacugcaccuucgaguacgugucccagccuuuccugauggaccuggaaggcaagcagggcaacuucaagaaccugcgcgaguucguguuuaagaacaucgacggcuacuucaagaucuacagcaagcacaccccuaucaaccucgugcgggaucugccucagggcuucucugcucuggaaccccugguggaucugcccaucggcaucaacaucacccgguuucagacacugcuggcccugcacagaagcuaccugacaccuggcgauagcagcagcggauggacagcuggugccgccgcuuacuaugugggcuaccugcagccuagaaccuuccugcugaaguacaacgagaacggcaccaucaccgacgccguggauugugcucuggauccucugagcgagacaaagugcacccugaaguccuucaccguggaaaagggcaucuaccagaccagcaacuuccgggugcagcccaccgaauccaucgugcgguuccccaauaucaccaaucugugccccuucggcgagguguucaaugccaccagauucgccucuguguacgccuggaaccggaagcggaucagcaauugcguggccgacuacuccgugcuguacaacuccgccagcuucagcaccuucaagugcuacggcguguccccuaccaagcugaacgaccugugcuucacaaacguguacgccgacagcuucgugauccggggagaugaagugcggcagauugccccuggacagacaggcaagaucgccgacuacaacuacaagcugcccgacgacuucaccggcugugugauugccuggaacagcaacaaccuggacuccaaagucggcggcaacuacaauuaccuguaccggcuguuccggaaguccaaucugaagcccuucgagcgggacaucuccaccgagaucuaucaggccggcaacaccccuuguaacggcguggaaggcuucaacugcuacuucccacugcaguccuacggcuuucagcccacaaauggcgugggcuaucagcccuacagagugguggugcugagcuucgaacugcugcaugccccugccacagugugcggcccuaagaaaagcaccaaucucgugaagaacaaaugcgugaacuucaacuucaacggccugaccggcaccggcgugcugacagagagcaacaagaaguuccugccauuccagcaguuuggccgggauaucgccgauaccacagacgccguuagagauccccagacacuggaaauccuggacaucaccccuugcagcuucggcggagugucugugaucaccccuggcaccaacaccagcaaucagguggcagugcuguaccagggcgugaacuguaccgaagugcccguggccauucacgccgaucagcugacaccuacauggcggguguacuccaccggcagcaauguguuucagaccagagccggcugucugaucggagccgagcacgugaacaauagcuacgagugcgacauccccaucggcgcuggaaucugcgccagcuaccagacacagacaaacagcccucggagagccagaagcguggccagccagagcaucauugccuacacaaugucucugggcgccgagaacagcguggccuacuccaacaacucuaucgcuauccccaccaacuucaccaucagcgugaccacagagauccugccuguguccaugaccaagaccagcguggacugcaccauguacaucugcggcgauuccaccgagugcuccaaccugcugcugcaguacggcagcuucugcacccagcugaauagagcccugacagggaucgccguggaacaggacaagaacacccaagagguguucgcccaagugaagcagaucuacaagaccccuccuaucaaggacuucggcggcuucaauuucagccagauucugcccgauccuagcaagcccagcaagcggagcuucaucgaggaccugcuguucaacaaagugacacuggccgacgccggcuucaucaagcaguauggcgauugucugggcgacauugccgccagggaucugauuugcgcccagaaguuuaacggacugacagugcugccuccucugcugaccgaugagaugaucgcccaguacacaucugcccugcuggccggcacaaucacaagcggcuggacauuuggagcaggcgccgcucugcagauccccuuugcuaugcagauggccuaccgguucaacggcaucggagugacccagaaugugcuguacgagaaccagaagcugaucgccaaccaguucaacagcgccaucggcaagauccaggacagccugagcagcacagcaagcgcccugggaaagcugcaggacguggucaaccagaaugcccaggcacugaacacccuggucaagcagcuguccuccaacuucggcgccaucagcucugugcugaacgauauccugagcagacuggacaaggucgaggccgaggugcagaucgacagacugaucacaggcagacugcagagccuccagacauacgugacccagcagcugaucagagccgccgagauuagagccucugccaaucuggccgccaccaagaugucugagugugugcugggccagagcaagagaguggacuuuugcggcaagggcuaccaccugaugagcuucccucagucugccccucacggcgugguguuucugcacgugacauaugugcccgcucaagagaagaauuucaccaccgcuccagccaucugccacgacggcaaagcccacuuuccuagagaaggcguguucguguccaacggcacccauugguucgugacacagcggaacuucuacgagccccagaucaucaccaccgacaacaccuucgugucuggcaacugcgacgucgugaucggcauugugaacaauaccguguacgacccucugcagcccgagcuggacagcuucaaagaggaacuggacaaguacuuuaagaaccacacaagccccgacguggaccugggcgauaucagcggaaucaaugccagcgucgugaacauccagaaagagaucgaccggcugaacgagguggccaagaaucugaacgagagccugaucgaccugcaagaacuggggaaguacgagcaguacaucaaguggcccugguacaucuggcugggcuuuaucgccggacugauugccaucgugauggucacaaucaugcuguguugcaugaccagcugcuguagcugccugaagggcuguuguagcuguggcagcugcugcaaguucgacgaggacgauucugagcccgugcugaagggcgugaaacugcacuacacaugaggacuagucccuguucccagagcccacuuuuuuuucuuuuuuugaaauaaaauagccugucuuucagaucucaaaggcucuuuucagagccaccaaaaaaaaaaaaaaaaaaaaaaaaaaaaaaaaaaaaaaaaaaaaaaaaaaaaaaaaaaaaaaaaaaaaaaaaaaaaaaaaaaaaaaaaaaaaaaaaaaaaa

SEQ ID NO: 23724 - RNA, 4191 nt, Artificial Sequence
  SARS-CoV-2/Wuhan/WIV05/2019__EPI_ISL_402128 spike protein mRNA gc mod (1-1273)(N501Y_D614G)
aggagagggcgcuuggcuugcaaggacccugagcugcggcauugaagcacacccaacccaacucgacugaagucagccucacugaaccggaucugagaaucuucucucucugggcuugccagggcucuccgaaccuagcuagcauccucuucaauuccaacuagaaagcuuaccauguucguguuccuggugcugcugccucugguguccagccagugugugaaccugaccaccagaacacagcugccuccagccuacaccaacagcuuuaccagaggcguguacuaccccgacaagguguucagauccagcgugcugcacucuacccaggaccuguuccugccuuucuucagcaacgugaccugguuccacgccauccacguguccggcaccaauggcaccaagagauucgacaaccccgugcugcccuucaacgacgggguguacuuugccagcaccgagaaguccaacaucaucagaggcuggaucuucggcaccacacuggacagcaagacccagagccugcugaucgugaacaacgccaccaacguggucaucaaagugugcgaguuccaguucugcaacgaccccuuccugggcgucuacuaccacaagaacaacaagagcuggauggaaagcgaguuccggguguacagcagcgccaacaacugcaccuucgaguacgugucccagccuuuccugauggaccuggaaggcaagcagggcaacuucaagaaccugcgcgaguucguguuuaagaacaucgacggcuacuucaagaucuacagcaagcacaccccuaucaaccucgugcgggaucugccucagggcuucucugcucuggaaccccugguggaucugcccaucggcaucaacaucacccgguuucagacacugcuggcccugcacagaagcuaccugacaccuggcgauagcagcagcggauggacagcuggugccgccgcuuacuaugugggcuaccugcagccuagaaccuuccugcugaaguacaacgagaacggcaccaucaccgacgccguggauugugcucuggauccucugagcgagacaaagugcacccugaaguccuucaccguggaaaagggcaucuaccagaccagcaacuuccgggugcagcccaccgaauccaucgugcgguuccccaauaucaccaaucugugccccuucggcgagguguucaaugccaccagauucgccucuguguacgccuggaaccggaagcggaucagcaauugcguggccgacuacuccgugcuguacaacuccgccagcuucagcaccuucaagugcuacggcguguccccuaccaagcugaacgaccugugcuucacaaacguguacgccgacagcuucgugauccggggagaugaagugcggcagauugccccuggacagacaggcaagaucgccgacuacaacuacaagcugcccgacgacuucaccggcugugugauugccuggaacagcaacaaccuggacuccaaagucggcggcaacuacaauuaccuguaccggcuguuccggaaguccaaucugaagcccuucgagcgggacaucuccaccgagaucuaucaggccggcagcaccccuuguaacggcguggaaggcuucaacugcuacuucccacugcaguccuacggcuuucagcccacauacggcgugggcuaucagcccuacagagugguggugcugagcuucgaacugcugcaugccccugccacagugugcggcccuaagaaaagcaccaaucucgugaagaacaaaugcgugaacuucaacuucaacggccugaccggcaccggcgugcugacagagagcaacaagaaguuccugccauuccagcaguuuggccgggauaucgccgauaccacagacgccguuagagauccccagacacuggaaauccuggacaucaccccuugcagcuucggcggagugucugugaucaccccuggcaccaacaccagcaaucagguggcagugcuguaccagggcgugaacuguaccgaagugcccguggccauucacgccgaucagcugacaccuacauggcggguguacuccaccggcagcaauguguuucagaccagagccggcugucugaucggagccgagcacgugaacaauagcuacgagugcgacauccccaucggcgcuggaaucugcgccagcuaccagacacagacaaacagcccucggagagccagaagcguggccagccagagcaucauugccuacacaaugucucugggcgccgagaacagcguggccuacuccaacaacucuaucgcuauccccaccaacuucaccaucagcgugaccacagagauccugccuguguccaugaccaagaccagcguggacugcaccauguacaucugcggcgauuccaccgagugcuccaaccugcugcugcaguacggcagcuucugcacccagcugaauagagcccugacagggaucgccguggaacaggacaagaacacccaagagguguucgcccaagugaagcagaucuacaagaccccuccuaucaaggacuucggcggcuucaauuucagccagauucugcccgauccuagcaagcccagcaagcggagcuucaucgaggaccugcuguucaacaaagugacacuggccgacgccggcuucaucaagcaguauggcgauugucugggcgacauugccgccagggaucugauuugcgcccagaaguuuaacggacugacagugcugccuccucugcugaccgaugagaugaucgcccaguacacaucugcccugcuggccggcacaaucacaagcggcuggacauuuggagcaggcgccgcucugcagauccccuuugcuaugcagauggccuaccgguucaacggcaucggagugacccagaaugugcuguacgagaaccagaagcugaucgccaaccaguucaacagcgccaucggcaagauccaggacagccugagcagcacagcaagcgcccugggaaagcugcaggacguggucaaccagaaugcccaggcacugaacacccuggucaagcagcuguccuccaacuucggcgccaucagcucugugcugaacgauauccugagcagacuggacaaggucgaggccgaggugcagaucgacagacugaucacaggcagacugcagagccuccagacauacgugacccagcagcugaucagagccgccgagauuagagccucugccaaucuggccgccaccaagaugucugagugugugcugggccagagcaagagaguggacuuuugcggcaagggcuaccaccugaugagcuucccucagucugccccucacggcgugguguuucugcacgugacauaugugcccgcucaagagaagaauuucaccaccgcuccagccaucugccacgacggcaaagcccacuuuccuagagaaggcguguucguguccaacggcacccauugguucgugacacagcggaacuucuacgagccccagaucaucaccaccgacaacaccuucgugucuggcaacugcgacgucgugaucggcauugugaacaauaccguguacgacccucugcagcccgagcuggacagcuucaaagaggaacuggacaaguacuuuaagaaccacacaagccccgacguggaccugggcgauaucagcggaaucaaugccagcgucgugaacauccagaaagagaucgaccggcugaacgagguggccaagaaucugaacgagagccugaucgaccugcaagaacuggggaaguacgagcaguacaucaaguggcccugguacaucuggcugggcuuuaucgccggacugauugccaucgugauggucacaaucaugcuguguugcaugaccagcugcuguagcugccugaagggcuguuguagcuguggcagcugcugcaaguucgacgaggacgauucugagcccgugcugaagggcgugaaacugcacuacacaugaggacuagucccuguucccagagcccacuuuuuuuucuuuuuuugaaauaaaauagccugucuuucagaucucaaaggcucuuuucagagccaccaaaaaaaaaaaaaaaaaaaaaaaaaaaaaaaaaaaaaaaaaaaaaaaaaaaaaaaaaaaaaaaaaaaaaaaaaaaaaaaaaaaaaaaaaaaaaaaaaaaaa

SEQ ID NO: 23725 - RNA, 4185 nt, Artificial Sequence
  SARS-CoV-2/Wuhan/WIV05/2019__EPI_ISL_402128 spike protein mRNA gc mod (1-1273)(H69del_V70del_D614G)
aggagagggcgcuuggcuugcaaggacccugagcugcggcauugaagcacacccaacccaacucgacugaagucagccucacugaaccggaucugagaaucuucucucucugggcuugccagggcucuccgaaccuagcuagcauccucuucaauuccaacuagaaagcuuaccauguucguguuccuggugcugcugccucugguguccagccagugugugaaccugaccaccagaacacagcugccuccagccuacaccaacagcuuuaccagaggcguguacuaccccgacaagguguucagauccagcgugcugcacucuacccaggaccuguuccugccuuucuucagcaacgugaccugguuccacgccaucuccggcaccaauggcaccaagagauucgacaaccccgugcugcccuucaacgacgggguguacuuugccagcaccgagaaguccaacaucaucagaggcuggaucuucggcaccacacuggacagcaagacccagagccugcugaucgugaacaacgccaccaacguggucaucaaagugugcgaguuccaguucugcaacgaccccuuccugggcgucuacuaccacaagaacaacaagagcuggauggaaagcgaguuccggguguacagcagcgccaacaacugcaccuucgaguacgugucccagccuuuccugauggaccuggaaggcaagcagggcaacuucaagaaccugcgcgaguucguguuuaagaacaucgacggcuacuucaagaucuacagcaagcacaccccuaucaaccucgugcgggaucugccucagggcuucucugcucuggaaccccugguggaucugcccaucggcaucaacaucacccgguuucagacacugcuggcccugcacagaagcuaccugacaccuggcgauagcagcagcggauggacagcuggugccgccgcuuacuaugugggcuaccugcagccuagaaccuuccugcugaaguacaacgagaacggcaccaucaccgacgccguggauugugcucuggauccucugagcgagacaaagugcacccugaaguccuucaccguggaaaagggcaucuaccagaccagcaacuuccgggugcagcccaccgaauccaucgugcgguuccccaauaucaccaaucugugccccuucggcgagguguucaaugccaccagauucgccucuguguacgccuggaaccggaagcggaucagcaauugcguggccgacuacuccgugcuguacaacuccgccagcuucagcaccuucaagugcuacggcguguccccuaccaagcugaacgaccugugcuucacaaacguguacgccgacagcuucgugauccggggagaugaagugcggcagauugccccuggacagacaggcaagaucgccgacuacaacuacaagcugcccgacgacuucaccggcugugugauugccuggaacagcaacaaccuggacuccaaagucggcggcaacuacaauuaccuguaccggcuguuccggaaguccaaucugaagcccuucgagcgggacaucuccaccgagaucuaucaggccggcagcaccccuuguaacggcguggaaggcuucaacugcuacuucccacugcaguccuacggcuuucagcccacaaauggcgugggcuaucagcccuacagagugguggugcugagcuucgaacugcugcaugccccugccacagugugcggcccuaagaaaagcaccaaucucgugaagaacaaaugcgugaacuucaacuucaacggccugaccggcaccggcgugcugacagagagcaacaagaaguuccugccauuccagcaguuuggccgggauaucgccgauaccacagacgccguuagagauccccagacacuggaaauccuggacaucaccccuugcagcuucggcggagugucugugaucaccccuggcaccaacaccagcaaucagguggcagugcuguaccagggcgugaacuguaccgaagugcccguggccauucacgccgaucagcugacaccuacauggcggguguacuccaccggcagcaauguguuucagaccagagccggcugucugaucggagccgagcacgugaacaauagcuacgagugcgacauccccaucggcgcuggaaucugcgccagcuaccagacacagacaaacagcccucggagagccagaagcguggccagccagagcaucauugccuacacaaugucucugggcgccgagaacagcguggccuacuccaacaacucuaucgcuauccccaccaacuucaccaucagcgugaccacagagauccugccuguguccaugaccaagaccagcguggacugcaccauguacaucugcggcgauuccaccgagugcuccaaccugcugcugcaguacggcagcuucugcacccagcugaauagagcccugacagggaucgccguggaacaggacaagaacacccaagagguguucgcccaagugaagcagaucuacaagaccccuccuaucaaggacuucggcggcuucaauuucagccagauucugcccgauccuagcaagcccagcaagcggagcuucaucgaggaccugcuguucaacaaagugacacuggccgacgccggcuucaucaagcaguauggcgauugucugggcgacauugccgccagggaucugauuugcgcccagaaguuuaacggacugacagugcugccuccucugcugaccgaugagaugaucgcccaguacacaucugcccugcuggccggcacaaucacaagcggcuggacauuuggagcaggcgccgcucugcagauccccuuugcuaugcagauggccuaccgguucaacggcaucggagugacccagaaugugcuguacgagaaccagaagcugaucgccaaccaguucaacagcgccaucggcaagauccaggacagccugagcagcacagcaagcgcccugggaaagcugcaggacguggucaaccagaaugcccaggcacugaacacccuggucaagcagcuguccuccaacuucggcgccaucagcucugugcugaacgauauccugagcagacuggacaaggucgaggccgaggugcagaucgacagacugaucacaggcagacugcagagccuccagacauacgugacccagcagcugaucagagccgccgagauuagagccucugccaaucuggccgccaccaagaugucugagugugugcugggccagagcaagagaguggacuuuugcggcaagggcuaccaccugaugagcuucccucagucugccccucacggcgugguguuucugcacgugacauaugugcccgcucaagagaagaauuucaccaccgcuccagccaucugccacgacggcaaagcccacuuuccuagagaaggcguguucguguccaacggcacccauugguucgugacacagcggaacuucuacgagccccagaucaucaccaccgacaacaccuucgugucuggcaacugcgacgucgugaucggcauugugaacaauaccguguacgacccucugcagcccgagcuggacagcuucaaagaggaacuggacaaguacuuuaagaaccacacaagccccgacguggaccugggcgauaucagcggaaucaaugccagcgucgugaacauccagaaagagaucgaccggcugaacgagguggccaagaaucugaacgagagccugaucgaccugcaagaacuggggaaguacgagcaguacaucaaguggcccugguacaucuggcugggcuuuaucgccggacugauugccaucgugauggucacaaucaugcuguguugcaugaccagcugcuguagcugccugaagggcuguuguagcuguggcagcugcugcaaguucgacgaggacgauucugagcccgugcugaagggcgugaaacugcacuacacaugaggacuagucccuguucccagagcccacuuuuuuuucuuuuuuugaaauaaaauagccugucuuucagaucucaaaggcucuuuucagagccaccaaaaaaaaaaaaaaaaaaaaaaaaaaaaaaaaaaaaaaaaaaaaaaaaaaaaaaaaaaaaaaaaaaaaaaaaaaaaaaaaaaaaaaaaaaaaaaaaaaaaa

SEQ ID NO: 23726 - RNA, 4191 nt, Artificial Sequence
  SARS-CoV-2/Wuhan/WIV05/2019__EPI_ISL_402128 spike protein mRNA gc mod (1-1273)(Y453F_D614G)
aggagagggcgcuuggcuugcaaggacccugagcugcggcauugaagcacacccaacccaacucgacugaagucagccucacugaaccggaucugagaaucuucucucucugggcuugccagggcucuccgaaccuagcuagcauccucuucaauuccaacuagaaagcuuaccauguucguguuccuggugcugcugccucugguguccagccagugugugaaccugaccaccagaacacagcugccuccagccuacaccaacagcuuuaccagaggcguguacuaccccgacaagguguucagauccagcgugcugcacucuacccaggaccuguuccugccuuucuucagcaacgugaccugguuccacgccauccacguguccggcaccaauggcaccaagagauucgacaaccccgugcugcccuucaacgacgggguguacuuugccagcaccgagaaguccaacaucaucagaggcuggaucuucggcaccacacuggacagcaagacccagagccugcugaucgugaacaacgccaccaacguggucaucaaagugugcgaguuccaguucugcaacgaccccuuccugggcgucuacuaccacaagaacaacaagagcuggauggaaagcgaguuccggguguacagcagcgccaacaacugcaccuucgaguacgugucccagccuuuccugauggaccuggaaggcaagcagggcaacuucaagaaccugcgcgaguucguguuuaagaacaucgacggcuacuucaagaucuacagcaagcacaccccuaucaaccucgugcgggaucugccucagggcuucucugcucuggaaccccugguggaucugcccaucggcaucaacaucacccgguuucagacacugcuggcccugcacagaagcuaccugacaccuggcgauagcagcagcggauggacagcuggugccgccgcuuacuaugugggcuaccugcagccuagaaccuuccugcugaaguacaacgagaacggcaccaucaccgacgccguggauugugcucuggauccucugagcgagacaaagugcacccugaaguccuucaccguggaaaagggcaucuaccagaccagcaacuuccgggugcagcccaccgaauccaucgugcgguuccccaauaucaccaaucugugccccuucggcgagguguucaaugccaccagauucgccucuguguacgccuggaaccggaagcggaucagcaauugcguggccgacuacuccgugcuguacaacuccgccagcuucagcaccuucaagugcuacggcguguccccuaccaagcugaacgaccugugcuucacaaacguguacgccgacagcuucgugauccggggagaugaagugcggcagauugccccuggacagacaggcaagaucgccgacuacaacuacaagcugcccgacgacuucaccggcugugugauugccuggaacagcaacaaccuggacuccaaagucggcggcaacuacaauuaccuguuccggcuguuccggaaguccaaucugaagcccuucgagcgggacaucuccaccgagaucuaucaggccggcagcaccccuuguaacggcguggaaggcuucaacugcuacuucccacugcaguccuacggcuuucagcccacaaauggcgugggcuaucagcccuacagagugguggugcugagcuucgaacugcugcaugccccugccacagugugcggcccuaagaaaagcaccaaucucgugaagaacaaaugcgugaacuucaacuucaacggccugaccggcaccggcgugcugacagagagcaacaagaaguuccugccauuccagcaguuuggccgggauaucgccgauaccacagacgccguuagagauccccagacacuggaaauccuggacaucaccccuugcagcuucggcggagugucugugaucaccccuggcaccaacaccagcaaucagguggcagugcuguaccagggcgugaacuguaccgaagugcccguggccauucacgccgaucagcugacaccuacauggcggguguacuccaccggcagcaauguguuucagaccagagccggcugucugaucggagccgagcacgugaacaauagcuacgagugcgacauccccaucggcgcuggaaucugcgccagcuaccagacacagacaaacagcccucggagagccagaagcguggccagccagagcaucauugccuacacaaugucucugggcgccgagaacagcguggccuacuccaacaacucuaucgcuauccccaccaacuucaccaucagcgugaccacagagauccugccuguguccaugaccaagaccagcguggacugcaccauguacaucugcggcgauuccaccgagugcuccaaccugcugcugcaguacggcagcuucugcacccagcugaauagagcccugacagggaucgccguggaacaggacaagaacacccaagagguguucgcccaagugaagcagaucuacaagaccccuccuaucaaggacuucggcggcuucaauuucagccagauucugcccgauccuagcaagcccagcaagcggagcuucaucgaggaccugcuguucaacaaagugacacuggccgacgccggcuucaucaagcaguauggcgauugucugggcgacauugccgccagggaucugauuugcgcccagaaguuuaacggacugacagugcugccuccucugcugaccgaugagaugaucgcccaguacacaucugcccugcuggccggcacaaucacaagcggcuggacauuuggagcaggcgccgcucugcagauccccuuugcuaugcagauggccuaccgguucaacggcaucggagugacccagaaugugcuguacgagaaccagaagcugaucgccaaccaguucaacagcgccaucggcaagauccaggacagccugagcagcacagcaagcgcccugggaaagcugcaggacguggucaaccagaaugcccaggcacugaacacccuggucaagcagcuguccuccaacuucggcgccaucagcucugugcugaacgauauccugagcagacuggacaaggucgaggccgaggugcagaucgacagacugaucacaggcagacugcagagccuccagacauacgugacccagcagcugaucagagccgccgagauuagagccucugccaaucuggccgccaccaagaugucugagugugugcugggccagagcaagagaguggacuuuugcggcaagggcuaccaccugaugagcuucccucagucugccccucacggcgugguguuucugcacgugacauaugugcccgcucaagagaagaauuucaccaccgcuccagccaucugccacgacggcaaagcccacuuuccuagagaaggcguguucguguccaacggcacccauugguucgugacacagcggaacuucuacgagccccagaucaucaccaccgacaacaccuucgugucuggcaacugcgacgucgugaucggcauugugaacaauaccguguacgacccucugcagcccgagcuggacagcuucaaagaggaacuggacaaguacuuuaagaaccacacaagccccgacguggaccugggcgauaucagcggaaucaaugccagcgucgugaacauccagaaagagaucgaccggcugaacgagguggccaagaaucugaacgagagccugaucgaccugcaagaacuggggaaguacgagcaguacaucaaguggcccugguacaucuggcugggcuuuaucgccggacugauugccaucgugauggucacaaucaugcuguguugcaugaccagcugcuguagcugccugaagggcuguuguagcuguggcagcugcugcaaguucgacgaggacgauucugagcccgugcugaagggcgugaaacugcacuacacaugaggacuagucccuguucccagagcccacuuuuuuuucuuuuuuugaaauaaaauagccugucuuucagaucucaaaggcucuuuucagagccaccaaaaaaaaaaaaaaaaaaaaaaaaaaaaaaaaaaaaaaaaaaaaaaaaaaaaaaaaaaaaaaaaaaaaaaaaaaaaaaaaaaaaaaaaaaaaaaaaaaaaa

SEQ ID NO: 23727 - RNA, 4191 nt, Artificial Sequence
  SARS-CoV-2/Wuhan/WIV05/2019__EPI_ISL_402128 spike protein mRNA gc mod (1-1273)(D614G_I692V)
aggagagggcgcuuggcuugcaaggacccugagcugcggcauugaagcacacccaacccaacucgacugaagucagccucacugaaccggaucugagaaucuucucucucugggcuugccagggcucuccgaaccuagcuagcauccucuucaauuccaacuagaaagcuuaccauguucguguuccuggugcugcugccucugguguccagccagugugugaaccugaccaccagaacacagcugccuccagccuacaccaacagcuuuaccagaggcguguacuaccccgacaagguguucagauccagcgugcugcacucuacccaggaccuguuccugccuuucuucagcaacgugaccugguuccacgccauccacguguccggcaccaauggcaccaagagauucgacaaccccgugcugcccuucaacgacgggguguacuuugccagcaccgagaaguccaacaucaucagaggcuggaucuucggcaccacacuggacagcaagacccagagccugcugaucgugaacaacgccaccaacguggucaucaaagugugcgaguuccaguucugcaacgaccccuuccugggcgucuacuaccacaagaacaacaagagcuggauggaaagcgaguuccggguguacagcagcgccaacaacugcaccuucgaguacgugucccagccuuuccugauggaccuggaaggcaagcagggcaacuucaagaaccugcgcgaguucguguuuaagaacaucgacggcuacuucaagaucuacagcaagcacaccccuaucaaccucgugcgggaucugccucagggcuucucugcucuggaaccccugguggaucugcccaucggcaucaacaucacccgguuucagacacugcuggcccugcacagaagcuaccugacaccuggcgauagcagcagcggauggacagcuggugccgccgcuuacuaugugggcuaccugcagccuagaaccuuccugcugaaguacaacgagaacggcaccaucaccgacgccguggauugugcucuggauccucugagcgagacaaagugcacccugaaguccuucaccguggaaaagggcaucuaccagaccagcaacuuccgggugcagcccaccgaauccaucgugcgguuccccaauaucaccaaucugugccccuucggcgagguguucaaugccaccagauucgccucuguguacgccuggaaccggaagcggaucagcaauugcguggccgacuacuccgugcuguacaacuccgccagcuucagcaccuucaagugcuacggcguguccccuaccaagcugaacgaccugugcuucacaaacguguacgccgacagcuucgugauccggggagaugaagugcggcagauugccccuggacagacaggcaagaucgccgacuacaacuacaagcugcccgacgacuucaccggcugugugauugccuggaacagcaacaaccuggacuccaaagucggcggcaacuacaauuaccuguaccggcuguuccggaaguccaaucugaagcccuucgagcgggacaucuccaccgagaucuaucaggccggcagcaccccuuguaacggcguggaaggcuucaacugcuacuucccacugcaguccuacggcuuucagcccacaaauggcgugggcuaucagcccuacagagugguggugcugagcuucgaacugcugcaugccccugccacagugugcggcccuaagaaaagcaccaaucucgugaagaacaaaugcgugaacuucaacuucaacggccugaccggcaccggcgugcugacagagagcaacaagaaguuccugccauuccagcaguuuggccgggauaucgccgauaccacagacgccguuagagauccccagacacuggaaauccuggacaucaccccuugcagcuucggcggagugucugugaucaccccuggcaccaacaccagcaaucagguggcagugcuguaccagggcgugaacuguaccgaagugcccguggccauucacgccgaucagcugacaccuacauggcggguguacuccaccggcagcaauguguuucagaccagagccggcugucugaucggagccgagcacgugaacaauagcuacgagugcgacauccccaucggcgcuggaaucugcgccagcuaccagacacagacaaacagcccucggagagccagaagcguggccagccagagcgugauugccuacacaaugucucugggcgccgagaacagcguggccuacuccaacaacucuaucgcuauccccaccaacuucaccaucagcgugaccacagagauccugccuguguccaugaccaagaccagcguggacugcaccauguacaucugcggcgauuccaccgagugcuccaaccugcugcugcaguacggcagcuucugcacccagcugaauagagcccugacagggaucgccguggaacaggacaagaacacccaagagguguucgcccaagugaagcagaucuacaagaccccuccuaucaaggacuucggcggcuucaauuucagccagauucugcccgauccuagcaagcccagcaagcggagcuucaucgaggaccugcuguucaacaaagugacacuggccgacgccggcuucaucaagcaguauggcgauugucugggcgacauugccgccagggaucugauuugcgcccagaaguuuaacggacugacagugcugccuccucugcugaccgaugagaugaucgcccaguacacaucugcccugcuggccggcacaaucacaagcggcuggacauuuggagcaggcgccgcucugcagauccccuuugcuaugcagauggccuaccgguucaacggcaucggagugacccagaaugugcuguacgagaaccagaagcugaucgccaaccaguucaacagcgccaucggcaagauccaggacagccugagcagcacagcaagcgcccugggaaagcugcaggacguggucaaccagaaugcccaggcacugaacacccuggucaagcagcuguccuccaacuucggcgccaucagcucugugcugaacgauauccugagcagacuggacaaggucgaggccgaggugcagaucgacagacugaucacaggcagacugcagagccuccagacauacgugacccagcagcugaucagagccgccgagauuagagccucugccaaucuggccgccaccaagaugucugagugugugcugggccagagcaagagaguggacuuuugcggcaagggcuaccaccugaugagcuucccucagucugccccucacggcgugguguuucugcacgugacauaugugcccgcucaagagaagaauuucaccaccgcuccagccaucugccacgacggcaaagcccacuuuccuagagaaggcguguucguguccaacggcacccauugguucgugacacagcggaacuucuacgagccccagaucaucaccaccgacaacaccuucgugucuggcaacugcgacgucgugaucggcauugugaacaauaccguguacgacccucugcagcccgagcuggacagcuucaaagaggaacuggacaaguacuuuaagaaccacacaagccccgacguggaccugggcgauaucagcggaaucaaugccagcgucgugaacauccagaaagagaucgaccggcugaacgagguggccaagaaucugaacgagagccugaucgaccugcaagaacuggggaaguacgagcaguacaucaaguggcccugguacaucuggcugggcuuuaucgccggacugauugccaucgugauggucacaaucaugcuguguugcaugaccagcugcuguagcugccugaagggcuguuguagcuguggcagcugcugcaaguucgacgaggacgauucugagcccgugcugaagggcgugaaacugcacuacacaugaggacuagucccuguucccagagcccacuuuuuuuucuuuuuuugaaauaaaauagccugucuuucagaucucaaaggcucuuuucagagccaccaaaaaaaaaaaaaaaaaaaaaaaaaaaaaaaaaaaaaaaaaaaaaaaaaaaaaaaaaaaaaaaaaaaaaaaaaaaaaaaaaaaaaaaaaaaaaaaaaaaaa

SEQ ID NO: 23728 - RNA, 4191 nt, Artificial Sequence
  SARS-CoV-2/Wuhan/WIV05/2019__EPI_ISL_402128 spike protein mRNA gc mod (1-1273)(D614G_M1229I)
aggagagggcgcuuggcuugcaaggacccugagcugcggcauugaagcacacccaacccaacucgacugaagucagccucacugaaccggaucugagaaucuucucucucugggcuugccagggcucuccgaaccuagcuagcauccucuucaauuccaacuagaaagcuuaccauguucguguuccuggugcugcugccucugguguccagccagugugugaaccugaccaccagaacacagcugccuccagccuacaccaacagcuuuaccagaggcguguacuaccccgacaagguguucagauccagcgugcugcacucuacccaggaccuguuccugccuuucuucagcaacgugaccugguuccacgccauccacguguccggcaccaauggcaccaagagauucgacaaccccgugcugcccuucaacgacgggguguacuuugccagcaccgagaaguccaacaucaucagaggcuggaucuucggcaccacacuggacagcaagacccagagccugcugaucgugaacaacgccaccaacguggucaucaaagugugcgaguuccaguucugcaacgaccccuuccugggcgucuacuaccacaagaacaacaagagcuggauggaaagcgaguuccggguguacagcagcgccaacaacugcaccuucgaguacgugucccagccuuuccugauggaccuggaaggcaagcagggcaacuucaagaaccugcgcgaguucguguuuaagaacaucgacggcuacuucaagaucuacagcaagcacaccccuaucaaccucgugcgggaucugccucagggcuucucugcucuggaaccccugguggaucugcccaucggcaucaacaucacccgguuucagacacugcuggcccugcacagaagcuaccugacaccuggcgauagcagcagcggauggacagcuggugccgccgcuuacuaugugggcuaccugcagccuagaaccuuccugcugaaguacaacgagaacggcaccaucaccgacgccguggauugugcucuggauccucugagcgagacaaagugcacccugaaguccuucaccguggaaaagggcaucuaccagaccagcaacuuccgggugcagcccaccgaauccaucgugcgguuccccaauaucaccaaucugugccccuucggcgagguguucaaugccaccagauucgccucuguguacgccuggaaccggaagcggaucagcaauugcguggccgacuacuccgugcuguacaacuccgccagcuucagcaccuucaagugcuacggcguguccccuaccaagcugaacgaccugugcuucacaaacguguacgccgacagcuucgugauccggggagaugaagugcggcagauugccccuggacagacaggcaagaucgccgacuacaacuacaagcugcccgacgacuucaccggcugugugauugccuggaacagcaacaaccuggacuccaaagucggcggcaacuacaauuaccuguaccggcuguuccggaaguccaaucugaagcccuucgagcgggacaucuccaccgagaucuaucaggccggcagcaccccuuguaacggcguggaaggcuucaacugcuacuucccacugcaguccuacggcuuucagcccacaaauggcgugggcuaucagcccuacagagugguggugcugagcuucgaacugcugcaugccccugccacagugugcggcccuaagaaaagcaccaaucucgugaagaacaaaugcgugaacuucaacuucaacggccugaccggcaccggcgugcugacagagagcaacaagaaguuccugccauuccagcaguuuggccgggauaucgccgauaccacagacgccguuagagauccccagacacuggaaauccuggacaucaccccuugcagcuucggcggagugucugugaucaccccuggcaccaacaccagcaaucagguggcagugcuguaccagggcgugaacuguaccgaagugcccguggccauucacgccgaucagcugacaccuacauggcggguguacuccaccggcagcaauguguuucagaccagagccggcugucugaucggagccgagcacgugaacaauagcuacgagugcgacauccccaucggcgcuggaaucugcgccagcuaccagacacagacaaacagcccucggagagccagaagcguggccagccagagcaucauugccuacacaaugucucugggcgccgagaacagcguggccuacuccaacaacucuaucgcuauccccaccaacuucaccaucagcgugaccacagagauccugccuguguccaugaccaagaccagcguggacugcaccauguacaucugcggcgauuccaccgagugcuccaaccugcugcugcaguacggcagcuucugcacccagcugaauagagcccugacagggaucgccguggaacaggacaagaacacccaagagguguucgcccaagugaagcagaucuacaagaccccuccuaucaaggacuucggcggcuucaauuucagccagauucugcccgauccuagcaagcccagcaagcggagcuucaucgaggaccugcuguucaacaaagugacacuggccgacgccggcuucaucaagcaguauggcgauugucugggcgacauugccgccagggaucugauuugcgcccagaaguuuaacggacugacagugcugccuccucugcugaccgaugagaugaucgcccaguacacaucugcccugcuggccggcacaaucacaagcggcuggacauuuggagcaggcgccgcucugcagauccccuuugcuaugcagauggccuaccgguucaacggcaucggagugacccagaaugugcuguacgagaaccagaagcugaucgccaaccaguucaacagcgccaucggcaagauccaggacagccugagcagcacagcaagcgcccugggaaagcugcaggacguggucaaccagaaugcccaggcacugaacacccuggucaagcagcuguccuccaacuucggcgccaucagcucugugcugaacgauauccugagcagacuggacaaggucgaggccgaggugcagaucgacagacugaucacaggcagacugcagagccuccagacauacgugacccagcagcugaucagagccgccgagauuagagccucugccaaucuggccgccaccaagaugucugagugugugcugggccagagcaagagaguggacuuuugcggcaagggcuaccaccugaugagcuucccucagucugccccucacggcgugguguuucugcacgugacauaugugcccgcucaagagaagaauuucaccaccgcuccagccaucugccacgacggcaaagcccacuuuccuagagaaggcguguucguguccaacggcacccauugguucgugacacagcggaacuucuacgagccccagaucaucaccaccgacaacaccuucgugucuggcaacugcgacgucgugaucggcauugugaacaauaccguguacgacccucugcagcccgagcuggacagcuucaaagaggaacuggacaaguacuuuaagaaccacacaagccccgacguggaccugggcgauaucagcggaaucaaugccagcgucgugaacauccagaaagagaucgaccggcugaacgagguggccaagaaucugaacgagagccugaucgaccugcaagaacuggggaaguacgagcaguacaucaaguggcccugguacaucuggcugggcuuuaucgccggacugauugccaucgugaucgucacaaucaugcuguguugcaugaccagcugcuguagcugccugaagggcuguuguagcuguggcagcugcugcaaguucgacgaggacgauucugagcccgugcugaagggcgugaaacugcacuacacaugaggacuagucccuguucccagagcccacuuuuuuuucuuuuuuugaaauaaaauagccugucuuucagaucucaaaggcucuuuucagagccaccaaaaaaaaaaaaaaaaaaaaaaaaaaaaaaaaaaaaaaaaaaaaaaaaaaaaaaaaaaaaaaaaaaaaaaaaaaaaaaaaaaaaaaaaaaaaaaaaaaaaa

SEQ ID NO: 23729 - RNA, 4185 nt, Artificial Sequence
  SARS-CoV-2/Wuhan/WIV05/2019__EPI_ISL_402128 spike protein mRNA gc mod (1-1273)(H69del_V70del_A222V_Y453F_S477N_D614G_I692V)
aggagagggcgcuuggcuugcaaggacccugagcugcggcauugaagcacacccaacccaacucgacugaagucagccucacugaaccggaucugagaaucuucucucucugggcuugccagggcucuccgaaccuagcuagcauccucuucaauuccaacuagaaagcuuaccauguucguguuccuggugcugcugccucugguguccagccagugugugaaccugaccaccagaacacagcugccuccagccuacaccaacagcuuuaccagaggcguguacuaccccgacaagguguucagauccagcgugcugcacucuacccaggaccuguuccugccuuucuucagcaacgugaccugguuccacgccaucuccggcaccaauggcaccaagagauucgacaaccccgugcugcccuucaacgacgggguguacuuugccagcaccgagaaguccaacaucaucagaggcuggaucuucggcaccacacuggacagcaagacccagagccugcugaucgugaacaacgccaccaacguggucaucaaagugugcgaguuccaguucugcaacgaccccuuccugggcgucuacuaccacaagaacaacaagagcuggauggaaagcgaguuccggguguacagcagcgccaacaacugcaccuucgaguacgugucccagccuuuccugauggaccuggaaggcaagcagggcaacuucaagaaccugcgcgaguucguguuuaagaacaucgacggcuacuucaagaucuacagcaagcacaccccuaucaaccucgugcgggaucugccucagggcuucucugugcuggaaccccugguggaucugcccaucggcaucaacaucacccgguuucagacacugcuggcccugcacagaagcuaccugacaccuggcgauagcagcagcggauggacagcuggugccgccgcuuacuaugugggcuaccugcagccuagaaccuuccugcugaaguacaacgagaacggcaccaucaccgacgccguggauugugcucuggauccucugagcgagacaaagugcacccugaaguccuucaccguggaaaagggcaucuaccagaccagcaacuuccgggugcagcccaccgaauccaucgugcgguuccccaauaucaccaaucugugccccuucggcgagguguucaaugccaccagauucgccucuguguacgccuggaaccggaagcggaucagcaauugcguggccgacuacuccgugcuguacaacuccgccagcuucagcaccuucaagugcuacggcguguccccuaccaagcugaacgaccugugcuucacaaacguguacgccgacagcuucgugauccggggagaugaagugcggcagauugccccuggacagacaggcaagaucgccgacuacaacuacaagcugcccgacgacuucaccggcugugugauugccuggaacagcaacaaccuggacuccaaagucggcggcaacuacaauuaccuguuccggcuguuccggaaguccaaucugaagcccuucgagcgggacaucuccaccgagaucuaucaggccggcaacaccccuuguaacggcguggaaggcuucaacugcuacuucccacugcaguccuacggcuuucagcccacaaauggcgugggcuaucagcccuacagagugguggugcugagcuucgaacugcugcaugccccugccacagugugcggcccuaagaaaagcaccaaucucgugaagaacaaaugcgugaacuucaacuucaacggccugaccggcaccggcgugcugacagagagcaacaagaaguuccugccauuccagcaguuuggccgggauaucgccgauaccacagacgccguuagagauccccagacacuggaaauccuggacaucaccccuugcagcuucggcggagugucugugaucaccccuggcaccaacaccagcaaucagguggcagugcuguaccagggcgugaacuguaccgaagugcccguggccauucacgccgaucagcugacaccuacauggcggguguacuccaccggcagcaauguguuucagaccagagccggcugucugaucggagccgagcacgugaacaauagcuacgagugcgacauccccaucggcgcuggaaucugcgccagcuaccagacacagacaaacagcccucggagagccagaagcguggccagccagagcgugauugccuacacaaugucucugggcgccgagaacagcguggccuacuccaacaacucuaucgcuauccccaccaacuucaccaucagcgugaccacagagauccugccuguguccaugaccaagaccagcguggacugcaccauguacaucugcggcgauuccaccgagugcuccaaccugcugcugcaguacggcagcuucugcacccagcugaauagagcccugacagggaucgccguggaacaggacaagaacacccaagagguguucgcccaagugaagcagaucuacaagaccccuccuaucaaggacuucggcggcuucaauuucagccagauucugcccgauccuagcaagcccagcaagcggagcuucaucgaggaccugcuguucaacaaagugacacuggccgacgccggcuucaucaagcaguauggcgauugucugggcgacauugccgccagggaucugauuugcgcccagaaguuuaacggacugacagugcugccuccucugcugaccgaugagaugaucgcccaguacacaucugcccugcuggccggcacaaucacaagcggcuggacauuuggagcaggcgccgcucugcagauccccuuugcuaugcagauggccuaccgguucaacggcaucggagugacccagaaugugcuguacgagaaccagaagcugaucgccaaccaguucaacagcgccaucggcaagauccaggacagccugagcagcacagcaagcgcccugggaaagcugcaggacguggucaaccagaaugcccaggcacugaacacccuggucaagcagcuguccuccaacuucggcgccaucagcucugugcugaacgauauccugagcagacuggacaaggucgaggccgaggugcagaucgacagacugaucacaggcagacugcagagccuccagacauacgugacccagcagcugaucagagccgccgagauuagagccucugccaaucuggccgccaccaagaugucugagugugugcugggccagagcaagagaguggacuuuugcggcaagggcuaccaccugaugagcuucccucagucugccccucacggcgugguguuucugcacgugacauaugugcccgcucaagagaagaauuucaccaccgcuccagccaucugccacgacggcaaagcccacuuuccuagagaaggcguguucguguccaacggcacccauugguucgugacacagcggaacuucuacgagccccagaucaucaccaccgacaacaccuucgugucuggcaacugcgacgucgugaucggcauugugaacaauaccguguacgacccucugcagcccgagcuggacagcuucaaagaggaacuggacaaguacuuuaagaaccacacaagccccgacguggaccugggcgauaucagcggaaucaaugccagcgucgugaacauccagaaagagaucgaccggcugaacgagguggccaagaaucugaacgagagccugaucgaccugcaagaacuggggaaguacgagcaguacaucaaguggcccugguacaucuggcugggcuuuaucgccggacugauugccaucgugauggucacaaucaugcuguguugcaugaccagcugcuguagcugccugaagggcuguuguagcuguggcagcugcugcaaguucgacgaggacgauucugagcccgugcugaagggcgugaaacugcacuacacaugaggacuagucccuguucccagagcccacuuuuuuuucuuuuuuugaaauaaaauagccugucuuucagaucucaaaggcucuuuucagagccaccaaaaaaaaaaaaaaaaaaaaaaaaaaaaaaaaaaaaaaaaaaaaaaaaaaaaaaaaaaaaaaaaaaaaaaaaaaaaaaaaaaaaaaaaaaaaaaaaaaaaa

SEQ ID NO: 23730 - RNA, 4185 nt, Artificial Sequence
  SARS-CoV-2/Wuhan/WIV05/2019__EPI_ISL_402128 spike protein mRNA gc mod (1-1273)(H69del_V70del_Y453F_D614G_I692V_M1229I)
aggagagggcgcuuggcuugcaaggacccugagcugcggcauugaagcacacccaacccaacucgacugaagucagccucacugaaccggaucugagaaucuucucucucugggcuugccagggcucuccgaaccuagcuagcauccucuucaauuccaacuagaaagcuuaccauguucguguuccuggugcugcugccucugguguccagccagugugugaaccugaccaccagaacacagcugccuccagccuacaccaacagcuuuaccagaggcguguacuaccccgacaagguguucagauccagcgugcugcacucuacccaggaccuguuccugccuuucuucagcaacgugaccugguuccacgccaucuccggcaccaauggcaccaagagauucgacaaccccgugcugcccuucaacgacgggguguacuuugccagcaccgagaaguccaacaucaucagaggcuggaucuucggcaccacacuggacagcaagacccagagccugcugaucgugaacaacgccaccaacguggucaucaaagugugcgaguuccaguucugcaacgaccccuuccugggcgucuacuaccacaagaacaacaagagcuggauggaaagcgaguuccggguguacagcagcgccaacaacugcaccuucgaguacgugucccagccuuuccugauggaccuggaaggcaagcagggcaacuucaagaaccugcgcgaguucguguuuaagaacaucgacggcuacuucaagaucuacagcaagcacaccccuaucaaccucgugcgggaucugccucagggcuucucugcucuggaaccccugguggaucugcccaucggcaucaacaucacccgguuucagacacugcuggcccugcacagaagcuaccugacaccuggcgauagcagcagcggauggacagcuggugccgccgcuuacuaugugggcuaccugcagccuagaaccuuccugcugaaguacaacgagaacggcaccaucaccgacgccguggauugugcucuggauccucugagcgagacaaagugcacccugaaguccuucaccguggaaaagggcaucuaccagaccagcaacuuccgggugcagcccaccgaauccaucgugcgguuccccaauaucaccaaucugugccccuucggcgagguguucaaugccaccagauucgccucuguguacgccuggaaccggaagcggaucagcaauugcguggccgacuacuccgugcuguacaacuccgccagcuucagcaccuucaagugcuacggcguguccccuaccaagcugaacgaccugugcuucacaaacguguacgccgacagcuucgugauccggggagaugaagugcggcagauugccccuggacagacaggcaagaucgccgacuacaacuacaagcugcccgacgacuucaccggcugugugauugccuggaacagcaacaaccuggacuccaaagucggcggcaacuacaauuaccuguuccggcuguuccggaaguccaaucugaagcccuucgagcgggacaucuccaccgagaucuaucaggccggcagcaccccuuguaacggcguggaaggcuucaacugcuacuucccacugcaguccuacggcuuucagcccacaaauggcgugggcuaucagcccuacagagugguggugcugagcuucgaacugcugcaugccccugccacagugugcggcccuaagaaaagcaccaaucucgugaagaacaaaugcgugaacuucaacuucaacggccugaccggcaccggcgugcugacagagagcaacaagaaguuccugccauuccagcaguuuggccgggauaucgccgauaccacagacgccguuagagauccccagacacuggaaauccuggacaucaccccuugcagcuucggcggagugucugugaucaccccuggcaccaacaccagcaaucagguggcagugcuguaccagggcgugaacuguaccgaagugcccguggccauucacgccgaucagcugacaccuacauggcggguguacuccaccggcagcaauguguuucagaccagagccggcugucugaucggagccgagcacgugaacaauagcuacgagugcgacauccccaucggcgcuggaaucugcgccagcuaccagacacagacaaacagcccucggagagccagaagcguggccagccagagcgugauugccuacacaaugucucugggcgccgagaacagcguggccuacuccaacaacucuaucgcuauccccaccaacuucaccaucagcgugaccacagagauccugccuguguccaugaccaagaccagcguggacugcaccauguacaucugcggcgauuccaccgagugcuccaaccugcugcugcaguacggcagcuucugcacccagcugaauagagcccugacagggaucgccguggaacaggacaagaacacccaagagguguucgcccaagugaagcagaucuacaagaccccuccuaucaaggacuucggcggcuucaauuucagccagauucugcccgauccuagcaagcccagcaagcggagcuucaucgaggaccugcuguucaacaaagugacacuggccgacgccggcuucaucaagcaguauggcgauugucugggcgacauugccgccagggaucugauuugcgcccagaaguuuaacggacugacagugcugccuccucugcugaccgaugagaugaucgcccaguacacaucugcccugcuggccggcacaaucacaagcggcuggacauuuggagcaggcgccgcucugcagauccccuuugcuaugcagauggccuaccgguucaacggcaucggagugacccagaaugugcuguacgagaaccagaagcugaucgccaaccaguucaacagcgccaucggcaagauccaggacagccugagcagcacagcaagcgcccugggaaagcugcaggacguggucaaccagaaugcccaggcacugaacacccuggucaagcagcuguccuccaacuucggcgccaucagcucugugcugaacgauauccugagcagacuggacaaggucgaggccgaggugcagaucgacagacugaucacaggcagacugcagagccuccagacauacgugacccagcagcugaucagagccgccgagauuagagccucugccaaucuggccgccaccaagaugucugagugugugcugggccagagcaagagaguggacuuuugcggcaagggcuaccaccugaugagcuucccucagucugccccucacggcgugguguuucugcacgugacauaugugcccgcucaagagaagaauuucaccaccgcuccagccaucugccacgacggcaaagcccacuuuccuagagaaggcguguucguguccaacggcacccauugguucgugacacagcggaacuucuacgagccccagaucaucaccaccgacaacaccuucgugucuggcaacugcgacgucgugaucggcauugugaacaauaccguguacgacccucugcagcccgagcuggacagcuucaaagaggaacuggacaaguacuuuaagaaccacacaagccccgacguggaccugggcgauaucagcggaaucaaugccagcgucgugaacauccagaaagagaucgaccggcugaacgagguggccaagaaucugaacgagagccugaucgaccugcaagaacuggggaaguacgagcaguacaucaaguggcccugguacaucuggcugggcuuuaucgccggacugauugccaucgugaucgucacaaucaugcuguguugcaugaccagcugcuguagcugccugaagggcuguuguagcuguggcagcugcugcaaguucgacgaggacgauucugagcccgugcugaagggcgugaaacugcacuacacaugaggacuagucccuguucccagagcccacuuuuuuuucuuuuuuugaaauaaaauagccugucuuucagaucucaaaggcucuuuucagagccaccaaaaaaaaaaaaaaaaaaaaaaaaaaaaaaaaaaaaaaaaaaaaaaaaaaaaaaaaaaaaaaaaaaaaaaaaaaaaaaaaaaaaaaaaaaaaaaaaaaaaa

SEQ ID NO: 23731 - RNA, 4182 nt, Artificial Sequence
  SARS-CoV-2/Wuhan/WIV05/2019__EPI_ISL_402128 spike protein mRNA gc mod (1-1273)(H69del_V70del_Y144del_N501Y_A570D_D614G_P681H_T716I_S982 A_D1118H)
aggagagggcgcuuggcuugcaaggacccugagcugcggcauugaagcacacccaacccaacucgacugaagucagccucacugaaccggaucugagaaucuucucucucugggcuugccagggcucuccgaaccuagcuagcauccucuucaauuccaacuagaaagcuuaccauguucguguuccuggugcugcugccucugguguccagccagugugugaaccugaccaccagaacacagcugccuccagccuacaccaacagcuuuaccagaggcguguacuaccccgacaagguguucagauccagcgugcugcacucuacccaggaccuguuccugccuuucuucagcaacgugaccugguuccacgccaucuccggcaccaauggcaccaagagauucgacaaccccgugcugcccuucaacgacgggguguacuuugccagcaccgagaaguccaacaucaucagaggcuggaucuucggcaccacacuggacagcaagacccagagccugcugaucgugaacaacgccaccaacguggucaucaaagugugcgaguuccaguucugcaacgaccccuuccugggcgucuaccacaagaacaacaagagcuggauggaaagcgaguuccggguguacagcagcgccaacaacugcaccuucgaguacgugucccagccuuuccugauggaccuggaaggcaagcagggcaacuucaagaaccugcgcgaguucguguuuaagaacaucgacggcuacuucaagaucuacagcaagcacaccccuaucaaccucgugcgggaucugccucagggcuucucugcucuggaaccccugguggaucugcccaucggcaucaacaucacccgguuucagacacugcuggcccugcacagaagcuaccugacaccuggcgauagcagcagcggauggacagcuggugccgccgcuuacuaugugggcuaccugcagccuagaaccuuccugcugaaguacaacgagaacggcaccaucaccgacgccguggauugugcucuggauccucugagcgagacaaagugcacccugaaguccuucaccguggaaaagggcaucuaccagaccagcaacuuccgggugcagcccaccgaauccaucgugcgguuccccaauaucaccaaucugugccccuucggcgagguguucaaugccaccagauucgccucuguguacgccuggaaccggaagcggaucagcaauugcguggccgacuacuccgugcuguacaacuccgccagcuucagcaccuucaagugcuacggcguguccccuaccaagcugaacgaccugugcuucacaaacguguacgccgacagcuucgugauccggggagaugaagugcggcagauugccccuggacagacaggcaagaucgccgacuacaacuacaagcugcccgacgacuucaccggcugugugauugccuggaacagcaacaaccuggacuccaaagucggcggcaacuacaauuaccuguaccggcuguuccggaaguccaaucugaagcccuucgagcgggacaucuccaccgagaucuaucaggccggcagcaccccuuguaacggcguggaaggcuucaacugcuacuucccacugcaguccuacggcuuucagcccacauacggcgugggcuaucagcccuacagagugguggugcugagcuucgaacugcugcaugccccugccacagugugcggcccuaagaaaagcaccaaucucgugaagaacaaaugcgugaacuucaacuucaacggccugaccggcaccggcgugcugacagagagcaacaagaaguuccugccauuccagcaguuuggccgggauaucgacgauaccacagacgccguuagagauccccagacacuggaaauccuggacaucaccccuugcagcuucggcggagugucugugaucaccccuggcaccaacaccagcaaucagguggcagugcuguaccagggcgugaacuguaccgaagugcccguggccauucacgccgaucagcugacaccuacauggcggguguacuccaccggcagcaauguguuucagaccagagccggcugucugaucggagccgagcacgugaacaauagcuacgagugcgacauccccaucggcgcuggaaucugcgccagcuaccagacacagacaaacagccaccggagagccagaagcguggccagccagagcaucauugccuacacaaugucucugggcgccgagaacagcguggccuacuccaacaacucuaucgcuauccccaucaacuucaccaucagcgugaccacagagauccugccuguguccaugaccaagaccagcguggacugcaccauguacaucugcggcgauuccaccgagugcuccaaccugcugcugcaguacggcagcuucugcacccagcugaauagagcccugacagggaucgccguggaacaggacaagaacacccaagagguguucgcccaagugaagcagaucuacaagaccccuccuaucaaggacuucggcggcuucaauuucagccagauucugcccgauccuagcaagcccagcaagcggagcuucaucgaggaccugcuguucaacaaagugacacuggccgacgccggcuucaucaagcaguauggcgauugucugggcgacauugccgccagggaucugauuugcgcccagaaguuuaacggacugacagugcugccuccucugcugaccgaugagaugaucgcccaguacacaucugcccugcuggccggcacaaucacaagcggcuggacauuuggagcaggcgccgcucugcagauccccuuugcuaugcagauggccuaccgguucaacggcaucggagugacccagaaugugcuguacgagaaccagaagcugaucgccaaccaguucaacagcgccaucggcaagauccaggacagccugagcagcacagcaagcgcccugggaaagcugcaggacguggucaaccagaaugcccaggcacugaacacccuggucaagcagcuguccuccaacuucggcgccaucagcucugugcugaacgauauccuggccagacuggacaaggucgaggccgaggugcagaucgacagacugaucacaggcagacugcagagccuccagacauacgugacccagcagcugaucagagccgccgagauuagagccucugccaaucuggccgccaccaagaugucugagugugugcugggccagagcaagagaguggacuuuugcggcaagggcuaccaccugaugagcuucccucagucugccccucacggcgugguguuucugcacgugacauaugugcccgcucaagagaagaauuucaccaccgcuccagccaucugccacgacggcaaagcccacuuuccuagagaaggcguguucguguccaacggcacccauugguucgugacacagcggaacuucuacgagccccagaucaucaccacccacaacaccuucgugucuggcaacugcgacgucgugaucggcauugugaacaauaccguguacgacccucugcagcccgagcuggacagcuucaaagaggaacuggacaaguacuuuaagaaccacacaagccccgacguggaccugggcgauaucagcggaaucaaugccagcgucgugaacauccagaaagagaucgaccggcugaacgagguggccaagaaucugaacgagagccugaucgaccugcaagaacuggggaaguacgagcaguacaucaaguggcccugguacaucuggcugggcuuuaucgccggacugauugccaucgugauggucacaaucaugcuguguugcaugaccagcugcuguagcugccugaagggcuguuguagcuguggcagcugcugcaaguucgacgaggacgauucugagcccgugcugaagggcgugaaacugcacuacacaugaggacuagucccuguucccagagcccacuuuuuuuucuuuuuuugaaauaaaauagccugucuuucagaucucaaaggcucuuuucagagccaccaaaaaaaaaaaaaaaaaaaaaaaaaaaaaaaaaaaaaaaaaaaaaaaaaaaaaaaaaaaaaaaaaaaaaaaaaaaaaaaaaaaaaaaaaaaaaaaaaaaaa

SEQ ID NO: 23732 - RNA, 4191 nt, Artificial Sequence
  SARS-CoV-2/Wuhan/WIV05/2019__EPI_ISL_402128 spike protein mRNA gc mod (1-1273)(K417N_E484K_N501Y_D614G)
aggagagggcgcuuggcuugcaaggacccugagcugcggcauugaagcacacccaacccaacucgacugaagucagccucacugaaccggaucugagaaucuucucucucugggcuugccagggcucuccgaaccuagcuagcauccucuucaauuccaacuagaaagcuuaccauguucguguuccuggugcugcugccucugguguccagccagugugugaaccugaccaccagaacacagcugccuccagccuacaccaacagcuuuaccagaggcguguacuaccccgacaagguguucagauccagcgugcugcacucuacccaggaccuguuccugccuuucuucagcaacgugaccugguuccacgccauccacguguccggcaccaauggcaccaagagauucgacaaccccgugcugcccuucaacgacgggguguacuuugccagcaccgagaaguccaacaucaucagaggcuggaucuucggcaccacacuggacagcaagacccagagccugcugaucgugaacaacgccaccaacguggucaucaaagugugcgaguuccaguucugcaacgaccccuuccugggcgucuacuaccacaagaacaacaagagcuggauggaaagcgaguuccggguguacagcagcgccaacaacugcaccuucgaguacgugucccagccuuuccugauggaccuggaaggcaagcagggcaacuucaagaaccugcgcgaguucguguuuaagaacaucgacggcuacuucaagaucuacagcaagcacaccccuaucaaccucgugcgggaucugccucagggcuucucugcucuggaaccccugguggaucugcccaucggcaucaacaucacccgguuucagacacugcuggcccugcacagaagcuaccugacaccuggcgauagcagcagcggauggacagcuggugccgccgcuuacuaugugggcuaccugcagccuagaaccuuccugcugaaguacaacgagaacggcaccaucaccgacgccguggauugugcucuggauccucugagcgagacaaagugcacccugaaguccuucaccguggaaaagggcaucuaccagaccagcaacuuccgggugcagcccaccgaauccaucgugcgguuccccaauaucaccaaucugugccccuucggcgagguguucaaugccaccagauucgccucuguguacgccuggaaccggaagcggaucagcaauugcguggccgacuacuccgugcuguacaacuccgccagcuucagcaccuucaagugcuacggcguguccccuaccaagcugaacgaccugugcuucacaaacguguacgccgacagcuucgugauccggggagaugaagugcggcagauugccccuggacagacaggcaacaucgccgacuacaacuacaagcugcccgacgacuucaccggcugugugauugccuggaacagcaacaaccuggacuccaaagucggcggcaacuacaauuaccuguaccggcuguuccggaaguccaaucugaagcccuucgagcgggacaucuccaccgagaucuaucaggccggcagcaccccuuguaacggcgugaagggcuucaacugcuacuucccacugcaguccuacggcuuucagcccacauacggcgugggcuaucagcccuacagagugguggugcugagcuucgaacugcugcaugccccugccacagugugcggcccuaagaaaagcaccaaucucgugaagaacaaaugcgugaacuucaacuucaacggccugaccggcaccggcgugcugacagagagcaacaagaaguuccugccauuccagcaguuuggccgggauaucgccgauaccacagacgccguuagagauccccagacacuggaaauccuggacaucaccccuugcagcuucggcggagugucugugaucaccccuggcaccaacaccagcaaucagguggcagugcuguaccagggcgugaacuguaccgaagugcccguggccauucacgccgaucagcugacaccuacauggcggguguacuccaccggcagcaauguguuucagaccagagccggcugucugaucggagccgagcacgugaacaauagcuacgagugcgacauccccaucggcgcuggaaucugcgccagcuaccagacacagacaaacagcccucggagagccagaagcguggccagccagagcaucauugccuacacaaugucucugggcgccgagaacagcguggccuacuccaacaacucuaucgcuauccccaccaacuucaccaucagcgugaccacagagauccugccuguguccaugaccaagaccagcguggacugcaccauguacaucugcggcgauuccaccgagugcuccaaccugcugcugcaguacggcagcuucugcacccagcugaauagagcccugacagggaucgccguggaacaggacaagaacacccaagagguguucgcccaagugaagcagaucuacaagaccccuccuaucaaggacuucggcggcuucaauuucagccagauucugcccgauccuagcaagcccagcaagcggagcuucaucgaggaccugcuguucaacaaagugacacuggccgacgccggcuucaucaagcaguauggcgauugucugggcgacauugccgccagggaucugauuugcgcccagaaguuuaacggacugacagugcugccuccucugcugaccgaugagaugaucgcccaguacacaucugcccugcuggccggcacaaucacaagcggcuggacauuuggagcaggcgccgcucugcagauccccuuugcuaugcagauggccuaccgguucaacggcaucggagugacccagaaugugcuguacgagaaccagaagcugaucgccaaccaguucaacagcgccaucggcaagauccaggacagccugagcagcacagcaagcgcccugggaaagcugcaggacguggucaaccagaaugcccaggcacugaacacccuggucaagcagcuguccuccaacuucggcgccaucagcucugugcugaacgauauccugagcagacuggacaaggucgaggccgaggugcagaucgacagacugaucacaggcagacugcagagccuccagacauacgugacccagcagcugaucagagccgccgagauuagagccucugccaaucuggccgccaccaagaugucugagugugugcugggccagagcaagagaguggacuuuugcggcaagggcuaccaccugaugagcuucccucagucugccccucacggcgugguguuucugcacgugacauaugugcccgcucaagagaagaauuucaccaccgcuccagccaucugccacgacggcaaagcccacuuuccuagagaaggcguguucguguccaacggcacccauugguucgugacacagcggaacuucuacgagccccagaucaucaccaccgacaacaccuucgugucuggcaacugcgacgucgugaucggcauugugaacaauaccguguacgacccucugcagcccgagcuggacagcuucaaagaggaacuggacaaguacuuuaagaaccacacaagccccgacguggaccugggcgauaucagcggaaucaaugccagcgucgugaacauccagaaagagaucgaccggcugaacgagguggccaagaaucugaacgagagccugaucgaccugcaagaacuggggaaguacgagcaguacaucaaguggcccugguacaucuggcugggcuuuaucgccggacugauugccaucgugauggucacaaucaugcuguguugcaugaccagcugcuguagcugccugaagggcuguuguagcuguggcagcugcugcaaguucgacgaggacgauucugagcccgugcugaagggcgugaaacugcacuacacaugaggacuagucccuguucccagagcccacuuuuuuuucuuuuuuugaaauaaaauagccugucuuucagaucucaaaggcucuuuucagagccaccaaaaaaaaaaaaaaaaaaaaaaaaaaaaaaaaaaaaaaaaaaaaaaaaaaaaaaaaaaaaaaaaaaaaaaaaaaaaaaaaaaaaaaaaaaaaaaaaaaaaa

SEQ ID NO: 23733 - RNA, 4182 nt, Artificial Sequence
  SARS-CoV-2/Wuhan/WIV05/2019__EPI_ISL_402128 spike protein mRNA gc mod (1-1273)(L18F_D80A_D215G_L242del_A243del_L244del_R246I_K417N_E484 K_N501Y_D614G_A701V)
aggagagggcgcuuggcuugcaaggacccugagcugcggcauugaagcacacccaacccaacucgacugaagucagccucacugaaccggaucugagaaucuucucucucugggcuugccagggcucuccgaaccuagcuagcauccucuucaauuccaacuagaaagcuuaccauguucguguuccuggugcugcugccucugguguccagccagugugugaacuucaccaccagaacacagcugccuccagccuacaccaacagcuuuaccagaggcguguacuaccccgacaagguguucagauccagcgugcugcacucuacccaggaccuguuccugccuuucuucagcaacgugaccugguuccacgccauccacguguccggcaccaauggcaccaagagauucgccaaccccgugcugcccuucaacgacgggguguacuuugccagcaccgagaaguccaacaucaucagaggcuggaucuucggcaccacacuggacagcaagacccagagccugcugaucgugaacaacgccaccaacguggucaucaaagugugcgaguuccaguucugcaacgaccccuuccugggcgucuacuaccacaagaacaacaagagcuggauggaaagcgaguuccggguguacagcagcgccaacaacugcaccuucgaguacgugucccagccuuuccugauggaccuggaaggcaagcagggcaacuucaagaaccugcgcgaguucguguuuaagaacaucgacggcuacuucaagaucuacagcaagcacaccccuaucaaccucgugcggggccugccucagggcuucucugcucuggaaccccugguggaucugcccaucggcaucaacaucacccgguuucagacacugcacaucagcuaccugacaccuggcgauagcagcagcggauggacagcuggugccgccgcuuacuaugugggcuaccugcagccuagaaccuuccugcugaaguacaacgagaacggcaccaucaccgacgccguggauugugcucuggauccucugagcgagacaaagugcacccugaaguccuucaccguggaaaagggcaucuaccagaccagcaacuuccgggugcagcccaccgaauccaucgugcgguuccccaauaucaccaaucugugccccuucggcgagguguucaaugccaccagauucgccucuguguacgccuggaaccggaagcggaucagcaauugcguggccgacuacuccgugcuguacaacuccgccagcuucagcaccuucaagugcuacggcguguccccuaccaagcugaacgaccugugcuucacaaacguguacgccgacagcuucgugauccggggagaugaagugcggcagauugccccuggacagacaggcaacaucgccgacuacaacuacaagcugcccgacgacuucaccggcugugugauugccuggaacagcaacaaccuggacuccaaagucggcggcaacuacaauuaccuguaccggcuguuccggaaguccaaucugaagcccuucgagcgggacaucuccaccgagaucuaucaggccggcagcaccccuuguaacggcgugaagggcuucaacugcuacuucccacugcaguccuacggcuuucagcccacauacggcgugggcuaucagcccuacagagugguggugcugagcuucgaacugcugcaugccccugccacagugugcggcccuaagaaaagcaccaaucucgugaagaacaaaugcgugaacuucaacuucaacggccugaccggcaccggcgugcugacagagagcaacaagaaguuccugccauuccagcaguuuggccgggauaucgccgauaccacagacgccguuagagauccccagacacuggaaauccuggacaucaccccuugcagcuucggcggagugucugugaucaccccuggcaccaacaccagcaaucagguggcagugcuguaccagggcgugaacuguaccgaagugcccguggccauucacgccgaucagcugacaccuacauggcggguguacuccaccggcagcaauguguuucagaccagagccggcugucugaucggagccgagcacgugaacaauagcuacgagugcgacauccccaucggcgcuggaaucugcgccagcuaccagacacagacaaacagcccucggagagccagaagcguggccagccagagcaucauugccuacacaaugucucugggcguggagaacagcguggccuacuccaacaacucuaucgcuauccccaccaacuucaccaucagcgugaccacagagauccugccuguguccaugaccaagaccagcguggacugcaccauguacaucugcggcgauuccaccgagugcuccaaccugcugcugcaguacggcagcuucugcacccagcugaauagagcccugacagggaucgccguggaacaggacaagaacacccaagagguguucgcccaagugaagcagaucuacaagaccccuccuaucaaggacuucggcggcuucaauuucagccagauucugcccgauccuagcaagcccagcaagcggagcuucaucgaggaccugcuguucaacaaagugacacuggccgacgccggcuucaucaagcaguauggcgauugucugggcgacauugccgccagggaucugauuugcgcccagaaguuuaacggacugacagugcugccuccucugcugaccgaugagaugaucgcccaguacacaucugcccugcuggccggcacaaucacaagcggcuggacauuuggagcaggcgccgcucugcagauccccuuugcuaugcagauggccuaccgguucaacggcaucggagugacccagaaugugcuguacgagaaccagaagcugaucgccaaccaguucaacagcgccaucggcaagauccaggacagccugagcagcacagcaagcgcccugggaaagcugcaggacguggucaaccagaaugcccaggcacugaacacccuggucaagcagcuguccuccaacuucggcgccaucagcucugugcugaacgauauccugagcagacuggacaaggucgaggccgaggugcagaucgacagacugaucacaggcagacugcagagccuccagacauacgugacccagcagcugaucagagccgccgagauuagagccucugccaaucuggccgccaccaagaugucugagugugugcugggccagagcaagagaguggacuuuugcggcaagggcuaccaccugaugagcuucccucagucugccccucacggcgugguguuucugcacgugacauaugugcccgcucaagagaagaauuucaccaccgcuccagccaucugccacgacggcaaagcccacuuuccuagagaaggcguguucguguccaacggcacccauugguucgugacacagcggaacuucuacgagccccagaucaucaccaccgacaacaccuucgugucuggcaacugcgacgucgugaucggcauugugaacaauaccguguacgacccucugcagcccgagcuggacagcuucaaagaggaacuggacaaguacuuuaagaaccacacaagccccgacguggaccugggcgauaucagcggaaucaaugccagcgucgugaacauccagaaagagaucgaccggcugaacgagguggccaagaaucugaacgagagccugaucgaccugcaagaacuggggaaguacgagcaguacaucaaguggcccugguacaucuggcugggcuuuaucgccggacugauugccaucgugauggucacaaucaugcuguguugcaugaccagcugcuguagcugccugaagggcuguuguagcuguggcagcugcugcaaguucgacgaggacgauucugagcccgugcugaagggcgugaaacugcacuacacaugaggacuagucccuguucccagagcccacuuuuuuuucuuuuuuugaaauaaaauagccugucuuucagaucucaaaggcucuuuucagagccaccaaaaaaaaaaaaaaaaaaaaaaaaaaaaaaaaaaaaaaaaaaaaaaaaaaaaaaaaaaaaaaaaaaaaaaaaaaaaaaaaaaaaaaaaaaaaaaaaaaaaa

SEQ ID NO: 23734 - RNA, 4191 nt, Artificial Sequence
  SARS-CoV-2/Wuhan/WIV05/2019__EPI_ISL_402128 spike protein mRNA gc mod (1-1273)(E484K_D614G)
aggagagggcgcuuggcuugcaaggacccugagcugcggcauugaagcacacccaacccaacucgacugaagucagccucacugaaccggaucugagaaucuucucucucugggcuugccagggcucuccgaaccuagcuagcauccucuucaauuccaacuagaaagcuuaccauguucguguuccuggugcugcugccucugguguccagccagugugugaaccugaccaccagaacacagcugccuccagccuacaccaacagcuuuaccagaggcguguacuaccccgacaagguguucagauccagcgugcugcacucuacccaggaccuguuccugccuuucuucagcaacgugaccugguuccacgccauccacguguccggcaccaauggcaccaagagauucgacaaccccgugcugcccuucaacgacgggguguacuuugccagcaccgagaaguccaacaucaucagaggcuggaucuucggcaccacacuggacagcaagacccagagccugcugaucgugaacaacgccaccaacguggucaucaaagugugcgaguuccaguucugcaacgaccccuuccugggcgucuacuaccacaagaacaacaagagcuggauggaaagcgaguuccggguguacagcagcgccaacaacugcaccuucgaguacgugucccagccuuuccugauggaccuggaaggcaagcagggcaacuucaagaaccugcgcgaguucguguuuaagaacaucgacggcuacuucaagaucuacagcaagcacaccccuaucaaccucgugcgggaucugccucagggcuucucugcucuggaaccccugguggaucugcccaucggcaucaacaucacccgguuucagacacugcuggcccugcacagaagcuaccugacaccuggcgauagcagcagcggauggacagcuggugccgccgcuuacuaugugggcuaccugcagccuagaaccuuccugcugaaguacaacgagaacggcaccaucaccgacgccguggauugugcucuggauccucugagcgagacaaagugcacccugaaguccuucaccguggaaaagggcaucuaccagaccagcaacuuccgggugcagcccaccgaauccaucgugcgguuccccaauaucaccaaucugugccccuucggcgagguguucaaugccaccagauucgccucuguguacgccuggaaccggaagcggaucagcaauugcguggccgacuacuccgugcuguacaacuccgccagcuucagcaccuucaagugcuacggcguguccccuaccaagcugaacgaccugugcuucacaaacguguacgccgacagcuucgugauccggggagaugaagugcggcagauugccccuggacagacaggcaagaucgccgacuacaacuacaagcugcccgacgacuucaccggcugugugauugccuggaacagcaacaaccuggacuccaaagucggcggcaacuacaauuaccuguaccggcuguuccggaaguccaaucugaagcccuucgagcgggacaucuccaccgagaucuaucaggccggcagcaccccuuguaacggcgugaagggcuucaacugcuacuucccacugcaguccuacggcuuucagcccacaaauggcgugggcuaucagcccuacagagugguggugcugagcuucgaacugcugcaugccccugccacagugugcggcccuaagaaaagcaccaaucucgugaagaacaaaugcgugaacuucaacuucaacggccugaccggcaccggcgugcugacagagagcaacaagaaguuccugccauuccagcaguuuggccgggauaucgccgauaccacagacgccguuagagauccccagacacuggaaauccuggacaucaccccuugcagcuucggcggagugucugugaucaccccuggcaccaacaccagcaaucagguggcagugcuguaccagggcgugaacuguaccgaagugcccguggccauucacgccgaucagcugacaccuacauggcggguguacuccaccggcagcaauguguuucagaccagagccggcugucugaucggagccgagcacgugaacaauagcuacgagugcgacauccccaucggcgcuggaaucugcgccagcuaccagacacagacaaacagcccucggagagccagaagcguggccagccagagcaucauugccuacacaaugucucugggcgccgagaacagcguggccuacuccaacaacucuaucgcuauccccaccaacuucaccaucagcgugaccacagagauccugccuguguccaugaccaagaccagcguggacugcaccauguacaucugcggcgauuccaccgagugcuccaaccugcugcugcaguacggcagcuucugcacccagcugaauagagcccugacagggaucgccguggaacaggacaagaacacccaagagguguucgcccaagugaagcagaucuacaagaccccuccuaucaaggacuucggcggcuucaauuucagccagauucugcccgauccuagcaagcccagcaagcggagcuucaucgaggaccugcuguucaacaaagugacacuggccgacgccggcuucaucaagcaguauggcgauugucugggcgacauugccgccagggaucugauuugcgcccagaaguuuaacggacugacagugcugccuccucugcugaccgaugagaugaucgcccaguacacaucugcccugcuggccggcacaaucacaagcggcuggacauuuggagcaggcgccgcucugcagauccccuuugcuaugcagauggccuaccgguucaacggcaucggagugacccagaaugugcuguacgagaaccagaagcugaucgccaaccaguucaacagcgccaucggcaagauccaggacagccugagcagcacagcaagcgcccugggaaagcugcaggacguggucaaccagaaugcccaggcacugaacacccuggucaagcagcuguccuccaacuucggcgccaucagcucugugcugaacgauauccugagcagacuggacaaggucgaggccgaggugcagaucgacagacugaucacaggcagacugcagagccuccagacauacgugacccagcagcugaucagagccgccgagauuagagccucugccaaucuggccgccaccaagaugucugagugugugcugggccagagcaagagaguggacuuuugcggcaagggcuaccaccugaugagcuucccucagucugccccucacggcgugguguuucugcacgugacauaugugcccgcucaagagaagaauuucaccaccgcuccagccaucugccacgacggcaaagcccacuuuccuagagaaggcguguucguguccaacggcacccauugguucgugacacagcggaacuucuacgagccccagaucaucaccaccgacaacaccuucgugucuggcaacugcgacgucgugaucggcauugugaacaauaccguguacgacccucugcagcccgagcuggacagcuucaaagaggaacuggacaaguacuuuaagaaccacacaagccccgacguggaccugggcgauaucagcggaaucaaugccagcgucgugaacauccagaaagagaucgaccggcugaacgagguggccaagaaucugaacgagagccugaucgaccugcaagaacuggggaaguacgagcaguacaucaaguggcccugguacaucuggcugggcuuuaucgccggacugauugccaucgugauggucacaaucaugcuguguugcaugaccagcugcuguagcugccugaagggcuguuguagcuguggcagcugcugcaaguucgacgaggacgauucugagcccgugcugaagggcgugaaacugcacuacacaugaggacuagucccuguucccagagcccacuuuuuuuucuuuuuuugaaauaaaauagccugucuuucagaucucaaaggcucuuuucagagccaccaaaaaaaaaaaaaaaaaaaaaaaaaaaaaaaaaaaaaaaaaaaaaaaaaaaaaaaaaaaaaaaaaaaaaaaaaaaaaaaaaaaaaaaaaaaaaaaaaaaaa

SEQ ID NO: 23735 - RNA, 4191 nt, Artificial Sequence
  SARS-CoV-2/Wuhan/WIV05/2019__EPI_ISL_402128 spike protein mRNA gc mod (1-1273)(L18F_T20N_P26S_D138Y_R190S_K417T_E484K_N501Y_D614G_H655Y _T1027I)
aggagagggcgcuuggcuugcaaggacccugagcugcggcauugaagcacacccaacccaacucgacugaagucagccucacugaaccggaucugagaaucuucucucucugggcuugccagggcucuccgaaccuagcuagcauccucuucaauuccaacuagaaagcuuaccauguucguguuccuggugcugcugccucugguguccagccagugugugaacuucaccaacagaacacagcugccuagcgccuacaccaacagcuuuaccagaggcguguacuaccccgacaagguguucagauccagcgugcugcacucuacccaggaccuguuccugccuuucuucagcaacgugaccugguuccacgccauccacguguccggcaccaauggcaccaagagauucgacaaccccgugcugcccuucaacgacgggguguacuuugccagcaccgagaaguccaacaucaucagaggcuggaucuucggcaccacacuggacagcaagacccagagccugcugaucgugaacaacgccaccaacguggucaucaaagugugcgaguuccaguucugcaacuaccccuuccugggcgucuacuaccacaagaacaacaagagcuggauggaaagcgaguuccggguguacagcagcgccaacaacugcaccuucgaguacgugucccagccuuuccugauggaccuggaaggcaagcagggcaacuucaagaaccugagcgaguucguguuuaagaacaucgacggcuacuucaagaucuacagcaagcacaccccuaucaaccucgugcgggaucugccucagggcuucucugcucuggaaccccugguggaucugcccaucggcaucaacaucacccgguuucagacacugcuggcccugcacagaagcuaccugacaccuggcgauagcagcagcggauggacagcuggugccgccgcuuacuaugugggcuaccugcagccuagaaccuuccugcugaaguacaacgagaacggcaccaucaccgacgccguggauugugcucuggauccucugagcgagacaaagugcacccugaaguccuucaccguggaaaagggcaucuaccagaccagcaacuuccgggugcagcccaccgaauccaucgugcgguuccccaauaucaccaaucugugccccuucggcgagguguucaaugccaccagauucgccucuguguacgccuggaaccggaagcggaucagcaauugcguggccgacuacuccgugcuguacaacuccgccagcuucagcaccuucaagugcuacggcguguccccuaccaagcugaacgaccugugcuucacaaacguguacgccgacagcuucgugauccggggagaugaagugcggcagauugccccuggacagacaggcaccaucgccgacuacaacuacaagcugcccgacgacuucaccggcugugugauugccuggaacagcaacaaccuggacuccaaagucggcggcaacuacaauuaccuguaccggcuguuccggaaguccaaucugaagcccuucgagcgggacaucuccaccgagaucuaucaggccggcagcaccccuuguaacggcgugaagggcuucaacugcuacuucccacugcaguccuacggcuuucagcccacauacggcgugggcuaucagcccuacagagugguggugcugagcuucgaacugcugcaugccccugccacagugugcggcccuaagaaaagcaccaaucucgugaagaacaaaugcgugaacuucaacuucaacggccugaccggcaccggcgugcugacagagagcaacaagaaguuccugccauuccagcaguuuggccgggauaucgccgauaccacagacgccguuagagauccccagacacuggaaauccuggacaucaccccuugcagcuucggcggagugucugugaucaccccuggcaccaacaccagcaaucagguggcagugcuguaccagggcgugaacuguaccgaagugcccguggccauucacgccgaucagcugacaccuacauggcggguguacuccaccggcagcaauguguuucagaccagagccggcugucugaucggagccgaguacgugaacaauagcuacgagugcgacauccccaucggcgcuggaaucugcgccagcuaccagacacagacaaacagcccucggagagccagaagcguggccagccagagcaucauugccuacacaaugucucugggcgccgagaacagcguggccuacuccaacaacucuaucgcuauccccaccaacuucaccaucagcgugaccacagagauccugccuguguccaugaccaagaccagcguggacugcaccauguacaucugcggcgauuccaccgagugcuccaaccugcugcugcaguacggcagcuucugcacccagcugaauagagcccugacagggaucgccguggaacaggacaagaacacccaagagguguucgcccaagugaagcagaucuacaagaccccuccuaucaaggacuucggcggcuucaauuucagccagauucugcccgauccuagcaagcccagcaagcggagcuucaucgaggaccugcuguucaacaaagugacacuggccgacgccggcuucaucaagcaguauggcgauugucugggcgacauugccgccagggaucugauuugcgcccagaaguuuaacggacugacagugcugccuccucugcugaccgaugagaugaucgcccaguacacaucugcccugcuggccggcacaaucacaagcggcuggacauuuggagcaggcgccgcucugcagauccccuuugcuaugcagauggccuaccgguucaacggcaucggagugacccagaaugugcuguacgagaaccagaagcugaucgccaaccaguucaacagcgccaucggcaagauccaggacagccugagcagcacagcaagcgcccugggaaagcugcaggacguggucaaccagaaugcccaggcacugaacacccuggucaagcagcuguccuccaacuucggcgccaucagcucugugcugaacgauauccugagcagacuggacaaggucgaggccgaggugcagaucgacagacugaucacaggcagacugcagagccuccagacauacgugacccagcagcugaucagagccgccgagauuagagccucugccaaucuggccgccaucaagaugucugagugugugcugggccagagcaagagaguggacuuuugcggcaagggcuaccaccugaugagcuucccucagucugccccucacggcgugguguuucugcacgugacauaugugcccgcucaagagaagaauuucaccaccgcuccagccaucugccacgacggcaaagcccacuuuccuagagaaggcguguucguguccaacggcacccauugguucgugacacagcggaacuucuacgagccccagaucaucaccaccgacaacaccuucgugucuggcaacugcgacgucgugaucggcauugugaacaauaccguguacgacccucugcagcccgagcuggacagcuucaaagaggaacuggacaaguacuuuaagaaccacacaagccccgacguggaccugggcgauaucagcggaaucaaugccagcgucgugaacauccagaaagagaucgaccggcugaacgagguggccaagaaucugaacgagagccugaucgaccugcaagaacuggggaaguacgagcaguacaucaaguggcccugguacaucuggcugggcuuuaucgccggacugauugccaucgugauggucacaaucaugcuguguugcaugaccagcugcuguagcugccugaagggcuguuguagcuguggcagcugcugcaaguucgacgaggacgauucugagcccgugcugaagggcgugaaacugcacuacacaugaggacuagucccuguucccagagcccacuuuuuuuucuuuuuuugaaauaaaauagccugucuuucagaucucaaaggcucuuuucagagccaccaaaaaaaaaaaaaaaaaaaaaaaaaaaaaaaaaaaaaaaaaaaaaaaaaaaaaaaaaaaaaaaaaaaaaaaaaaaaaaaaaaaaaaaaaaaaaaaaaaaaa

SEQ ID NO: 23736 - RNA, 4191 nt, Artificial Sequence
  SARS-CoV-2/Wuhan/WIV05/2019__EPI_ISL_402128 spike protein mRNA gc mod (1-1273)(S13I_W152C_L452R_D614G)
aggagagggcgcuuggcuugcaaggacccugagcugcggcauugaagcacacccaacccaacucgacugaagucagccucacugaaccggaucugagaaucuucucucucugggcuugccagggcucuccgaaccuagcuagcauccucuucaauuccaacuagaaagcuuaccauguucguguuccuggugcugcugccucugguguccauccagugugugaaccugaccaccagaacacagcugccuccagccuacaccaacagcuuuaccagaggcguguacuaccccgacaagguguucagauccagcgugcugcacucuacccaggaccuguuccugccuuucuucagcaacgugaccugguuccacgccauccacguguccggcaccaauggcaccaagagauucgacaaccccgugcugcccuucaacgacgggguguacuuugccagcaccgagaaguccaacaucaucagaggcuggaucuucggcaccacacuggacagcaagacccagagccugcugaucgugaacaacgccaccaacguggucaucaaagugugcgaguuccaguucugcaacgaccccuuccugggcgucuacuaccacaagaacaacaagagcugcauggaaagcgaguuccggguguacagcagcgccaacaacugcaccuucgaguacgugucccagccuuuccugauggaccuggaaggcaagcagggcaacuucaagaaccugcgcgaguucguguuuaagaacaucgacggcuacuucaagaucuacagcaagcacaccccuaucaaccucgugcgggaucugccucagggcuucucugcucuggaaccccugguggaucugcccaucggcaucaacaucacccgguuucagacacugcuggcccugcacagaagcuaccugacaccuggcgauagcagcagcggauggacagcuggugccgccgcuuacuaugugggcuaccugcagccuagaaccuuccugcugaaguacaacgagaacggcaccaucaccgacgccguggauugugcucuggauccucugagcgagacaaagugcacccugaaguccuucaccguggaaaagggcaucuaccagaccagcaacuuccgggugcagcccaccgaauccaucgugcgguuccccaauaucaccaaucugugccccuucggcgagguguucaaugccaccagauucgccucuguguacgccuggaaccggaagcggaucagcaauugcguggccgacuacuccgugcuguacaacuccgccagcuucagcaccuucaagugcuacggcguguccccuaccaagcugaacgaccugugcuucacaaacguguacgccgacagcuucgugauccggggagaugaagugcggcagauugccccuggacagacaggcaagaucgccgacuacaacuacaagcugcccgacgacuucaccggcugugugauugccuggaacagcaacaaccuggacuccaaagucggcggcaacuacaauuaccgcuaccggcuguuccggaaguccaaucugaagcccuucgagcgggacaucuccaccgagaucuaucaggccggcagcaccccuuguaacggcguggaaggcuucaacugcuacuucccacugcaguccuacggcuuucagcccacaaauggcgugggcuaucagcccuacagagugguggugcugagcuucgaacugcugcaugccccugccacagugugcggcccuaagaaaagcaccaaucucgugaagaacaaaugcgugaacuucaacuucaacggccugaccggcaccggcgugcugacagagagcaacaagaaguuccugccauuccagcaguuuggccgggauaucgccgauaccacagacgccguuagagauccccagacacuggaaauccuggacaucaccccuugcagcuucggcggagugucugugaucaccccuggcaccaacaccagcaaucagguggcagugcuguaccagggcgugaacuguaccgaagugcccguggccauucacgccgaucagcugacaccuacauggcggguguacuccaccggcagcaauguguuucagaccagagccggcugucugaucggagccgagcacgugaacaauagcuacgagugcgacauccccaucggcgcuggaaucugcgccagcuaccagacacagacaaacagcccucggagagccagaagcguggccagccagagcaucauugccuacacaaugucucugggcgccgagaacagcguggccuacuccaacaacucuaucgcuauccccaccaacuucaccaucagcgugaccacagagauccugccuguguccaugaccaagaccagcguggacugcaccauguacaucugcggcgauuccaccgagugcuccaaccugcugcugcaguacggcagcuucugcacccagcugaauagagcccugacagggaucgccguggaacaggacaagaacacccaagagguguucgcccaagugaagcagaucuacaagaccccuccuaucaaggacuucggcggcuucaauuucagccagauucugcccgauccuagcaagcccagcaagcggagcuucaucgaggaccugcuguucaacaaagugacacuggccgacgccggcuucaucaagcaguauggcgauugucugggcgacauugccgccagggaucugauuugcgcccagaaguuuaacggacugacagugcugccuccucugcugaccgaugagaugaucgcccaguacacaucugcccugcuggccggcacaaucacaagcggcuggacauuuggagcaggcgccgcucugcagauccccuuugcuaugcagauggccuaccgguucaacggcaucggagugacccagaaugugcuguacgagaaccagaagcugaucgccaaccaguucaacagcgccaucggcaagauccaggacagccugagcagcacagcaagcgcccugggaaagcugcaggacguggucaaccagaaugcccaggcacugaacacccuggucaagcagcuguccuccaacuucggcgccaucagcucugugcugaacgauauccugagcagacuggacaaggucgaggccgaggugcagaucgacagacugaucacaggcagacugcagagccuccagacauacgugacccagcagcugaucagagccgccgagauuagagccucugccaaucuggccgccaccaagaugucugagugugugcugggccagagcaagagaguggacuuuugcggcaagggcuaccaccugaugagcuucccucagucugccccucacggcgugguguuucugcacgugacauaugugcccgcucaagagaagaauuucaccaccgcuccagccaucugccacgacggcaaagcccacuuuccuagagaaggcguguucguguccaacggcacccauugguucgugacacagcggaacuucuacgagccccagaucaucaccaccgacaacaccuucgugucuggcaacugcgacgucgugaucggcauugugaacaauaccguguacgacccucugcagcccgagcuggacagcuucaaagaggaacuggacaaguacuuuaagaaccacacaagccccgacguggaccugggcgauaucagcggaaucaaugccagcgucgugaacauccagaaagagaucgaccggcugaacgagguggccaagaaucugaacgagagccugaucgaccugcaagaacuggggaaguacgagcaguacaucaaguggcccugguacaucuggcugggcuuuaucgccggacugauugccaucgugauggucacaaucaugcuguguugcaugaccagcugcuguagcugccugaagggcuguuguagcuguggcagcugcugcaaguucgacgaggacgauucugagcccgugcugaagggcgugaaacugcacuacacaugaggacuagucccuguucccagagcccacuuuuuuuucuuuuuuugaaauaaaauagccugucuuucagaucucaaaggcucuuuucagagccaccaaaaaaaaaaaaaaaaaaaaaaaaaaaaaaaaaaaaaaaaaaaaaaaaaaaaaaaaaaaaaaaaaaaaaaaaaaaaaaaaaaaaaaaaaaaaaaaaaaaaa

SEQ ID NO: 23737 - RNA, 4191 nt, Artificial Sequence
  SARS-CoV-2/Wuhan/WIV05/2019__EPI_ISL_402128 spike protein mRNA gc (1-1273)(K986P_V987P) R10183
aggagagggcgcuuggcuugcaaggacccugagcugcggcauugaagcacacccaacccaacucgacugaagucagccucacugaaccggaucugagaaucuucucucucugggcuugccagggcucuccgaaccuagcuagcauccucuucaauuccaacuagaaagcuuaccauguucguguuccugguccuccugccccuggugagcucccagugcgugaaccucaccacccgcacgcagcugccgcccgccuacaccaacagcuucacccggggcgucuacuaccccgacaagguguuccgcuccagcgugcugcacuccacccaggaccucuuccugcccuucuucagcaacgucacgugguuccacgccauccacguguccgggaccaacggcaccaagcgguucgacaacccggugcugcccuucaacgacggggucuacuucgcgagcaccgagaaguccaacaucauccgcggcuggaucuucgggacgacccucgacagcaagacccagucccugcugaucgugaacaacgccaccaacguggucaucaaggugugcgaguuccaguucugcaacgaccccuuccucggcguguacuaccacaagaacaacaagagcuggauggaguccgaguuccgggucuacagcuccgccaacaacugcacguucgaguacgugagccagcccuuccugauggaccuggagggcaagcaggggaacuucaagaaccuccgcgaguucguguucaagaacaucgacggcuacuucaagaucuacuccaagcacaccccgaucaaccugguccgggaccugccccagggguucagcgcccucgagccccugguggaccugcccaucggcaucaacaucacccgcuuccagacccuccuggcccugcaccgguccuaccucacgccgggggacagcagcuccggcuggaccgcgggcgccgccgccuacuacgugggguaccugcagccccgcaccuuccugcucaaguacaacgagaacggcaccaucacggacgcggucgacugcgcccuggacccccugagcgagaccaagugcacccucaaguccuucaccguggagaaggggaucuaccagacgagcaacuuccgggugcagcccaccgaguccaucguccgcuucccgaacaucaccaaccugugccccuucggcgagguguucaacgccacccgguucgccagcgucuacgccuggaaccgcaagcggaucuccaacugcguggcggacuacagcgugcuguacaacuccgccagcuucuccacguucaagugcuacggcgucagccccaccaagcucaacgaccugugcuucaccaacguguacgccgacuccuucgugauccgcggggacgagguccggcagaucgcccccggccagaccgggaagaucgccgacuacaacuacaagcugccggacgacuucacgggcugcgugaucgcguggaacagcaacaaccucgacuccaaggucgggggcaacuacaacuaccuguaccgccuguuccgcaagagcaaccucaagcccuucgagcgggacaucuccaccgagaucuaccaggccggcagcacccccugcaacgggguggagggcuucaacugcuacuucccccugcaguccuacggguuccagccgaccaacggcgugggguaccagcccuaccggguggucgugcugagcuucgagcuccugcacgcccccgccacggugugcggccccaagaaguccaccaaccuggucaagaacaagugcgugaacuucaacuucaacggccucaccgggaccggcgugcugaccgagagcaacaagaaguuccugccguuccagcaguucgggcgcgacaucgccgacacgaccgacgcgguccgcgacccccagacccuggagauccucgacaucacccccugcagcuucggcgggguguccgugaucacgccgggcaccaacaccagcaaccaggucgccgugcuguaccaggacgugaacugcaccgagguccccguggccauccacgccgaccagcugacgcccaccuggcggguguacuccaccggcagcaacgucuuccagacccgcgccgggugccucaucggcgcggagcacgugaacaacuccuacgagugcgacauccccaucggggccggcaucugcgccagcuaccagacgcagaccaacuccccgcggcgcgcccggagcguggcgucccagagcaucaucgccuacaccaugucccugggcgccgagaacagcgucgccuacuccaacaacagcaucgccauccccaccaacuucacgaucuccgugaccaccgagauccugcccgugagcaugaccaagacgagcgucgacugcaccauguacaucugcggggacuccaccgagugcagcaaccuccugcugcaguacggcuccuucugcacccagcucaaccgcgcgcugacggggaucgccguggagcaggacaagaacacccaggagguguucgcccaggucaagcagaucuacaagacgcccccgaucaaggacuucggcggguucaacuucagccagauccugcccgaccccuccaagcccagcaagcgguccuucaucgaggaccuccuguucaacaaggugacccuggccgacgccggcuucaucaagcaguacggcgacugccucggggacaucgcggcccgcgaccugaucugcgcccagaaguucaacggccugaccgugcucccgccccugcugaccgacgagaugaucgcccaguacaccagcgcccuccuggcggggaccaucacguccggcuggaccuucggggccggcgccgcccugcagauccccuucgcgaugcagauggccuaccgguucaacggcaucggggucacccagaacgugcucuacgagaaccagaagcugaucgccaaccaguucaacagcgccaucggcaagauccaggacucccugagcuccaccgccagcgcgcucgggaagcugcaggacguggucaaccagaacgcccaggcccugaacacgcucgugaagcagcuguccagcaacuucggcgccaucuccagcgugcugaacgacauccucucccgccuggacccgcccgaggccgaggugcagaucgaccggcugaucaccgggcgccuccagagccugcagaccuacgugacccagcagcugauccgggcggccgagauccgcgccagcgccaaccucgccgcgaccaagauguccgagugcguccugggccagagcaagcggguggacuucugcggcaagggguaccaccugauguccuucccccagagcgccccgcacggcguggucuuccuccacgugacguacguccccgcccaggagaagaacuucaccaccgcccccgcgaucugccacgacgggaaggcccacuucccccgcgagggcguguucguguccaacgggacccacugguucgucacgcagcggaacuucuacgagccgcagaucaucaccaccgacaacaccuucgugagcggcaacugcgacguggucaucggcaucgugaacaacacgguguacgacccccugcagcccgagcuggacuccuucaaggaggagcucgacaaguacuucaagaaccacaccagccccgacgucgaccugggggacaucuccggcaucaacgccagcguggugaacauccagaaggagaucgaccgccugaacgaggucgccaagaaccucaacgagucccugaucgaccugcaggagcucgggaaguacgagcaguacaucaaguggccgugguacaucuggcugggcuucaucgccggccugaucgcgaucgugauggugaccaucaugcucugcugcaugaccagcugcugcuccugccugaaggggugcugcagcugcggcuccugcugcaaguucgacgaggacgacagcgagcccguccugaagggggugaagcuccacuacacgugaggacuagucccuguucccagagcccacuuuuuuuucuuuuuuugaaauaaaauagccugucuuucagaucucaaaggcucuuuucagagccaccaaaaaaaaaaaaaaaaaaaaaaaaaaaaaaaaaaaaaaaaaaaaaaaaaaaaaaaaaaaaaaaaaaaaaaaaaaaaaaaaaaaaaaaaaaaaaaaaaaaaa

SEQ ID NO: 23738 - RNA, 4191 nt, Artificial Sequence
  SARS-CoV-2/Wuhan/WIV05/2019__EPI_ISL_402128 spike protein mRNA gc (1-1273)(K986P_V987P_ D614G)
aggagagggcgcuuggcuugcaaggacccugagcugcggcauugaagcacacccaacccaacucgacugaagucagccucacugaaccggaucugagaaucuucucucucugggcuugccagggcucuccgaaccuagcuagcauccucuucaauuccaacuagaaagcuuaccauguucguguuccugguccuccugccccuggugagcucccagugcgugaaccucaccacccgcacgcagcugccgcccgccuacaccaacagcuucacccggggcgucuacuaccccgacaagguguuccgcuccagcgugcugcacuccacccaggaccucuuccugcccuucuucagcaacgucacgugguuccacgccauccacguguccgggaccaacggcaccaagcgguucgacaacccggugcugcccuucaacgacggggucuacuucgcgagcaccgagaaguccaacaucauccgcggcuggaucuucgggacgacccucgacagcaagacccagucccugcugaucgugaacaacgccaccaacguggucaucaaggugugcgaguuccaguucugcaacgaccccuuccucggcguguacuaccacaagaacaacaagagcuggauggaguccgaguuccgggucuacagcuccgccaacaacugcacguucgaguacgugagccagcccuuccugauggaccuggagggcaagcaggggaacuucaagaaccuccgcgaguucguguucaagaacaucgacggcuacuucaagaucuacuccaagcacaccccgaucaaccugguccgggaccugccccagggguucagcgcccucgagccccugguggaccugcccaucggcaucaacaucacccgcuuccagacccuccuggcccugcaccgguccuaccucacgccgggggacagcagcuccggcuggaccgcgggcgccgccgccuacuacgugggguaccugcagccccgcaccuuccugcucaaguacaacgagaacggcaccaucacggacgcggucgacugcgcccuggacccccugagcgagaccaagugcacccucaaguccuucaccguggagaaggggaucuaccagacgagcaacuuccgggugcagcccaccgaguccaucguccgcuucccgaacaucaccaaccugugccccuucggcgagguguucaacgccacccgguucgccagcgucuacgccuggaaccgcaagcggaucuccaacugcguggcggacuacagcgugcuguacaacuccgccagcuucuccacguucaagugcuacggcgucagccccaccaagcucaacgaccugugcuucaccaacguguacgccgacuccuucgugauccgcggggacgagguccggcagaucgcccccggccagaccgggaagaucgccgacuacaacuacaagcugccggacgacuucacgggcugcgugaucgcguggaacagcaacaaccucgacuccaaggucgggggcaacuacaacuaccuguaccgccuguuccgcaagagcaaccucaagcccuucgagcgggacaucuccaccgagaucuaccaggccggcagcacccccugcaacgggguggagggcuucaacugcuacuucccccugcaguccuacggguuccagccgaccaacggcgugggguaccagcccuaccggguggucgugcugagcuucgagcuccugcacgcccccgccacggugugcggccccaagaaguccaccaaccuggucaagaacaagugcgugaacuucaacuucaacggccucaccgggaccggcgugcugaccgagagcaacaagaaguuccugccguuccagcaguucgggcgcgacaucgccgacacgaccgacgcgguccgcgacccccagacccuggagauccucgacaucacccccugcagcuucggcgggguguccgugaucacgccgggcaccaacaccagcaaccaggucgccgugcuguaccagggcgugaacugcaccgagguccccguggccauccacgccgaccagcugacgcccaccuggcggguguacuccaccggcagcaacgucuuccagacccgcgccgggugccucaucggcgcggagcacgugaacaacuccuacgagugcgacauccccaucggggccggcaucugcgccagcuaccagacgcagaccaacuccccgcggcgcgcccggagcguggcgucccagagcaucaucgccuacaccaugucccugggcgccgagaacagcgucgccuacuccaacaacagcaucgccauccccaccaacuucacgaucuccgugaccaccgagauccugcccgugagcaugaccaagacgagcgucgacugcaccauguacaucugcggggacuccaccgagugcagcaaccuccugcugcaguacggcuccuucugcacccagcucaaccgcgcgcugacggggaucgccguggagcaggacaagaacacccaggagguguucgcccaggucaagcagaucuacaagacgcccccgaucaaggacuucggcggguucaacuucagccagauccugcccgaccccuccaagcccagcaagcgguccuucaucgaggaccuccuguucaacaaggugacccuggccgacgccggcuucaucaagcaguacggcgacugccucggggacaucgcggcccgcgaccugaucugcgcccagaaguucaacggccugaccgugcucccgccccugcugaccgacgagaugaucgcccaguacaccagcgcccuccuggcggggaccaucacguccggcuggaccuucggggccggcgccgcccugcagauccccuucgcgaugcagauggccuaccgguucaacggcaucggggucacccagaacgugcucuacgagaaccagaagcugaucgccaaccaguucaacagcgccaucggcaagauccaggacucccugagcuccaccgccagcgcgcucgggaagcugcaggacguggucaaccagaacgcccaggcccugaacacgcucgugaagcagcuguccagcaacuucggcgccaucuccagcgugcugaacgacauccucucccgccuggacccgcccgaggccgaggugcagaucgaccggcugaucaccgggcgccuccagagccugcagaccuacgugacccagcagcugauccgggcggccgagauccgcgccagcgccaaccucgccgcgaccaagauguccgagugcguccugggccagagcaagcggguggacuucugcggcaagggguaccaccugauguccuucccccagagcgccccgcacggcguggucuuccuccacgugacguacguccccgcccaggagaagaacuucaccaccgcccccgcgaucugccacgacgggaaggcccacuucccccgcgagggcguguucguguccaacgggacccacugguucgucacgcagcggaacuucuacgagccgcagaucaucaccaccgacaacaccuucgugagcggcaacugcgacguggucaucggcaucgugaacaacacgguguacgacccccugcagcccgagcuggacuccuucaaggaggagcucgacaaguacuucaagaaccacaccagccccgacgucgaccugggggacaucuccggcaucaacgccagcguggugaacauccagaaggagaucgaccgccugaacgaggucgccaagaaccucaacgagucccugaucgaccugcaggagcucgggaaguacgagcaguacaucaaguggccgugguacaucuggcugggcuucaucgccggccugaucgcgaucgugauggugaccaucaugcucugcugcaugaccagcugcugcuccugccugaaggggugcugcagcugcggcuccugcugcaaguucgacgaggacgacagcgagcccguccugaagggggugaagcuccacuacacgugaggacuagucccuguucccagagcccacuuuuuuuucuuuuuuugaaauaaaauagccugucuuucagaucucaaaggcucuuuucagagccaccaaaaaaaaaaaaaaaaaaaaaaaaaaaaaaaaaaaaaaaaaaaaaaaaaaaaaaaaaaaaaaaaaaaaaaaaaaaaaaaaaaaaaaaaaaaaaaaaaaaaa

SEQ ID NO: 23739 - RNA, 4191 nt, Artificial Sequence
  SARS-CoV-2/Wuhan/WIV05/2019__EPI_ISL_402128 spike protein mRNA gc (1-1273)(K986P_V987P_A222V_D614G)
aggagagggcgcuuggcuugcaaggacccugagcugcggcauugaagcacacccaacccaacucgacugaagucagccucacugaaccggaucugagaaucuucucucucugggcuugccagggcucuccgaaccuagcuagcauccucuucaauuccaacuagaaagcuuaccauguucguguuccugguccuccugccccuggugagcucccagugcgugaaccucaccacccgcacgcagcugccgcccgccuacaccaacagcuucacccggggcgucuacuaccccgacaagguguuccgcuccagcgugcugcacuccacccaggaccucuuccugcccuucuucagcaacgucacgugguuccacgccauccacguguccgggaccaacggcaccaagcgguucgacaacccggugcugcccuucaacgacggggucuacuucgcgagcaccgagaaguccaacaucauccgcggcuggaucuucgggacgacccucgacagcaagacccagucccugcugaucgugaacaacgccaccaacguggucaucaaggugugcgaguuccaguucugcaacgaccccuuccucggcguguacuaccacaagaacaacaagagcuggauggaguccgaguuccgggucuacagcuccgccaacaacugcacguucgaguacgugagccagcccuuccugauggaccuggagggcaagcaggggaacuucaagaaccuccgcgaguucguguucaagaacaucgacggcuacuucaagaucuacuccaagcacaccccgaucaaccugguccgggaccugccccagggguucagcguccucgagccccugguggaccugcccaucggcaucaacaucacccgcuuccagacccuccuggcccugcaccgguccuaccucacgccgggggacagcagcuccggcuggaccgcgggcgccgccgccuacuacgugggguaccugcagccccgcaccuuccugcucaaguacaacgagaacggcaccaucacggacgcggucgacugcgcccuggacccccugagcgagaccaagugcacccucaaguccuucaccguggagaaggggaucuaccagacgagcaacuuccgggugcagcccaccgaguccaucguccgcuucccgaacaucaccaaccugugccccuucggcgagguguucaacgccacccgguucgccagcgucuacgccuggaaccgcaagcggaucuccaacugcguggcggacuacagcgugcuguacaacuccgccagcuucuccacguucaagugcuacggcgucagccccaccaagcucaacgaccugugcuucaccaacguguacgccgacuccuucgugauccgcggggacgagguccggcagaucgcccccggccagaccgggaagaucgccgacuacaacuacaagcugccggacgacuucacgggcugcgugaucgcguggaacagcaacaaccucgacuccaaggucgggggcaacuacaacuaccuguaccgccuguuccgcaagagcaaccucaagcccuucgagcgggacaucuccaccgagaucuaccaggccggcagcacccccugcaacgggguggagggcuucaacugcuacuucccccugcaguccuacggguuccagccgaccaacggcgugggguaccagcccuaccggguggucgugcugagcuucgagcuccugcacgcccccgccacggugugcggccccaagaaguccaccaaccuggucaagaacaagugcgugaacuucaacuucaacggccucaccgggaccggcgugcugaccgagagcaacaagaaguuccugccguuccagcaguucgggcgcgacaucgccgacacgaccgacgcgguccgcgacccccagacccuggagauccucgacaucacccccugcagcuucggcgggguguccgugaucacgccgggcaccaacaccagcaaccaggucgccgugcuguaccagggcgugaacugcaccgagguccccguggccauccacgccgaccagcugacgcccaccuggcggguguacuccaccggcagcaacgucuuccagacccgcgccgggugccucaucggcgcggagcacgugaacaacuccuacgagugcgacauccccaucggggccggcaucugcgccagcuaccagacgcagaccaacuccccgcggcgcgcccggagcguggcgucccagagcaucaucgccuacaccaugucccugggcgccgagaacagcgucgccuacuccaacaacagcaucgccauccccaccaacuucacgaucuccgugaccaccgagauccugcccgugagcaugaccaagacgagcgucgacugcaccauguacaucugcggggacuccaccgagugcagcaaccuccugcugcaguacggcuccuucugcacccagcucaaccgcgcgcugacggggaucgccguggagcaggacaagaacacccaggagguguucgcccaggucaagcagaucuacaagacgcccccgaucaaggacuucggcggguucaacuucagccagauccugcccgaccccuccaagcccagcaagcgguccuucaucgaggaccuccuguucaacaaggugacccuggccgacgccggcuucaucaagcaguacggcgacugccucggggacaucgcggcccgcgaccugaucugcgcccagaaguucaacggccugaccgugcucccgccccugcugaccgacgagaugaucgcccaguacaccagcgcccuccuggcggggaccaucacguccggcuggaccuucggggccggcgccgcccugcagauccccuucgcgaugcagauggccuaccgguucaacggcaucggggucacccagaacgugcucuacgagaaccagaagcugaucgccaaccaguucaacagcgccaucggcaagauccaggacucccugagcuccaccgccagcgcgcucgggaagcugcaggacguggucaaccagaacgcccaggcccugaacacgcucgugaagcagcuguccagcaacuucggcgccaucuccagcgugcugaacgacauccucucccgccuggacccgcccgaggccgaggugcagaucgaccggcugaucaccgggcgccuccagagccugcagaccuacgugacccagcagcugauccgggcggccgagauccgcgccagcgccaaccucgccgcgaccaagauguccgagugcguccugggccagagcaagcggguggacuucugcggcaagggguaccaccugauguccuucccccagagcgccccgcacggcguggucuuccuccacgugacguacguccccgcccaggagaagaacuucaccaccgcccccgcgaucugccacgacgggaaggcccacuucccccgcgagggcguguucguguccaacgggacccacugguucgucacgcagcggaacuucuacgagccgcagaucaucaccaccgacaacaccuucgugagcggcaacugcgacguggucaucggcaucgugaacaacacgguguacgacccccugcagcccgagcuggacuccuucaaggaggagcucgacaaguacuucaagaaccacaccagccccgacgucgaccugggggacaucuccggcaucaacgccagcguggugaacauccagaaggagaucgaccgccugaacgaggucgccaagaaccucaacgagucccugaucgaccugcaggagcucgggaaguacgagcaguacaucaaguggccgugguacaucuggcugggcuucaucgccggccugaucgcgaucgugauggugaccaucaugcucugcugcaugaccagcugcugcuccugccugaaggggugcugcagcugcggcuccugcugcaaguucgacgaggacgacagcgagcccguccugaagggggugaagcuccacuacacgugaggacuagucccuguucccagagcccacuuuuuuuucuuuuuuugaaauaaaauagccugucuuucagaucucaaaggcucuuuucagagccaccaaaaaaaaaaaaaaaaaaaaaaaaaaaaaaaaaaaaaaaaaaaaaaaaaaaaaaaaaaaaaaaaaaaaaaaaaaaaaaaaaaaaaaaaaaaaaaaaaaaaa

SEQ ID NO: 23740 - RNA, 4191 nt, Artificial Sequence
  SARS-CoV-2/Wuhan/WIV05/2019__EPI_ISL_402128 spike protein mRNA gc (1-1273)(K986P_V987P_N439K_D614G)
aggagagggcgcuuggcuugcaaggacccugagcugcggcauugaagcacacccaacccaacucgacugaagucagccucacugaaccggaucugagaaucuucucucucugggcuugccagggcucuccgaaccuagcuagcauccucuucaauuccaacuagaaagcuuaccauguucguguuccugguccuccugccccuggugagcucccagugcgugaaccucaccacccgcacgcagcugccgcccgccuacaccaacagcuucacccggggcgucuacuaccccgacaagguguuccgcuccagcgugcugcacuccacccaggaccucuuccugcccuucuucagcaacgucacgugguuccacgccauccacguguccgggaccaacggcaccaagcgguucgacaacccggugcugcccuucaacgacggggucuacuucgcgagcaccgagaaguccaacaucauccgcggcuggaucuucgggacgacccucgacagcaagacccagucccugcugaucgugaacaacgccaccaacguggucaucaaggugugcgaguuccaguucugcaacgaccccuuccucggcguguacuaccacaagaacaacaagagcuggauggaguccgaguuccgggucuacagcuccgccaacaacugcacguucgaguacgugagccagcccuuccugauggaccuggagggcaagcaggggaacuucaagaaccuccgcgaguucguguucaagaacaucgacggcuacuucaagaucuacuccaagcacaccccgaucaaccugguccgggaccugccccagggguucagcgcccucgagccccugguggaccugcccaucggcaucaacaucacccgcuuccagacccuccuggcccugcaccgguccuaccucacgccgggggacagcagcuccggcuggaccgcgggcgccgccgccuacuacgugggguaccugcagccccgcaccuuccugcucaaguacaacgagaacggcaccaucacggacgcggucgacugcgcccuggacccccugagcgagaccaagugcacccucaaguccuucaccguggagaaggggaucuaccagacgagcaacuuccgggugcagcccaccgaguccaucguccgcuucccgaacaucaccaaccugugccccuucggcgagguguucaacgccacccgguucgccagcgucuacgccuggaaccgcaagcggaucuccaacugcguggcggacuacagcgugcuguacaacuccgccagcuucuccacguucaagugcuacggcgucagccccaccaagcucaacgaccugugcuucaccaacguguacgccgacuccuucgugauccgcggggacgagguccggcagaucgcccccggccagaccgggaagaucgccgacuacaacuacaagcugccggacgacuucacgggcugcgugaucgcguggaacagcaagaaccucgacuccaaggucgggggcaacuacaacuaccuguaccgccuguuccgcaagagcaaccucaagcccuucgagcgggacaucuccaccgagaucuaccaggccggcagcacccccugcaacgggguggagggcuucaacugcuacuucccccugcaguccuacggguuccagccgaccaacggcgugggguaccagcccuaccggguggucgugcugagcuucgagcuccugcacgcccccgccacggugugcggccccaagaaguccaccaaccuggucaagaacaagugcgugaacuucaacuucaacggccucaccgggaccggcgugcugaccgagagcaacaagaaguuccugccguuccagcaguucgggcgcgacaucgccgacacgaccgacgcgguccgcgacccccagacccuggagauccucgacaucacccccugcagcuucggcgggguguccgugaucacgccgggcaccaacaccagcaaccaggucgccgugcuguaccagggcgugaacugcaccgagguccccguggccauccacgccgaccagcugacgcccaccuggcggguguacuccaccggcagcaacgucuuccagacccgcgccgggugccucaucggcgcggagcacgugaacaacuccuacgagugcgacauccccaucggggccggcaucugcgccagcuaccagacgcagaccaacuccccgcggcgcgcccggagcguggcgucccagagcaucaucgccuacaccaugucccugggcgccgagaacagcgucgccuacuccaacaacagcaucgccauccccaccaacuucacgaucuccgugaccaccgagauccugcccgugagcaugaccaagacgagcgucgacugcaccauguacaucugcggggacuccaccgagugcagcaaccuccugcugcaguacggcuccuucugcacccagcucaaccgcgcgcugacggggaucgccguggagcaggacaagaacacccaggagguguucgcccaggucaagcagaucuacaagacgcccccgaucaaggacuucggcggguucaacuucagccagauccugcccgaccccuccaagcccagcaagcgguccuucaucgaggaccuccuguucaacaaggugacccuggccgacgccggcuucaucaagcaguacggcgacugccucggggacaucgcggcccgcgaccugaucugcgcccagaaguucaacggccugaccgugcucccgccccugcugaccgacgagaugaucgcccaguacaccagcgcccuccuggcggggaccaucacguccggcuggaccuucggggccggcgccgcccugcagauccccuucgcgaugcagauggccuaccgguucaacggcaucggggucacccagaacgugcucuacgagaaccagaagcugaucgccaaccaguucaacagcgccaucggcaagauccaggacucccugagcuccaccgccagcgcgcucgggaagcugcaggacguggucaaccagaacgcccaggcccugaacacgcucgugaagcagcuguccagcaacuucggcgccaucuccagcgugcugaacgacauccucucccgccuggacccgcccgaggccgaggugcagaucgaccggcugaucaccgggcgccuccagagccugcagaccuacgugacccagcagcugauccgggcggccgagauccgcgccagcgccaaccucgccgcgaccaagauguccgagugcguccugggccagagcaagcggguggacuucugcggcaagggguaccaccugauguccuucccccagagcgccccgcacggcguggucuuccuccacgugacguacguccccgcccaggagaagaacuucaccaccgcccccgcgaucugccacgacgggaaggcccacuucccccgcgagggcguguucguguccaacgggacccacugguucgucacgcagcggaacuucuacgagccgcagaucaucaccaccgacaacaccuucgugagcggcaacugcgacguggucaucggcaucgugaacaacacgguguacgacccccugcagcccgagcuggacuccuucaaggaggagcucgacaaguacuucaagaaccacaccagccccgacgucgaccugggggacaucuccggcaucaacgccagcguggugaacauccagaaggagaucgaccgccugaacgaggucgccaagaaccucaacgagucccugaucgaccugcaggagcucgggaaguacgagcaguacaucaaguggccgugguacaucuggcugggcuucaucgccggccugaucgcgaucgugauggugaccaucaugcucugcugcaugaccagcugcugcuccugccugaaggggugcugcagcugcggcuccugcugcaaguucgacgaggacgacagcgagcccguccugaagggggugaagcuccacuacacgugaggacuagucccuguucccagagcccacuuuuuuuucuuuuuuugaaauaaaauagccugucuuucagaucucaaaggcucuuuucagagccaccaaaaaaaaaaaaaaaaaaaaaaaaaaaaaaaaaaaaaaaaaaaaaaaaaaaaaaaaaaaaaaaaaaaaaaaaaaaaaaaaaaaaaaaaaaaaaaaaaaaaa

SEQ ID NO: 23741 - RNA, 4191 nt, Artificial Sequence
  SARS-CoV-2/Wuhan/WIV05/2019__EPI_ISL_402128 spike protein mRNA gc (1-1273)(K986P_V987P_S477N_D614G)
aggagagggcgcuuggcuugcaaggacccugagcugcggcauugaagcacacccaacccaacucgacugaagucagccucacugaaccggaucugagaaucuucucucucugggcuugccagggcucuccgaaccuagcuagcauccucuucaauuccaacuagaaagcuuaccauguucguguuccugguccuccugccccuggugagcucccagugcgugaaccucaccacccgcacgcagcugccgcccgccuacaccaacagcuucacccggggcgucuacuaccccgacaagguguuccgcuccagcgugcugcacuccacccaggaccucuuccugcccuucuucagcaacgucacgugguuccacgccauccacguguccgggaccaacggcaccaagcgguucgacaacccggugcugcccuucaacgacggggucuacuucgcgagcaccgagaaguccaacaucauccgcggcuggaucuucgggacgacccucgacagcaagacccagucccugcugaucgugaacaacgccaccaacguggucaucaaggugugcgaguuccaguucugcaacgaccccuuccucggcguguacuaccacaagaacaacaagagcuggauggaguccgaguuccgggucuacagcuccgccaacaacugcacguucgaguacgugagccagcccuuccugauggaccuggagggcaagcaggggaacuucaagaaccuccgcgaguucguguucaagaacaucgacggcuacuucaagaucuacuccaagcacaccccgaucaaccugguccgggaccugccccagggguucagcgcccucgagccccugguggaccugcccaucggcaucaacaucacccgcuuccagacccuccuggcccugcaccgguccuaccucacgccgggggacagcagcuccggcuggaccgcgggcgccgccgccuacuacgugggguaccugcagccccgcaccuuccugcucaaguacaacgagaacggcaccaucacggacgcggucgacugcgcccuggacccccugagcgagaccaagugcacccucaaguccuucaccguggagaaggggaucuaccagacgagcaacuuccgggugcagcccaccgaguccaucguccgcuucccgaacaucaccaaccugugccccuucggcgagguguucaacgccacccgguucgccagcgucuacgccuggaaccgcaagcggaucuccaacugcguggcggacuacagcgugcuguacaacuccgccagcuucuccacguucaagugcuacggcgucagccccaccaagcucaacgaccugugcuucaccaacguguacgccgacuccuucgugauccgcggggacgagguccggcagaucgcccccggccagaccgggaagaucgccgacuacaacuacaagcugccggacgacuucacgggcugcgugaucgcguggaacagcaacaaccucgacuccaaggucgggggcaacuacaacuaccuguaccgccuguuccgcaagagcaaccucaagcccuucgagcgggacaucuccaccgagaucuaccaggccggcaacacccccugcaacgggguggagggcuucaacugcuacuucccccugcaguccuacggguuccagccgaccaacggcgugggguaccagcccuaccggguggucgugcugagcuucgagcuccugcacgcccccgccacggugugcggccccaagaaguccaccaaccuggucaagaacaagugcgugaacuucaacuucaacggccucaccgggaccggcgugcugaccgagagcaacaagaaguuccugccguuccagcaguucgggcgcgacaucgccgacacgaccgacgcgguccgcgacccccagacccuggagauccucgacaucacccccugcagcuucggcgggguguccgugaucacgccgggcaccaacaccagcaaccaggucgccgugcuguaccagggcgugaacugcaccgagguccccguggccauccacgccgaccagcugacgcccaccuggcggguguacuccaccggcagcaacgucuuccagacccgcgccgggugccucaucggcgcggagcacgugaacaacuccuacgagugcgacauccccaucggggccggcaucugcgccagcuaccagacgcagaccaacuccccgcggcgcgcccggagcguggcgucccagagcaucaucgccuacaccaugucccugggcgccgagaacagcgucgccuacuccaacaacagcaucgccauccccaccaacuucacgaucuccgugaccaccgagauccugcccgugagcaugaccaagacgagcgucgacugcaccauguacaucugcggggacuccaccgagugcagcaaccuccugcugcaguacggcuccuucugcacccagcucaaccgcgcgcugacggggaucgccguggagcaggacaagaacacccaggagguguucgcccaggucaagcagaucuacaagacgcccccgaucaaggacuucggcggguucaacuucagccagauccugcccgaccccuccaagcccagcaagcgguccuucaucgaggaccuccuguucaacaaggugacccuggccgacgccggcuucaucaagcaguacggcgacugccucggggacaucgcggcccgcgaccugaucugcgcccagaaguucaacggccugaccgugcucccgccccugcugaccgacgagaugaucgcccaguacaccagcgcccuccuggcggggaccaucacguccggcuggaccuucggggccggcgccgcccugcagauccccuucgcgaugcagauggccuaccgguucaacggcaucggggucacccagaacgugcucuacgagaaccagaagcugaucgccaaccaguucaacagcgccaucggcaagauccaggacucccugagcuccaccgccagcgcgcucgggaagcugcaggacguggucaaccagaacgcccaggcccugaacacgcucgugaagcagcuguccagcaacuucggcgccaucuccagcgugcugaacgacauccucucccgccuggacccgcccgaggccgaggugcagaucgaccggcugaucaccgggcgccuccagagccugcagaccuacgugacccagcagcugauccgggcggccgagauccgcgccagcgccaaccucgccgcgaccaagauguccgagugcguccugggccagagcaagcggguggacuucugcggcaagggguaccaccugauguccuucccccagagcgccccgcacggcguggucuuccuccacgugacguacguccccgcccaggagaagaacuucaccaccgcccccgcgaucugccacgacgggaaggcccacuucccccgcgagggcguguucguguccaacgggacccacugguucgucacgcagcggaacuucuacgagccgcagaucaucaccaccgacaacaccuucgugagcggcaacugcgacguggucaucggcaucgugaacaacacgguguacgacccccugcagcccgagcuggacuccuucaaggaggagcucgacaaguacuucaagaaccacaccagccccgacgucgaccugggggacaucuccggcaucaacgccagcguggugaacauccagaaggagaucgaccgccugaacgaggucgccaagaaccucaacgagucccugaucgaccugcaggagcucgggaaguacgagcaguacaucaaguggccgugguacaucuggcugggcuucaucgccggccugaucgcgaucgugauggugaccaucaugcucugcugcaugaccagcugcugcuccugccugaaggggugcugcagcugcggcuccugcugcaaguucgacgaggacgacagcgagcccguccugaagggggugaagcuccacuacacgugaggacuagucccuguucccagagcccacuuuuuuuucuuuuuuugaaauaaaauagccugucuuucagaucucaaaggcucuuuucagagccaccaaaaaaaaaaaaaaaaaaaaaaaaaaaaaaaaaaaaaaaaaaaaaaaaaaaaaaaaaaaaaaaaaaaaaaaaaaaaaaaaaaaaaaaaaaaaaaaaaaaaa

SEQ ID NO: 23742 - RNA, 4191 nt, Artificial Sequence
  SARS-CoV-2/Wuhan/WIV05/2019__EPI_ISL_402128 spike protein mRNA gc (1-1273)(K986P_V987P_N501Y_D614G)
aggagagggcgcuuggcuugcaaggacccugagcugcggcauugaagcacacccaacccaacucgacugaagucagccucacugaaccggaucugagaaucuucucucucugggcuugccagggcucuccgaaccuagcuagcauccucuucaauuccaacuagaaagcuuaccauguucguguuccugguccuccugccccuggugagcucccagugcgugaaccucaccacccgcacgcagcugccgcccgccuacaccaacagcuucacccggggcgucuacuaccccgacaagguguuccgcuccagcgugcugcacuccacccaggaccucuuccugcccuucuucagcaacgucacgugguuccacgccauccacguguccgggaccaacggcaccaagcgguucgacaacccggugcugcccuucaacgacggggucuacuucgcgagcaccgagaaguccaacaucauccgcggcuggaucuucgggacgacccucgacagcaagacccagucccugcugaucgugaacaacgccaccaacguggucaucaaggugugcgaguuccaguucugcaacgaccccuuccucggcguguacuaccacaagaacaacaagagcuggauggaguccgaguuccgggucuacagcuccgccaacaacugcacguucgaguacgugagccagcccuuccugauggaccuggagggcaagcaggggaacuucaagaaccuccgcgaguucguguucaagaacaucgacggcuacuucaagaucuacuccaagcacaccccgaucaaccugguccgggaccugccccagggguucagcgcccucgagccccugguggaccugcccaucggcaucaacaucacccgcuuccagacccuccuggcccugcaccgguccuaccucacgccgggggacagcagcuccggcuggaccgcgggcgccgccgccuacuacgugggguaccugcagccccgcaccuuccugcucaaguacaacgagaacggcaccaucacggacgcggucgacugcgcccuggacccccugagcgagaccaagugcacccucaaguccuucaccguggagaaggggaucuaccagacgagcaacuuccgggugcagcccaccgaguccaucguccgcuucccgaacaucaccaaccugugccccuucggcgagguguucaacgccacccgguucgccagcgucuacgccuggaaccgcaagcggaucuccaacugcguggcggacuacagcgugcuguacaacuccgccagcuucuccacguucaagugcuacggcgucagccccaccaagcucaacgaccugugcuucaccaacguguacgccgacuccuucgugauccgcggggacgagguccggcagaucgcccccggccagaccgggaagaucgccgacuacaacuacaagcugccggacgacuucacgggcugcgugaucgcguggaacagcaacaaccucgacuccaaggucgggggcaacuacaacuaccuguaccgccuguuccgcaagagcaaccucaagcccuucgagcgggacaucuccaccgagaucuaccaggccggcagcacccccugcaacgggguggagggcuucaacugcuacuucccccugcaguccuacggguuccagccgaccuacggcgugggguaccagcccuaccggguggucgugcugagcuucgagcuccugcacgcccccgccacggugugcggccccaagaaguccaccaaccuggucaagaacaagugcgugaacuucaacuucaacggccucaccgggaccggcgugcugaccgagagcaacaagaaguuccugccguuccagcaguucgggcgcgacaucgccgacacgaccgacgcgguccgcgacccccagacccuggagauccucgacaucacccccugcagcuucggcgggguguccgugaucacgccgggcaccaacaccagcaaccaggucgccgugcuguaccagggcgugaacugcaccgagguccccguggccauccacgccgaccagcugacgcccaccuggcggguguacuccaccggcagcaacgucuuccagacccgcgccgggugccucaucggcgcggagcacgugaacaacuccuacgagugcgacauccccaucggggccggcaucugcgccagcuaccagacgcagaccaacuccccgcggcgcgcccggagcguggcgucccagagcaucaucgccuacaccaugucccugggcgccgagaacagcgucgccuacuccaacaacagcaucgccauccccaccaacuucacgaucuccgugaccaccgagauccugcccgugagcaugaccaagacgagcgucgacugcaccauguacaucugcggggacuccaccgagugcagcaaccuccugcugcaguacggcuccuucugcacccagcucaaccgcgcgcugacggggaucgccguggagcaggacaagaacacccaggagguguucgcccaggucaagcagaucuacaagacgcccccgaucaaggacuucggcggguucaacuucagccagauccugcccgaccccuccaagcccagcaagcgguccuucaucgaggaccuccuguucaacaaggugacccuggccgacgccggcuucaucaagcaguacggcgacugccucggggacaucgcggcccgcgaccugaucugcgcccagaaguucaacggccugaccgugcucccgccccugcugaccgacgagaugaucgcccaguacaccagcgcccuccuggcggggaccaucacguccggcuggaccuucggggccggcgccgcccugcagauccccuucgcgaugcagauggccuaccgguucaacggcaucggggucacccagaacgugcucuacgagaaccagaagcugaucgccaaccaguucaacagcgccaucggcaagauccaggacucccugagcuccaccgccagcgcgcucgggaagcugcaggacguggucaaccagaacgcccaggcccugaacacgcucgugaagcagcuguccagcaacuucggcgccaucuccagcgugcugaacgacauccucucccgccuggacccgcccgaggccgaggugcagaucgaccggcugaucaccgggcgccuccagagccugcagaccuacgugacccagcagcugauccgggcggccgagauccgcgccagcgccaaccucgccgcgaccaagauguccgagugcguccugggccagagcaagcggguggacuucugcggcaagggguaccaccugauguccuucccccagagcgccccgcacggcguggucuuccuccacgugacguacguccccgcccaggagaagaacuucaccaccgcccccgcgaucugccacgacgggaaggcccacuucccccgcgagggcguguucguguccaacgggacccacugguucgucacgcagcggaacuucuacgagccgcagaucaucaccaccgacaacaccuucgugagcggcaacugcgacguggucaucggcaucgugaacaacacgguguacgacccccugcagcccgagcuggacuccuucaaggaggagcucgacaaguacuucaagaaccacaccagccccgacgucgaccugggggacaucuccggcaucaacgccagcguggugaacauccagaaggagaucgaccgccugaacgaggucgccaagaaccucaacgagucccugaucgaccugcaggagcucgggaaguacgagcaguacaucaaguggccgugguacaucuggcugggcuucaucgccggccugaucgcgaucgugauggugaccaucaugcucugcugcaugaccagcugcugcuccugccugaaggggugcugcagcugcggcuccugcugcaaguucgacgaggacgacagcgagcccguccugaagggggugaagcuccacuacacgugaggacuagucccuguucccagagcccacuuuuuuuucuuuuuuugaaauaaaauagccugucuuucagaucucaaaggcucuuuucagagccaccaaaaaaaaaaaaaaaaaaaaaaaaaaaaaaaaaaaaaaaaaaaaaaaaaaaaaaaaaaaaaaaaaaaaaaaaaaaaaaaaaaaaaaaaaaaaaaaaaaaaa

SEQ ID NO: 23743 - RNA, 4185 nt, Artificial Sequence
  SARS-CoV-2/Wuhan/WIV05/2019__EPI_ISL_402128 spike protein mRNA gc (1-1273)(K986P_V987P_H69del_V70del_D614G)
aggagagggcgcuuggcuugcaaggacccugagcugcggcauugaagcacacccaacccaacucgacugaagucagccucacugaaccggaucugagaaucuucucucucugggcuugccagggcucuccgaaccuagcuagcauccucuucaauuccaacuagaaagcuuaccauguucguguuccugguccuccugccccuggugagcucccagugcgugaaccucaccacccgcacgcagcugccgcccgccuacaccaacagcuucacccggggcgucuacuaccccgacaagguguuccgcuccagcgugcugcacuccacccaggaccucuuccugcccuucuucagcaacgucacgugguuccacgccaucuccgggaccaacggcaccaagcgguucgacaacccggugcugcccuucaacgacggggucuacuucgcgagcaccgagaaguccaacaucauccgcggcuggaucuucgggacgacccucgacagcaagacccagucccugcugaucgugaacaacgccaccaacguggucaucaaggugugcgaguuccaguucugcaacgaccccuuccucggcguguacuaccacaagaacaacaagagcuggauggaguccgaguuccgggucuacagcuccgccaacaacugcacguucgaguacgugagccagcccuuccugauggaccuggagggcaagcaggggaacuucaagaaccuccgcgaguucguguucaagaacaucgacggcuacuucaagaucuacuccaagcacaccccgaucaaccugguccgggaccugccccagggguucagcgcccucgagccccugguggaccugcccaucggcaucaacaucacccgcuuccagacccuccuggcccugcaccgguccuaccucacgccgggggacagcagcuccggcuggaccgcgggcgccgccgccuacuacgugggguaccugcagccccgcaccuuccugcucaaguacaacgagaacggcaccaucacggacgcggucgacugcgcccuggacccccugagcgagaccaagugcacccucaaguccuucaccguggagaaggggaucuaccagacgagcaacuuccgggugcagcccaccgaguccaucguccgcuucccgaacaucaccaaccugugccccuucggcgagguguucaacgccacccgguucgccagcgucuacgccuggaaccgcaagcggaucuccaacugcguggcggacuacagcgugcuguacaacuccgccagcuucuccacguucaagugcuacggcgucagccccaccaagcucaacgaccugugcuucaccaacguguacgccgacuccuucgugauccgcggggacgagguccggcagaucgcccccggccagaccgggaagaucgccgacuacaacuacaagcugccggacgacuucacgggcugcgugaucgcguggaacagcaacaaccucgacuccaaggucgggggcaacuacaacuaccuguaccgccuguuccgcaagagcaaccucaagcccuucgagcgggacaucuccaccgagaucuaccaggccggcagcacccccugcaacgggguggagggcuucaacugcuacuucccccugcaguccuacggguuccagccgaccaacggcgugggguaccagcccuaccggguggucgugcugagcuucgagcuccugcacgcccccgccacggugugcggccccaagaaguccaccaaccuggucaagaacaagugcgugaacuucaacuucaacggccucaccgggaccggcgugcugaccgagagcaacaagaaguuccugccguuccagcaguucgggcgcgacaucgccgacacgaccgacgcgguccgcgacccccagacccuggagauccucgacaucacccccugcagcuucggcgggguguccgugaucacgccgggcaccaacaccagcaaccaggucgccgugcuguaccagggcgugaacugcaccgagguccccguggccauccacgccgaccagcugacgcccaccuggcggguguacuccaccggcagcaacgucuuccagacccgcgccgggugccucaucggcgcggagcacgugaacaacuccuacgagugcgacauccccaucggggccggcaucugcgccagcuaccagacgcagaccaacuccccgcggcgcgcccggagcguggcgucccagagcaucaucgccuacaccaugucccugggcgccgagaacagcgucgccuacuccaacaacagcaucgccauccccaccaacuucacgaucuccgugaccaccgagauccugcccgugagcaugaccaagacgagcgucgacugcaccauguacaucugcggggacuccaccgagugcagcaaccuccugcugcaguacggcuccuucugcacccagcucaaccgcgcgcugacggggaucgccguggagcaggacaagaacacccaggagguguucgcccaggucaagcagaucuacaagacgcccccgaucaaggacuucggcggguucaacuucagccagauccugcccgaccccuccaagcccagcaagcgguccuucaucgaggaccuccuguucaacaaggugacccuggccgacgccggcuucaucaagcaguacggcgacugccucggggacaucgcggcccgcgaccugaucugcgcccagaaguucaacggccugaccgugcucccgccccugcugaccgacgagaugaucgcccaguacaccagcgcccuccuggcggggaccaucacguccggcuggaccuucggggccggcgccgcccugcagauccccuucgcgaugcagauggccuaccgguucaacggcaucggggucacccagaacgugcucuacgagaaccagaagcugaucgccaaccaguucaacagcgccaucggcaagauccaggacucccugagcuccaccgccagcgcgcucgggaagcugcaggacguggucaaccagaacgcccaggcccugaacacgcucgugaagcagcuguccagcaacuucggcgccaucuccagcgugcugaacgacauccucucccgccuggacccgcccgaggccgaggugcagaucgaccggcugaucaccgggcgccuccagagccugcagaccuacgugacccagcagcugauccgggcggccgagauccgcgccagcgccaaccucgccgcgaccaagauguccgagugcguccugggccagagcaagcggguggacuucugcggcaagggguaccaccugauguccuucccccagagcgccccgcacggcguggucuuccuccacgugacguacguccccgcccaggagaagaacuucaccaccgcccccgcgaucugccacgacgggaaggcccacuucccccgcgagggcguguucguguccaacgggacccacugguucgucacgcagcggaacuucuacgagccgcagaucaucaccaccgacaacaccuucgugagcggcaacugcgacguggucaucggcaucgugaacaacacgguguacgacccccugcagcccgagcuggacuccuucaaggaggagcucgacaaguacuucaagaaccacaccagccccgacgucgaccugggggacaucuccggcaucaacgccagcguggugaacauccagaaggagaucgaccgccugaacgaggucgccaagaaccucaacgagucccugaucgaccugcaggagcucgggaaguacgagcaguacaucaaguggccgugguacaucuggcugggcuucaucgccggccugaucgcgaucgugauggugaccaucaugcucugcugcaugaccagcugcugcuccugccugaaggggugcugcagcugcggcuccugcugcaaguucgacgaggacgacagcgagcccguccugaagggggugaagcuccacuacacgugaggacuagucccuguucccagagcccacuuuuuuuucuuuuuuugaaauaaaauagccugucuuucagaucucaaaggcucuuuucagagccaccaaaaaaaaaaaaaaaaaaaaaaaaaaaaaaaaaaaaaaaaaaaaaaaaaaaaaaaaaaaaaaaaaaaaaaaaaaaaaaaaaaaaaaaaaaaaaaaaaaaaa

SEQ ID NO: 23744 - RNA, 4191 nt, Artificial Sequence
  SARS-CoV-2/Wuhan/WIV05/2019__EPI_ISL_402128 spike protein mRNA gc (1-1273)(K986P_V987P_Y453F_D614G)
aggagagggcgcuuggcuugcaaggacccugagcugcggcauugaagcacacccaacccaacucgacugaagucagccucacugaaccggaucugagaaucuucucucucugggcuugccagggcucuccgaaccuagcuagcauccucuucaauuccaacuagaaagcuuaccauguucguguuccugguccuccugccccuggugagcucccagugcgugaaccucaccacccgcacgcagcugccgcccgccuacaccaacagcuucacccggggcgucuacuaccccgacaagguguuccgcuccagcgugcugcacuccacccaggaccucuuccugcccuucuucagcaacgucacgugguuccacgccauccacguguccgggaccaacggcaccaagcgguucgacaacccggugcugcccuucaacgacggggucuacuucgcgagcaccgagaaguccaacaucauccgcggcuggaucuucgggacgacccucgacagcaagacccagucccugcugaucgugaacaacgccaccaacguggucaucaaggugugcgaguuccaguucugcaacgaccccuuccucggcguguacuaccacaagaacaacaagagcuggauggaguccgaguuccgggucuacagcuccgccaacaacugcacguucgaguacgugagccagcccuuccugauggaccuggagggcaagcaggggaacuucaagaaccuccgcgaguucguguucaagaacaucgacggcuacuucaagaucuacuccaagcacaccccgaucaaccugguccgggaccugccccagggguucagcgcccucgagccccugguggaccugcccaucggcaucaacaucacccgcuuccagacccuccuggcccugcaccgguccuaccucacgccgggggacagcagcuccggcuggaccgcgggcgccgccgccuacuacgugggguaccugcagccccgcaccuuccugcucaaguacaacgagaacggcaccaucacggacgcggucgacugcgcccuggacccccugagcgagaccaagugcacccucaaguccuucaccguggagaaggggaucuaccagacgagcaacuuccgggugcagcccaccgaguccaucguccgcuucccgaacaucaccaaccugugccccuucggcgagguguucaacgccacccgguucgccagcgucuacgccuggaaccgcaagcggaucuccaacugcguggcggacuacagcgugcuguacaacuccgccagcuucuccacguucaagugcuacggcgucagccccaccaagcucaacgaccugugcuucaccaacguguacgccgacuccuucgugauccgcggggacgagguccggcagaucgcccccggccagaccgggaagaucgccgacuacaacuacaagcugccggacgacuucacgggcugcgugaucgcguggaacagcaacaaccucgacuccaaggucgggggcaacuacaacuaccuguuccgccuguuccgcaagagcaaccucaagcccuucgagcgggacaucuccaccgagaucuaccaggccggcagcacccccugcaacgggguggagggcuucaacugcuacuucccccugcaguccuacggguuccagccgaccaacggcgugggguaccagcccuaccggguggucgugcugagcuucgagcuccugcacgcccccgccacggugugcggccccaagaaguccaccaaccuggucaagaacaagugcgugaacuucaacuucaacggccucaccgggaccggcgugcugaccgagagcaacaagaaguuccugccguuccagcaguucgggcgcgacaucgccgacacgaccgacgcgguccgcgacccccagacccuggagauccucgacaucacccccugcagcuucggcgggguguccgugaucacgccgggcaccaacaccagcaaccaggucgccgugcuguaccagggcgugaacugcaccgagguccccguggccauccacgccgaccagcugacgcccaccuggcggguguacuccaccggcagcaacgucuuccagacccgcgccgggugccucaucggcgcggagcacgugaacaacuccuacgagugcgacauccccaucggggccggcaucugcgccagcuaccagacgcagaccaacuccccgcggcgcgcccggagcguggcgucccagagcaucaucgccuacaccaugucccugggcgccgagaacagcgucgccuacuccaacaacagcaucgccauccccaccaacuucacgaucuccgugaccaccgagauccugcccgugagcaugaccaagacgagcgucgacugcaccauguacaucugcggggacuccaccgagugcagcaaccuccugcugcaguacggcuccuucugcacccagcucaaccgcgcgcugacggggaucgccguggagcaggacaagaacacccaggagguguucgcccaggucaagcagaucuacaagacgcccccgaucaaggacuucggcggguucaacuucagccagauccugcccgaccccuccaagcccagcaagcgguccuucaucgaggaccuccuguucaacaaggugacccuggccgacgccggcuucaucaagcaguacggcgacugccucggggacaucgcggcccgcgaccugaucugcgcccagaaguucaacggccugaccgugcucccgccccugcugaccgacgagaugaucgcccaguacaccagcgcccuccuggcggggaccaucacguccggcuggaccuucggggccggcgccgcccugcagauccccuucgcgaugcagauggccuaccgguucaacggcaucggggucacccagaacgugcucuacgagaaccagaagcugaucgccaaccaguucaacagcgccaucggcaagauccaggacucccugagcuccaccgccagcgcgcucgggaagcugcaggacguggucaaccagaacgcccaggcccugaacacgcucgugaagcagcuguccagcaacuucggcgccaucuccagcgugcugaacgacauccucucccgccuggacccgcccgaggccgaggugcagaucgaccggcugaucaccgggcgccuccagagccugcagaccuacgugacccagcagcugauccgggcggccgagauccgcgccagcgccaaccucgccgcgaccaagauguccgagugcguccugggccagagcaagcggguggacuucugcggcaagggguaccaccugauguccuucccccagagcgccccgcacggcguggucuuccuccacgugacguacguccccgcccaggagaagaacuucaccaccgcccccgcgaucugccacgacgggaaggcccacuucccccgcgagggcguguucguguccaacgggacccacugguucgucacgcagcggaacuucuacgagccgcagaucaucaccaccgacaacaccuucgugagcggcaacugcgacguggucaucggcaucgugaacaacacgguguacgacccccugcagcccgagcuggacuccuucaaggaggagcucgacaaguacuucaagaaccacaccagccccgacgucgaccugggggacaucuccggcaucaacgccagcguggugaacauccagaaggagaucgaccgccugaacgaggucgccaagaaccucaacgagucccugaucgaccugcaggagcucgggaaguacgagcaguacaucaaguggccgugguacaucuggcugggcuucaucgccggccugaucgcgaucgugauggugaccaucaugcucugcugcaugaccagcugcugcuccugccugaaggggugcugcagcugcggcuccugcugcaaguucgacgaggacgacagcgagcccguccugaagggggugaagcuccacuacacgugaggacuagucccuguucccagagcccacuuuuuuuucuuuuuuugaaauaaaauagccugucuuucagaucucaaaggcucuuuucagagccaccaaaaaaaaaaaaaaaaaaaaaaaaaaaaaaaaaaaaaaaaaaaaaaaaaaaaaaaaaaaaaaaaaaaaaaaaaaaaaaaaaaaaaaaaaaaaaaaaaaaaa

SEQ ID NO: 23745 - RNA, 4191 nt, Artificial Sequence
  SARS-CoV-2/Wuhan/WIV05/2019__EPI_ISL_402128 spike protein mRNA gc (1-1273)(K986P_V987P_D614G_I692V)
aggagagggcgcuuggcuugcaaggacccugagcugcggcauugaagcacacccaacccaacucgacugaagucagccucacugaaccggaucugagaaucuucucucucugggcuugccagggcucuccgaaccuagcuagcauccucuucaauuccaacuagaaagcuuaccauguucguguuccugguccuccugccccuggugagcucccagugcgugaaccucaccacccgcacgcagcugccgcccgccuacaccaacagcuucacccggggcgucuacuaccccgacaagguguuccgcuccagcgugcugcacuccacccaggaccucuuccugcccuucuucagcaacgucacgugguuccacgccauccacguguccgggaccaacggcaccaagcgguucgacaacccggugcugcccuucaacgacggggucuacuucgcgagcaccgagaaguccaacaucauccgcggcuggaucuucgggacgacccucgacagcaagacccagucccugcugaucgugaacaacgccaccaacguggucaucaaggugugcgaguuccaguucugcaacgaccccuuccucggcguguacuaccacaagaacaacaagagcuggauggaguccgaguuccgggucuacagcuccgccaacaacugcacguucgaguacgugagccagcccuuccugauggaccuggagggcaagcaggggaacuucaagaaccuccgcgaguucguguucaagaacaucgacggcuacuucaagaucuacuccaagcacaccccgaucaaccugguccgggaccugccccagggguucagcgcccucgagccccugguggaccugcccaucggcaucaacaucacccgcuuccagacccuccuggcccugcaccgguccuaccucacgccgggggacagcagcuccggcuggaccgcgggcgccgccgccuacuacgugggguaccugcagccccgcaccuuccugcucaaguacaacgagaacggcaccaucacggacgcggucgacugcgcccuggacccccugagcgagaccaagugcacccucaaguccuucaccguggagaaggggaucuaccagacgagcaacuuccgggugcagcccaccgaguccaucguccgcuucccgaacaucaccaaccugugccccuucggcgagguguucaacgccacccgguucgccagcgucuacgccuggaaccgcaagcggaucuccaacugcguggcggacuacagcgugcuguacaacuccgccagcuucuccacguucaagugcuacggcgucagccccaccaagcucaacgaccugugcuucaccaacguguacgccgacuccuucgugauccgcggggacgagguccggcagaucgcccccggccagaccgggaagaucgccgacuacaacuacaagcugccggacgacuucacgggcugcgugaucgcguggaacagcaacaaccucgacuccaaggucgggggcaacuacaacuaccuguaccgccuguuccgcaagagcaaccucaagcccuucgagcgggacaucuccaccgagaucuaccaggccggcagcacccccugcaacgggguggagggcuucaacugcuacuucccccugcaguccuacggguuccagccgaccaacggcgugggguaccagcccuaccggguggucgugcugagcuucgagcuccugcacgcccccgccacggugugcggccccaagaaguccaccaaccuggucaagaacaagugcgugaacuucaacuucaacggccucaccgggaccggcgugcugaccgagagcaacaagaaguuccugccguuccagcaguucgggcgcgacaucgccgacacgaccgacgcgguccgcgacccccagacccuggagauccucgacaucacccccugcagcuucggcgggguguccgugaucacgccgggcaccaacaccagcaaccaggucgccgugcuguaccagggcgugaacugcaccgagguccccguggccauccacgccgaccagcugacgcccaccuggcggguguacuccaccggcagcaacgucuuccagacccgcgccgggugccucaucggcgcggagcacgugaacaacuccuacgagugcgacauccccaucggggccggcaucugcgccagcuaccagacgcagaccaacuccccgcggcgcgcccggagcguggcgucccagagcgucaucgccuacaccaugucccugggcgccgagaacagcgucgccuacuccaacaacagcaucgccauccccaccaacuucacgaucuccgugaccaccgagauccugcccgugagcaugaccaagacgagcgucgacugcaccauguacaucugcggggacuccaccgagugcagcaaccuccugcugcaguacggcuccuucugcacccagcucaaccgcgcgcugacggggaucgccguggagcaggacaagaacacccaggagguguucgcccaggucaagcagaucuacaagacgcccccgaucaaggacuucggcggguucaacuucagccagauccugcccgaccccuccaagcccagcaagcgguccuucaucgaggaccuccuguucaacaaggugacccuggccgacgccggcuucaucaagcaguacggcgacugccucggggacaucgcggcccgcgaccugaucugcgcccagaaguucaacggccugaccgugcucccgccccugcugaccgacgagaugaucgcccaguacaccagcgcccuccuggcggggaccaucacguccggcuggaccuucggggccggcgccgcccugcagauccccuucgcgaugcagauggccuaccgguucaacggcaucggggucacccagaacgugcucuacgagaaccagaagcugaucgccaaccaguucaacagcgccaucggcaagauccaggacucccugagcuccaccgccagcgcgcucgggaagcugcaggacguggucaaccagaacgcccaggcccugaacacgcucgugaagcagcuguccagcaacuucggcgccaucuccagcgugcugaacgacauccucucccgccuggacccgcccgaggccgaggugcagaucgaccggcugaucaccgggcgccuccagagccugcagaccuacgugacccagcagcugauccgggcggccgagauccgcgccagcgccaaccucgccgcgaccaagauguccgagugcguccugggccagagcaagcggguggacuucugcggcaagggguaccaccugauguccuucccccagagcgccccgcacggcguggucuuccuccacgugacguacguccccgcccaggagaagaacuucaccaccgcccccgcgaucugccacgacgggaaggcccacuucccccgcgagggcguguucguguccaacgggacccacugguucgucacgcagcggaacuucuacgagccgcagaucaucaccaccgacaacaccuucgugagcggcaacugcgacguggucaucggcaucgugaacaacacgguguacgacccccugcagcccgagcuggacuccuucaaggaggagcucgacaaguacuucaagaaccacaccagccccgacgucgaccugggggacaucuccggcaucaacgccagcguggugaacauccagaaggagaucgaccgccugaacgaggucgccaagaaccucaacgagucccugaucgaccugcaggagcucgggaaguacgagcaguacaucaaguggccgugguacaucuggcugggcuucaucgccggccugaucgcgaucgugauggugaccaucaugcucugcugcaugaccagcugcugcuccugccugaaggggugcugcagcugcggcuccugcugcaaguucgacgaggacgacagcgagcccguccugaagggggugaagcuccacuacacgugaggacuagucccuguucccagagcccacuuuuuuuucuuuuuuugaaauaaaauagccugucuuucagaucucaaaggcucuuuucagagccaccaaaaaaaaaaaaaaaaaaaaaaaaaaaaaaaaaaaaaaaaaaaaaaaaaaaaaaaaaaaaaaaaaaaaaaaaaaaaaaaaaaaaaaaaaaaaaaaaaaaaa

SEQ ID NO: 23746 - RNA, 4191 nt, Artificial Sequence
  SARS-CoV-2/Wuhan/WIV05/2019__EPI_ISL_402128 spike protein mRNA gc (1-1273)(K986P_V987P_D614G_M1229I)
aggagagggcgcuuggcuugcaaggacccugagcugcggcauugaagcacacccaacccaacucgacugaagucagccucacugaaccggaucugagaaucuucucucucugggcuugccagggcucuccgaaccuagcuagcauccucuucaauuccaacuagaaagcuuaccauguucguguuccugguccuccugccccuggugagcucccagugcgugaaccucaccacccgcacgcagcugccgcccgccuacaccaacagcuucacccggggcgucuacuaccccgacaagguguuccgcuccagcgugcugcacuccacccaggaccucuuccugcccuucuucagcaacgucacgugguuccacgccauccacguguccgggaccaacggcaccaagcgguucgacaacccggugcugcccuucaacgacggggucuacuucgcgagcaccgagaaguccaacaucauccgcggcuggaucuucgggacgacccucgacagcaagacccagucccugcugaucgugaacaacgccaccaacguggucaucaaggugugcgaguuccaguucugcaacgaccccuuccucggcguguacuaccacaagaacaacaagagcuggauggaguccgaguuccgggucuacagcuccgccaacaacugcacguucgaguacgugagccagcccuuccugauggaccuggagggcaagcaggggaacuucaagaaccuccgcgaguucguguucaagaacaucgacggcuacuucaagaucuacuccaagcacaccccgaucaaccugguccgggaccugccccagggguucagcgcccucgagccccugguggaccugcccaucggcaucaacaucacccgcuuccagacccuccuggcccugcaccgguccuaccucacgccgggggacagcagcuccggcuggaccgcgggcgccgccgccuacuacgugggguaccugcagccccgcaccuuccugcucaaguacaacgagaacggcaccaucacggacgcggucgacugcgcccuggacccccugagcgagaccaagugcacccucaaguccuucaccguggagaaggggaucuaccagacgagcaacuuccgggugcagcccaccgaguccaucguccgcuucccgaacaucaccaaccugugccccuucggcgagguguucaacgccacccgguucgccagcgucuacgccuggaaccgcaagcggaucuccaacugcguggcggacuacagcgugcuguacaacuccgccagcuucuccacguucaagugcuacggcgucagccccaccaagcucaacgaccugugcuucaccaacguguacgccgacuccuucgugauccgcggggacgagguccggcagaucgcccccggccagaccgggaagaucgccgacuacaacuacaagcugccggacgacuucacgggcugcgugaucgcguggaacagcaacaaccucgacuccaaggucgggggcaacuacaacuaccuguaccgccuguuccgcaagagcaaccucaagcccuucgagcgggacaucuccaccgagaucuaccaggccggcagcacccccugcaacgggguggagggcuucaacugcuacuucccccugcaguccuacggguuccagccgaccaacggcgugggguaccagcccuaccggguggucgugcugagcuucgagcuccugcacgcccccgccacggugugcggccccaagaaguccaccaaccuggucaagaacaagugcgugaacuucaacuucaacggccucaccgggaccggcgugcugaccgagagcaacaagaaguuccugccguuccagcaguucgggcgcgacaucgccgacacgaccgacgcgguccgcgacccccagacccuggagauccucgacaucacccccugcagcuucggcgggguguccgugaucacgccgggcaccaacaccagcaaccaggucgccgugcuguaccagggcgugaacugcaccgagguccccguggccauccacgccgaccagcugacgcccaccuggcggguguacuccaccggcagcaacgucuuccagacccgcgccgggugccucaucggcgcggagcacgugaacaacuccuacgagugcgacauccccaucggggccggcaucugcgccagcuaccagacgcagaccaacuccccgcggcgcgcccggagcguggcgucccagagcaucaucgccuacaccaugucccugggcgccgagaacagcgucgccuacuccaacaacagcaucgccauccccaccaacuucacgaucuccgugaccaccgagauccugcccgugagcaugaccaagacgagcgucgacugcaccauguacaucugcggggacuccaccgagugcagcaaccuccugcugcaguacggcuccuucugcacccagcucaaccgcgcgcugacggggaucgccguggagcaggacaagaacacccaggagguguucgcccaggucaagcagaucuacaagacgcccccgaucaaggacuucggcggguucaacuucagccagauccugcccgaccccuccaagcccagcaagcgguccuucaucgaggaccuccuguucaacaaggugacccuggccgacgccggcuucaucaagcaguacggcgacugccucggggacaucgcggcccgcgaccugaucugcgcccagaaguucaacggccugaccgugcucccgccccugcugaccgacgagaugaucgcccaguacaccagcgcccuccuggcggggaccaucacguccggcuggaccuucggggccggcgccgcccugcagauccccuucgcgaugcagauggccuaccgguucaacggcaucggggucacccagaacgugcucuacgagaaccagaagcugaucgccaaccaguucaacagcgccaucggcaagauccaggacucccugagcuccaccgccagcgcgcucgggaagcugcaggacguggucaaccagaacgcccaggcccugaacacgcucgugaagcagcuguccagcaacuucggcgccaucuccagcgugcugaacgacauccucucccgccuggacccgcccgaggccgaggugcagaucgaccggcugaucaccgggcgccuccagagccugcagaccuacgugacccagcagcugauccgggcggccgagauccgcgccagcgccaaccucgccgcgaccaagauguccgagugcguccugggccagagcaagcggguggacuucugcggcaagggguaccaccugauguccuucccccagagcgccccgcacggcguggucuuccuccacgugacguacguccccgcccaggagaagaacuucaccaccgcccccgcgaucugccacgacgggaaggcccacuucccccgcgagggcguguucguguccaacgggacccacugguucgucacgcagcggaacuucuacgagccgcagaucaucaccaccgacaacaccuucgugagcggcaacugcgacguggucaucggcaucgugaacaacacgguguacgacccccugcagcccgagcuggacuccuucaaggaggagcucgacaaguacuucaagaaccacaccagccccgacgucgaccugggggacaucuccggcaucaacgccagcguggugaacauccagaaggagaucgaccgccugaacgaggucgccaagaaccucaacgagucccugaucgaccugcaggagcucgggaaguacgagcaguacaucaaguggccgugguacaucuggcugggcuucaucgccggccugaucgcgaucgugaucgugaccaucaugcucugcugcaugaccagcugcugcuccugccugaaggggugcugcagcugcggcuccugcugcaaguucgacgaggacgacagcgagcccguccugaagggggugaagcuccacuacacgugaggacuagucccuguucccagagcccacuuuuuuuucuuuuuuugaaauaaaauagccugucuuucagaucucaaaggcucuuuucagagccaccaaaaaaaaaaaaaaaaaaaaaaaaaaaaaaaaaaaaaaaaaaaaaaaaaaaaaaaaaaaaaaaaaaaaaaaaaaaaaaaaaaaaaaaaaaaaaaaaaaaaa

SEQ ID NO: 23747 - RNA, 4185 nt, Artificial Sequence
  SARS-CoV-2/Wuhan/WIV05/2019__EPI_ISL_402128 spike protein mRNA gc (1-1273)(K986P_V987P_H69del_V70del_A222V_Y453F_S477N_D614G_I692V)
aggagagggcgcuuggcuugcaaggacccugagcugcggcauugaagcacacccaacccaacucgacugaagucagccucacugaaccggaucugagaaucuucucucucugggcuugccagggcucuccgaaccuagcuagcauccucuucaauuccaacuagaaagcuuaccauguucguguuccugguccuccugccccuggugagcucccagugcgugaaccucaccacccgcacgcagcugccgcccgccuacaccaacagcuucacccggggcgucuacuaccccgacaagguguuccgcuccagcgugcugcacuccacccaggaccucuuccugcccuucuucagcaacgucacgugguuccacgccaucuccgggaccaacggcaccaagcgguucgacaacccggugcugcccuucaacgacggggucuacuucgcgagcaccgagaaguccaacaucauccgcggcuggaucuucgggacgacccucgacagcaagacccagucccugcugaucgugaacaacgccaccaacguggucaucaaggugugcgaguuccaguucugcaacgaccccuuccucggcguguacuaccacaagaacaacaagagcuggauggaguccgaguuccgggucuacagcuccgccaacaacugcacguucgaguacgugagccagcccuuccugauggaccuggagggcaagcaggggaacuucaagaaccuccgcgaguucguguucaagaacaucgacggcuacuucaagaucuacuccaagcacaccccgaucaaccugguccgggaccugccccagggguucagcguccucgagccccugguggaccugcccaucggcaucaacaucacccgcuuccagacccuccuggcccugcaccgguccuaccucacgccgggggacagcagcuccggcuggaccgcgggcgccgccgccuacuacgugggguaccugcagccccgcaccuuccugcucaaguacaacgagaacggcaccaucacggacgcggucgacugcgcccuggacccccugagcgagaccaagugcacccucaaguccuucaccguggagaaggggaucuaccagacgagcaacuuccgggugcagcccaccgaguccaucguccgcuucccgaacaucaccaaccugugccccuucggcgagguguucaacgccacccgguucgccagcgucuacgccuggaaccgcaagcggaucuccaacugcguggcggacuacagcgugcuguacaacuccgccagcuucuccacguucaagugcuacggcgucagccccaccaagcucaacgaccugugcuucaccaacguguacgccgacuccuucgugauccgcggggacgagguccggcagaucgcccccggccagaccgggaagaucgccgacuacaacuacaagcugccggacgacuucacgggcugcgugaucgcguggaacagcaacaaccucgacuccaaggucgggggcaacuacaacuaccuguuccgccuguuccgcaagagcaaccucaagcccuucgagcgggacaucuccaccgagaucuaccaggccggcaacacccccugcaacgggguggagggcuucaacugcuacuucccccugcaguccuacggguuccagccgaccaacggcgugggguaccagcccuaccggguggucgugcugagcuucgagcuccugcacgcccccgccacggugugcggccccaagaaguccaccaaccuggucaagaacaagugcgugaacuucaacuucaacggccucaccgggaccggcgugcugaccgagagcaacaagaaguuccugccguuccagcaguucgggcgcgacaucgccgacacgaccgacgcgguccgcgacccccagacccuggagauccucgacaucacccccugcagcuucggcgggguguccgugaucacgccgggcaccaacaccagcaaccaggucgccgugcuguaccagggcgugaacugcaccgagguccccguggccauccacgccgaccagcugacgcccaccuggcggguguacuccaccggcagcaacgucuuccagacccgcgccgggugccucaucggcgcggagcacgugaacaacuccuacgagugcgacauccccaucggggccggcaucugcgccagcuaccagacgcagaccaacuccccgcggcgcgcccggagcguggcgucccagagcgucaucgccuacaccaugucccugggcgccgagaacagcgucgccuacuccaacaacagcaucgccauccccaccaacuucacgaucuccgugaccaccgagauccugcccgugagcaugaccaagacgagcgucgacugcaccauguacaucugcggggacuccaccgagugcagcaaccuccugcugcaguacggcuccuucugcacccagcucaaccgcgcgcugacggggaucgccguggagcaggacaagaacacccaggagguguucgcccaggucaagcagaucuacaagacgcccccgaucaaggacuucggcggguucaacuucagccagauccugcccgaccccuccaagcccagcaagcgguccuucaucgaggaccuccuguucaacaaggugacccuggccgacgccggcuucaucaagcaguacggcgacugccucggggacaucgcggcccgcgaccugaucugcgcccagaaguucaacggccugaccgugcucccgccccugcugaccgacgagaugaucgcccaguacaccagcgcccuccuggcggggaccaucacguccggcuggaccuucggggccggcgccgcccugcagauccccuucgcgaugcagauggccuaccgguucaacggcaucggggucacccagaacgugcucuacgagaaccagaagcugaucgccaaccaguucaacagcgccaucggcaagauccaggacucccugagcuccaccgccagcgcgcucgggaagcugcaggacguggucaaccagaacgcccaggcccugaacacgcucgugaagcagcuguccagcaacuucggcgccaucuccagcgugcugaacgacauccucucccgccuggacccgcccgaggccgaggugcagaucgaccggcugaucaccgggcgccuccagagccugcagaccuacgugacccagcagcugauccgggcggccgagauccgcgccagcgccaaccucgccgcgaccaagauguccgagugcguccugggccagagcaagcggguggacuucugcggcaagggguaccaccugauguccuucccccagagcgccccgcacggcguggucuuccuccacgugacguacguccccgcccaggagaagaacuucaccaccgcccccgcgaucugccacgacgggaaggcccacuucccccgcgagggcguguucguguccaacgggacccacugguucgucacgcagcggaacuucuacgagccgcagaucaucaccaccgacaacaccuucgugagcggcaacugcgacguggucaucggcaucgugaacaacacgguguacgacccccugcagcccgagcuggacuccuucaaggaggagcucgacaaguacuucaagaaccacaccagccccgacgucgaccugggggacaucuccggcaucaacgccagcguggugaacauccagaaggagaucgaccgccugaacgaggucgccaagaaccucaacgagucccugaucgaccugcaggagcucgggaaguacgagcaguacaucaaguggccgugguacaucuggcugggcuucaucgccggccugaucgcgaucgugauggugaccaucaugcucugcugcaugaccagcugcugcuccugccugaaggggugcugcagcugcggcuccugcugcaaguucgacgaggacgacagcgagcccguccugaagggggugaagcuccacuacacgugaggacuagucccuguucccagagcccacuuuuuuuucuuuuuuugaaauaaaauagccugucuuucagaucucaaaggcucuuuucagagccaccaaaaaaaaaaaaaaaaaaaaaaaaaaaaaaaaaaaaaaaaaaaaaaaaaaaaaaaaaaaaaaaaaaaaaaaaaaaaaaaaaaaaaaaaaaaaaaaaaaaaa

SEQ ID NO: 23748 - RNA, 4185 nt, Artificial Sequence
  SARS-CoV-2/Wuhan/WIV05/2019__EPI_ISL_402128 spike protein mRNA gc (1-1273)(K986P_V987P_H69del_V70del_Y453F_D614G_I692V_M1229I)
aggagagggcgcuuggcuugcaaggacccugagcugcggcauugaagcacacccaacccaacucgacugaagucagccucacugaaccggaucugagaaucuucucucucugggcuugccagggcucuccgaaccuagcuagcauccucuucaauuccaacuagaaagcuuaccauguucguguuccugguccuccugccccuggugagcucccagugcgugaaccucaccacccgcacgcagcugccgcccgccuacaccaacagcuucacccggggcgucuacuaccccgacaagguguuccgcuccagcgugcugcacuccacccaggaccucuuccugcccuucuucagcaacgucacgugguuccacgccaucuccgggaccaacggcaccaagcgguucgacaacccggugcugcccuucaacgacggggucuacuucgcgagcaccgagaaguccaacaucauccgcggcuggaucuucgggacgacccucgacagcaagacccagucccugcugaucgugaacaacgccaccaacguggucaucaaggugugcgaguuccaguucugcaacgaccccuuccucggcguguacuaccacaagaacaacaagagcuggauggaguccgaguuccgggucuacagcuccgccaacaacugcacguucgaguacgugagccagcccuuccugauggaccuggagggcaagcaggggaacuucaagaaccuccgcgaguucguguucaagaacaucgacggcuacuucaagaucuacuccaagcacaccccgaucaaccugguccgggaccugccccagggguucagcgcccucgagccccugguggaccugcccaucggcaucaacaucacccgcuuccagacccuccuggcccugcaccgguccuaccucacgccgggggacagcagcuccggcuggaccgcgggcgccgccgccuacuacgugggguaccugcagccccgcaccuuccugcucaaguacaacgagaacggcaccaucacggacgcggucgacugcgcccuggacccccugagcgagaccaagugcacccucaaguccuucaccguggagaaggggaucuaccagacgagcaacuuccgggugcagcccaccgaguccaucguccgcuucccgaacaucaccaaccugugccccuucggcgagguguucaacgccacccgguucgccagcgucuacgccuggaaccgcaagcggaucuccaacugcguggcggacuacagcgugcuguacaacuccgccagcuucuccacguucaagugcuacggcgucagccccaccaagcucaacgaccugugcuucaccaacguguacgccgacuccuucgugauccgcggggacgagguccggcagaucgcccccggccagaccgggaagaucgccgacuacaacuacaagcugccggacgacuucacgggcugcgugaucgcguggaacagcaacaaccucgacuccaaggucgggggcaacuacaacuaccuguuccgccuguuccgcaagagcaaccucaagcccuucgagcgggacaucuccaccgagaucuaccaggccggcagcacccccugcaacgggguggagggcuucaacugcuacuucccccugcaguccuacggguuccagccgaccaacggcgugggguaccagcccuaccggguggucgugcugagcuucgagcuccugcacgcccccgccacggugugcggccccaagaaguccaccaaccuggucaagaacaagugcgugaacuucaacuucaacggccucaccgggaccggcgugcugaccgagagcaacaagaaguuccugccguuccagcaguucgggcgcgacaucgccgacacgaccgacgcgguccgcgacccccagacccuggagauccucgacaucacccccugcagcuucggcgggguguccgugaucacgccgggcaccaacaccagcaaccaggucgccgugcuguaccagggcgugaacugcaccgagguccccguggccauccacgccgaccagcugacgcccaccuggcggguguacuccaccggcagcaacgucuuccagacccgcgccgggugccucaucggcgcggagcacgugaacaacuccuacgagugcgacauccccaucggggccggcaucugcgccagcuaccagacgcagaccaacuccccgcggcgcgcccggagcguggcgucccagagcgugaucgccuacaccaugucccugggcgccgagaacagcgucgccuacuccaacaacagcaucgccauccccaccaacuucacgaucuccgugaccaccgagauccugcccgugagcaugaccaagacgagcgucgacugcaccauguacaucugcggggacuccaccgagugcagcaaccuccugcugcaguacggcuccuucugcacccagcucaaccgcgcgcugacggggaucgccguggagcaggacaagaacacccaggagguguucgcccaggucaagcagaucuacaagacgcccccgaucaaggacuucggcggguucaacuucagccagauccugcccgaccccuccaagcccagcaagcgguccuucaucgaggaccuccuguucaacaaggugacccuggccgacgccggcuucaucaagcaguacggcgacugccucggggacaucgcggcccgcgaccugaucugcgcccagaaguucaacggccugaccgugcucccgccccugcugaccgacgagaugaucgcccaguacaccagcgcccuccuggcggggaccaucacguccggcuggaccuucggggccggcgccgcccugcagauccccuucgcgaugcagauggccuaccgguucaacggcaucggggucacccagaacgugcucuacgagaaccagaagcugaucgccaaccaguucaacagcgccaucggcaagauccaggacucccugagcuccaccgccagcgcgcucgggaagcugcaggacguggucaaccagaacgcccaggcccugaacacgcucgugaagcagcuguccagcaacuucggcgccaucuccagcgugcugaacgacauccucucccgccuggacccgcccgaggccgaggugcagaucgaccggcugaucaccgggcgccuccagagccugcagaccuacgugacccagcagcugauccgggcggccgagauccgcgccagcgccaaccucgccgcgaccaagauguccgagugcguccugggccagagcaagcggguggacuucugcggcaagggguaccaccugauguccuucccccagagcgccccgcacggcguggucuuccuccacgugacguacguccccgcccaggagaagaacuucaccaccgcccccgcgaucugccacgacgggaaggcccacuucccccgcgagggcguguucguguccaacgggacccacugguucgucacgcagcggaacuucuacgagccgcagaucaucaccaccgacaacaccuucgugagcggcaacugcgacguggucaucggcaucgugaacaacacgguguacgacccccugcagcccgagcuggacuccuucaaggaggagcucgacaaguacuucaagaaccacaccagccccgacgucgaccugggggacaucuccggcaucaacgccagcguggugaacauccagaaggagaucgaccgccugaacgaggucgccaagaaccucaacgagucccugaucgaccugcaggagcucgggaaguacgagcaguacaucaaguggccgugguacaucuggcugggcuucaucgccggccugaucgcgaucgugaucgugaccaucaugcucugcugcaugaccagcugcugcuccugccugaaggggugcugcagcugcggcuccugcugcaaguucgacgaggacgacagcgagcccguccugaagggggugaagcuccacuacacgugaggacuagucccuguucccagagcccacuuuuuuuucuuuuuuugaaauaaaauagccugucuuucagaucucaaaggcucuuuucagagccaccaaaaaaaaaaaaaaaaaaaaaaaaaaaaaaaaaaaaaaaaaaaaaaaaaaaaaaaaaaaaaaaaaaaaaaaaaaaaaaaaaaaaaaaaaaaaaaaaaaaaa

SEQ ID NO: 23749 - RNA, 4182 nt, Artificial Sequence
  SARS-CoV-2/Wuhan/WIV05/2019__EPI_ISL_402128 spike protein mRNA gc (1-1273)(K986P_V987P_K986P_V987P_H69del_V70del_Y144del_N501Y_A570 D_D614G_P681H_T716I_S982A_D1118H)
aggagagggcgcuuggcuugcaaggacccugagcugcggcauugaagcacacccaacccaacucgacugaagucagccucacugaaccggaucugagaaucuucucucucugggcuugccagggcucuccgaaccuagcuagcauccucuucaauuccaacuagaaagcuuaccauguucguguuccugguccuccugccccuggugagcucccagugcgugaaccucaccacccgcacgcagcugccgcccgccuacaccaacagcuucacccggggcgucuacuaccccgacaagguguuccgcuccagcgugcugcacuccacccaggaccucuuccugcccuucuucagcaacgucacgugguuccacgccaucuccgggaccaacggcaccaagcgguucgacaacccggugcugcccuucaacgacggggucuacuucgcgagcaccgagaaguccaacaucauccgcggcuggaucuucgggacgacccucgacagcaagacccagucccugcugaucgugaacaacgccaccaacguggucaucaaggugugcgaguuccaguucugcaacgaccccuuccucggcguguaccacaagaacaacaagagcuggauggaguccgaguuccgggucuacagcuccgccaacaacugcacguucgaguacgugagccagcccuuccugauggaccuggagggcaagcaggggaacuucaagaaccuccgcgaguucguguucaagaacaucgacggcuacuucaagaucuacuccaagcacaccccgaucaaccugguccgggaccugccccagggguucagcgcccucgagccccugguggaccugcccaucggcaucaacaucacccgcuuccagacccuccuggcccugcaccgguccuaccucacgccgggggacagcagcuccggcuggaccgcgggcgccgccgccuacuacgugggguaccugcagccccgcaccuuccugcucaaguacaacgagaacggcaccaucacggacgcggucgacugcgcccuggacccccugagcgagaccaagugcacccucaaguccuucaccguggagaaggggaucuaccagacgagcaacuuccgggugcagcccaccgaguccaucguccgcuucccgaacaucaccaaccugugccccuucggcgagguguucaacgccacccgguucgccagcgucuacgccuggaaccgcaagcggaucuccaacugcguggcggacuacagcgugcuguacaacuccgccagcuucuccacguucaagugcuacggcgucagccccaccaagcucaacgaccugugcuucaccaacguguacgccgacuccuucgugauccgcggggacgagguccggcagaucgcccccggccagaccgggaagaucgccgacuacaacuacaagcugccggacgacuucacgggcugcgugaucgcguggaacagcaacaaccucgacuccaaggucgggggcaacuacaacuaccuguaccgccuguuccgcaagagcaaccucaagcccuucgagcgggacaucuccaccgagaucuaccaggccggcagcacccccugcaacgggguggagggcuucaacugcuacuucccccugcaguccuacggguuccagccgaccuacggcgugggguaccagcccuaccggguggucgugcugagcuucgagcuccugcacgcccccgccacggugugcggccccaagaaguccaccaaccuggucaagaacaagugcgugaacuucaacuucaacggccucaccgggaccggcgugcugaccgagagcaacaagaaguuccugccguuccagcaguucgggcgcgacaucgacgacacgaccgacgcgguccgcgacccccagacccuggagauccucgacaucacccccugcagcuucggcgggguguccgugaucacgccgggcaccaacaccagcaaccaggucgccgugcuguaccagggcgugaacugcaccgagguccccguggccauccacgccgaccagcugacgcccaccuggcggguguacuccaccggcagcaacgucuuccagacccgcgccgggugccucaucggcgcggagcacgugaacaacuccuacgagugcgacauccccaucggggccggcaucugcgccagcuaccagacgcagaccaacucccaccggcgcgcccggagcguggcgucccagagcaucaucgccuacaccaugucccugggcgccgagaacagcgucgccuacuccaacaacagcaucgccauccccaucaacuucacgaucuccgugaccaccgagauccugcccgugagcaugaccaagacgagcgucgacugcaccauguacaucugcggggacuccaccgagugcagcaaccuccugcugcaguacggcuccuucugcacccagcucaaccgcgcgcugacggggaucgccguggagcaggacaagaacacccaggagguguucgcccaggucaagcagaucuacaagacgcccccgaucaaggacuucggcggguucaacuucagccagauccugcccgaccccuccaagcccagcaagcgguccuucaucgaggaccuccuguucaacaaggugacccuggccgacgccggcuucaucaagcaguacggcgacugccucggggacaucgcggcccgcgaccugaucugcgcccagaaguucaacggccugaccgugcucccgccccugcugaccgacgagaugaucgcccaguacaccagcgcccuccuggcggggaccaucacguccggcuggaccuucggggccggcgccgcccugcagauccccuucgcgaugcagauggccuaccgguucaacggcaucggggucacccagaacgugcucuacgagaaccagaagcugaucgccaaccaguucaacagcgccaucggcaagauccaggacucccugagcuccaccgccagcgcgcucgggaagcugcaggacguggucaaccagaacgcccaggcccugaacacgcucgugaagcagcuguccagcaacuucggcgccaucuccagcgugcugaacgacauccucgcccgccuggacccgcccgaggccgaggugcagaucgaccggcugaucaccgggcgccuccagagccugcagaccuacgugacccagcagcugauccgggcggccgagauccgcgccagcgccaaccucgccgcgaccaagauguccgagugcguccugggccagagcaagcggguggacuucugcggcaagggguaccaccugauguccuucccccagagcgccccgcacggcguggucuuccuccacgugacguacguccccgcccaggagaagaacuucaccaccgcccccgcgaucugccacgacgggaaggcccacuucccccgcgagggcguguucguguccaacgggacccacugguucgucacgcagcggaacuucuacgagccgcagaucaucaccacccacaacaccuucgugagcggcaacugcgacguggucaucggcaucgugaacaacacgguguacgacccccugcagcccgagcuggacuccuucaaggaggagcucgacaaguacuucaagaaccacaccagccccgacgucgaccugggggacaucuccggcaucaacgccagcguggugaacauccagaaggagaucgaccgccugaacgaggucgccaagaaccucaacgagucccugaucgaccugcaggagcucgggaaguacgagcaguacaucaaguggccgugguacaucuggcugggcuucaucgccggccugaucgcgaucgugauggugaccaucaugcucugcugcaugaccagcugcugcuccugccugaaggggugcugcagcugcggcuccugcugcaaguucgacgaggacgacagcgagcccguccugaagggggugaagcuccacuacacgugaggacuagucccuguucccagagcccacuuuuuuuucuuuuuuugaaauaaaauagccugucuuucagaucucaaaggcucuuuucagagccaccaaaaaaaaaaaaaaaaaaaaaaaaaaaaaaaaaaaaaaaaaaaaaaaaaaaaaaaaaaaaaaaaaaaaaaaaaaaaaaaaaaaaaaaaaaaaaaaaaaaaa

SEQ ID NO: 23750 - RNA, 4191 nt, Artificial Sequence
  SARS-CoV-2/Wuhan/WIV05/2019__EPI_ISL_402128 spike protein mRNA gc (1-1273)(K986P_V987P_K986P_V987P_K417N_E484K_N501Y_D614G)
aggagagggcgcuuggcuugcaaggacccugagcugcggcauugaagcacacccaacccaacucgacugaagucagccucacugaaccggaucugagaaucuucucucucugggcuugccagggcucuccgaaccuagcuagcauccucuucaauuccaacuagaaagcuuaccauguucguguuccugguccuccugccccuggugagcucccagugcgugaaccucaccacccgcacgcagcugccgcccgccuacaccaacagcuucacccggggcgucuacuaccccgacaagguguuccgcuccagcgugcugcacuccacccaggaccucuuccugcccuucuucagcaacgucacgugguuccacgccauccacguguccgggaccaacggcaccaagcgguucgacaacccggugcugcccuucaacgacggggucuacuucgcgagcaccgagaaguccaacaucauccgcggcuggaucuucgggacgacccucgacagcaagacccagucccugcugaucgugaacaacgccaccaacguggucaucaaggugugcgaguuccaguucugcaacgaccccuuccucggcguguacuaccacaagaacaacaagagcuggauggaguccgaguuccgggucuacagcuccgccaacaacugcacguucgaguacgugagccagcccuuccugauggaccuggagggcaagcaggggaacuucaagaaccuccgcgaguucguguucaagaacaucgacggcuacuucaagaucuacuccaagcacaccccgaucaaccugguccgggaccugccccagggguucagcgcccucgagccccugguggaccugcccaucggcaucaacaucacccgcuuccagacccuccuggcccugcaccgguccuaccucacgccgggggacagcagcuccggcuggaccgcgggcgccgccgccuacuacgugggguaccugcagccccgcaccuuccugcucaaguacaacgagaacggcaccaucacggacgcggucgacugcgcccuggacccccugagcgagaccaagugcacccucaaguccuucaccguggagaaggggaucuaccagacgagcaacuuccgggugcagcccaccgaguccaucguccgcuucccgaacaucaccaaccugugccccuucggcgagguguucaacgccacccgguucgccagcgucuacgccuggaaccgcaagcggaucuccaacugcguggcggacuacagcgugcuguacaacuccgccagcuucuccacguucaagugcuacggcgucagccccaccaagcucaacgaccugugcuucaccaacguguacgccgacuccuucgugauccgcggggacgagguccggcagaucgcccccggccagaccgggaacaucgccgacuacaacuacaagcugccggacgacuucacgggcugcgugaucgcguggaacagcaacaaccucgacuccaaggucgggggcaacuacaacuaccuguaccgccuguuccgcaagagcaaccucaagcccuucgagcgggacaucuccaccgagaucuaccaggccggcagcacccccugcaacggggugaagggcuucaacugcuacuucccccugcaguccuacggguuccagccgaccuacggcgugggguaccagcccuaccggguggucgugcugagcuucgagcuccugcacgcccccgccacggugugcggccccaagaaguccaccaaccuggucaagaacaagugcgugaacuucaacuucaacggccucaccgggaccggcgugcugaccgagagcaacaagaaguuccugccguuccagcaguucgggcgcgacaucgccgacacgaccgacgcgguccgcgacccccagacccuggagauccucgacaucacccccugcagcuucggcgggguguccgugaucacgccgggcaccaacaccagcaaccaggucgccgugcuguaccagggcgugaacugcaccgagguccccguggccauccacgccgaccagcugacgcccaccuggcggguguacuccaccggcagcaacgucuuccagacccgcgccgggugccucaucggcgcggagcacgugaacaacuccuacgagugcgacauccccaucggggccggcaucugcgccagcuaccagacgcagaccaacuccccgcggcgcgcccggagcguggcgucccagagcaucaucgccuacaccaugucccugggcgccgagaacagcgucgccuacuccaacaacagcaucgccauccccaccaacuucacgaucuccgugaccaccgagauccugcccgugagcaugaccaagacgagcgucgacugcaccauguacaucugcggggacuccaccgagugcagcaaccuccugcugcaguacggcuccuucugcacccagcucaaccgcgcgcugacggggaucgccguggagcaggacaagaacacccaggagguguucgcccaggucaagcagaucuacaagacgcccccgaucaaggacuucggcggguucaacuucagccagauccugcccgaccccuccaagcccagcaagcgguccuucaucgaggaccuccuguucaacaaggugacccuggccgacgccggcuucaucaagcaguacggcgacugccucggggacaucgcggcccgcgaccugaucugcgcccagaaguucaacggccugaccgugcucccgccccugcugaccgacgagaugaucgcccaguacaccagcgcccuccuggcggggaccaucacguccggcuggaccuucggggccggcgccgcccugcagauccccuucgcgaugcagauggccuaccgguucaacggcaucggggucacccagaacgugcucuacgagaaccagaagcugaucgccaaccaguucaacagcgccaucggcaagauccaggacucccugagcuccaccgccagcgcgcucgggaagcugcaggacguggucaaccagaacgcccaggcccugaacacgcucgugaagcagcuguccagcaacuucggcgccaucuccagcgugcugaacgacauccucucccgccuggacccgcccgaggccgaggugcagaucgaccggcugaucaccgggcgccuccagagccugcagaccuacgugacccagcagcugauccgggcggccgagauccgcgccagcgccaaccucgccgcgaccaagauguccgagugcguccugggccagagcaagcggguggacuucugcggcaagggguaccaccugauguccuucccccagagcgccccgcacggcguggucuuccuccacgugacguacguccccgcccaggagaagaacuucaccaccgcccccgcgaucugccacgacgggaaggcccacuucccccgcgagggcguguucguguccaacgggacccacugguucgucacgcagcggaacuucuacgagccgcagaucaucaccaccgacaacaccuucgugagcggcaacugcgacguggucaucggcaucgugaacaacacgguguacgacccccugcagcccgagcuggacuccuucaaggaggagcucgacaaguacuucaagaaccacaccagccccgacgucgaccugggggacaucuccggcaucaacgccagcguggugaacauccagaaggagaucgaccgccugaacgaggucgccaagaaccucaacgagucccugaucgaccugcaggagcucgggaaguacgagcaguacaucaaguggccgugguacaucuggcugggcuucaucgccggccugaucgcgaucgugauggugaccaucaugcucugcugcaugaccagcugcugcuccugccugaaggggugcugcagcugcggcuccugcugcaaguucgacgaggacgacagcgagcccguccugaagggggugaagcuccacuacacgugaggacuagucccuguucccagagcccacuuuuuuuucuuuuuuugaaauaaaauagccugucuuucagaucucaaaggcucuuuucagagccaccaaaaaaaaaaaaaaaaaaaaaaaaaaaaaaaaaaaaaaaaaaaaaaaaaaaaaaaaaaaaaaaaaaaaaaaaaaaaaaaaaaaaaaaaaaaaaaaaaaaaa

SEQ ID NO: 23751 - RNA, 4182 nt, Artificial Sequence
  SARS-CoV-2/Wuhan/WIV05/2019__EPI_ISL_402128 spike protein mRNA gc (1-1273)(K986P_V987P_K986P_V987P_L18F_D80A_D215G_L242del_A243del_ L244del_R246I_K417N_E484K_N501Y_D614G_A701V)
aggagagggcgcuuggcuugcaaggacccugagcugcggcauugaagcacacccaacccaacucgacugaagucagccucacugaaccggaucugagaaucuucucucucugggcuugccagggcucuccgaaccuagcuagcauccucuucaauuccaacuagaaagcuuaccauguucguguuccugguccuccugccccuggugagcucccagugcgugaacuucaccacccgcacgcagcugccgcccgccuacaccaacagcuucacccggggcgucuacuaccccgacaagguguuccgcuccagcgugcugcacuccacccaggaccucuuccugcccuucuucagcaacgucacgugguuccacgccauccacguguccgggaccaacggcaccaagcgguucgccaacccggugcugcccuucaacgacggggucuacuucgcgagcaccgagaaguccaacaucauccgcggcuggaucuucgggacgacccucgacagcaagacccagucccugcugaucgugaacaacgccaccaacguggucaucaaggugugcgaguuccaguucugcaacgaccccuuccucggcguguacuaccacaagaacaacaagagcuggauggaguccgaguuccgggucuacagcuccgccaacaacugcacguucgaguacgugagccagcccuuccugauggaccuggagggcaagcaggggaacuucaagaaccuccgcgaguucguguucaagaacaucgacggcuacuucaagaucuacuccaagcacaccccgaucaaccugguccggggccugccccagggguucagcgcccucgagccccugguggaccugcccaucggcaucaacaucacccgcuuccagacccuccacaucuccuaccucacgccgggggacagcagcuccggcuggaccgcgggcgccgccgccuacuacgugggguaccugcagccccgcaccuuccugcucaaguacaacgagaacggcaccaucacggacgcggucgacugcgcccuggacccccugagcgagaccaagugcacccucaaguccuucaccguggagaaggggaucuaccagacgagcaacuuccgggugcagcccaccgaguccaucguccgcuucccgaacaucaccaaccugugccccuucggcgagguguucaacgccacccgguucgccagcgucuacgccuggaaccgcaagcggaucuccaacugcguggcggacuacagcgugcuguacaacuccgccagcuucuccacguucaagugcuacggcgucagccccaccaagcucaacgaccugugcuucaccaacguguacgccgacuccuucgugauccgcggggacgagguccggcagaucgcccccggccagaccgggaacaucgccgacuacaacuacaagcugccggacgacuucacgggcugcgugaucgcguggaacagcaacaaccucgacuccaaggucgggggcaacuacaacuaccuguaccgccuguuccgcaagagcaaccucaagcccuucgagcgggacaucuccaccgagaucuaccaggccggcagcacccccugcaacggggugaagggcuucaacugcuacuucccccugcaguccuacggguuccagccgaccuacggcgugggguaccagcccuaccggguggucgugcugagcuucgagcuccugcacgcccccgccacggugugcggccccaagaaguccaccaaccuggucaagaacaagugcgugaacuucaacuucaacggccucaccgggaccggcgugcugaccgagagcaacaagaaguuccugccguuccagcaguucgggcgcgacaucgccgacacgaccgacgcgguccgcgacccccagacccuggagauccucgacaucacccccugcagcuucggcgggguguccgugaucacgccgggcaccaacaccagcaaccaggucgccgugcuguaccagggcgugaacugcaccgagguccccguggccauccacgccgaccagcugacgcccaccuggcggguguacuccaccggcagcaacgucuuccagacccgcgccgggugccucaucggcgcggagcacgugaacaacuccuacgagugcgacauccccaucggggccggcaucugcgccagcuaccagacgcagaccaacuccccgcggcgcgcccggagcguggcgucccagagcaucaucgccuacaccaugucccugggcguggagaacagcgucgccuacuccaacaacagcaucgccauccccaccaacuucacgaucuccgugaccaccgagauccugcccgugagcaugaccaagacgagcgucgacugcaccauguacaucugcggggacuccaccgagugcagcaaccuccugcugcaguacggcuccuucugcacccagcucaaccgcgcgcugacggggaucgccguggagcaggacaagaacacccaggagguguucgcccaggucaagcagaucuacaagacgcccccgaucaaggacuucggcggguucaacuucagccagauccugcccgaccccuccaagcccagcaagcgguccuucaucgaggaccuccuguucaacaaggugacccuggccgacgccggcuucaucaagcaguacggcgacugccucggggacaucgcggcccgcgaccugaucugcgcccagaaguucaacggccugaccgugcucccgccccugcugaccgacgagaugaucgcccaguacaccagcgcccuccuggcggggaccaucacguccggcuggaccuucggggccggcgccgcccugcagauccccuucgcgaugcagauggccuaccgguucaacggcaucggggucacccagaacgugcucuacgagaaccagaagcugaucgccaaccaguucaacagcgccaucggcaagauccaggacucccugagcuccaccgccagcgcgcucgggaagcugcaggacguggucaaccagaacgcccaggcccugaacacgcucgugaagcagcuguccagcaacuucggcgccaucuccagcgugcugaacgacauccucucccgccuggacccgcccgaggccgaggugcagaucgaccggcugaucaccgggcgccuccagagccugcagaccuacgugacccagcagcugauccgggcggccgagauccgcgccagcgccaaccucgccgcgaccaagauguccgagugcguccugggccagagcaagcggguggacuucugcggcaagggguaccaccugauguccuucccccagagcgccccgcacggcguggucuuccuccacgugacguacguccccgcccaggagaagaacuucaccaccgcccccgcgaucugccacgacgggaaggcccacuucccccgcgagggcguguucguguccaacgggacccacugguucgucacgcagcggaacuucuacgagccgcagaucaucaccaccgacaacaccuucgugagcggcaacugcgacguggucaucggcaucgugaacaacacgguguacgacccccugcagcccgagcuggacuccuucaaggaggagcucgacaaguacuucaagaaccacaccagccccgacgucgaccugggggacaucuccggcaucaacgccagcguggugaacauccagaaggagaucgaccgccugaacgaggucgccaagaaccucaacgagucccugaucgaccugcaggagcucgggaaguacgagcaguacaucaaguggccgugguacaucuggcugggcuucaucgccggccugaucgcgaucgugauggugaccaucaugcucugcugcaugaccagcugcugcuccugccugaaggggugcugcagcugcggcuccugcugcaaguucgacgaggacgacagcgagcccguccugaagggggugaagcuccacuacacgugaggacuagucccuguucccagagcccacuuuuuuuucuuuuuuugaaauaaaauagccugucuuucagaucucaaaggcucuuuucagagccaccaaaaaaaaaaaaaaaaaaaaaaaaaaaaaaaaaaaaaaaaaaaaaaaaaaaaaaaaaaaaaaaaaaaaaaaaaaaaaaaaaaaaaaaaaaaaaaaaaaaaa

SEQ ID NO: 23752 - RNA, 4191 nt, Artificial Sequence
  SARS-CoV-2/Wuhan/WIV05/2019__EPI_ISL_402128 spike protein mRNA gc (1-1273)(K986P_V987P_K986P_V987P_E484K_D614G)
aggagagggcgcuuggcuugcaaggacccugagcugcggcauugaagcacacccaacccaacucgacugaagucagccucacugaaccggaucugagaaucuucucucucugggcuugccagggcucuccgaaccuagcuagcauccucuucaauuccaacuagaaagcuuaccauguucguguuccugguccuccugccccuggugagcucccagugcgugaaccucaccacccgcacgcagcugccgcccgccuacaccaacagcuucacccggggcgucuacuaccccgacaagguguuccgcuccagcgugcugcacuccacccaggaccucuuccugcccuucuucagcaacgucacgugguuccacgccauccacguguccgggaccaacggcaccaagcgguucgacaacccggugcugcccuucaacgacggggucuacuucgcgagcaccgagaaguccaacaucauccgcggcuggaucuucgggacgacccucgacagcaagacccagucccugcugaucgugaacaacgccaccaacguggucaucaaggugugcgaguuccaguucugcaacgaccccuuccucggcguguacuaccacaagaacaacaagagcuggauggaguccgaguuccgggucuacagcuccgccaacaacugcacguucgaguacgugagccagcccuuccugauggaccuggagggcaagcaggggaacuucaagaaccuccgcgaguucguguucaagaacaucgacggcuacuucaagaucuacuccaagcacaccccgaucaaccugguccgggaccugccccagggguucagcgcccucgagccccugguggaccugcccaucggcaucaacaucacccgcuuccagacccuccuggcccugcaccgguccuaccucacgccgggggacagcagcuccggcuggaccgcgggcgccgccgccuacuacgugggguaccugcagccccgcaccuuccugcucaaguacaacgagaacggcaccaucacggacgcggucgacugcgcccuggacccccugagcgagaccaagugcacccucaaguccuucaccguggagaaggggaucuaccagacgagcaacuuccgggugcagcccaccgaguccaucguccgcuucccgaacaucaccaaccugugccccuucggcgagguguucaacgccacccgguucgccagcgucuacgccuggaaccgcaagcggaucuccaacugcguggcggacuacagcgugcuguacaacuccgccagcuucuccacguucaagugcuacggcgucagccccaccaagcucaacgaccugugcuucaccaacguguacgccgacuccuucgugauccgcggggacgagguccggcagaucgcccccggccagaccgggaagaucgccgacuacaacuacaagcugccggacgacuucacgggcugcgugaucgcguggaacagcaacaaccucgacuccaaggucgggggcaacuacaacuaccuguaccgccuguuccgcaagagcaaccucaagcccuucgagcgggacaucuccaccgagaucuaccaggccggcagcacccccugcaacggggugaagggcuucaacugcuacuucccccugcaguccuacggguuccagccgaccaacggcgugggguaccagcccuaccggguggucgugcugagcuucgagcuccugcacgcccccgccacggugugcggccccaagaaguccaccaaccuggucaagaacaagugcgugaacuucaacuucaacggccucaccgggaccggcgugcugaccgagagcaacaagaaguuccugccguuccagcaguucgggcgcgacaucgccgacacgaccgacgcgguccgcgacccccagacccuggagauccucgacaucacccccugcagcuucggcgggguguccgugaucacgccgggcaccaacaccagcaaccaggucgccgugcuguaccagggcgugaacugcaccgagguccccguggccauccacgccgaccagcugacgcccaccuggcggguguacuccaccggcagcaacgucuuccagacccgcgccgggugccucaucggcgcggagcacgugaacaacuccuacgagugcgacauccccaucggggccggcaucugcgccagcuaccagacgcagaccaacuccccgcggcgcgcccggagcguggcgucccagagcaucaucgccuacaccaugucccugggcgccgagaacagcgucgccuacuccaacaacagcaucgccauccccaccaacuucacgaucuccgugaccaccgagauccugcccgugagcaugaccaagacgagcgucgacugcaccauguacaucugcggggacuccaccgagugcagcaaccuccugcugcaguacggcuccuucugcacccagcucaaccgcgcgcugacggggaucgccguggagcaggacaagaacacccaggagguguucgcccaggucaagcagaucuacaagacgcccccgaucaaggacuucggcggguucaacuucagccagauccugcccgaccccuccaagcccagcaagcgguccuucaucgaggaccuccuguucaacaaggugacccuggccgacgccggcuucaucaagcaguacggcgacugccucggggacaucgcggcccgcgaccugaucugcgcccagaaguucaacggccugaccgugcucccgccccugcugaccgacgagaugaucgcccaguacaccagcgcccuccuggcggggaccaucacguccggcuggaccuucggggccggcgccgcccugcagauccccuucgcgaugcagauggccuaccgguucaacggcaucggggucacccagaacgugcucuacgagaaccagaagcugaucgccaaccaguucaacagcgccaucggcaagauccaggacucccugagcuccaccgccagcgcgcucgggaagcugcaggacguggucaaccagaacgcccaggcccugaacacgcucgugaagcagcuguccagcaacuucggcgccaucuccagcgugcugaacgacauccucucccgccuggacccgcccgaggccgaggugcagaucgaccggcugaucaccgggcgccuccagagccugcagaccuacgugacccagcagcugauccgggcggccgagauccgcgccagcgccaaccucgccgcgaccaagauguccgagugcguccugggccagagcaagcggguggacuucugcggcaagggguaccaccugauguccuucccccagagcgccccgcacggcguggucuuccuccacgugacguacguccccgcccaggagaagaacuucaccaccgcccccgcgaucugccacgacgggaaggcccacuucccccgcgagggcguguucguguccaacgggacccacugguucgucacgcagcggaacuucuacgagccgcagaucaucaccaccgacaacaccuucgugagcggcaacugcgacguggucaucggcaucgugaacaacacgguguacgacccccugcagcccgagcuggacuccuucaaggaggagcucgacaaguacuucaagaaccacaccagccccgacgucgaccugggggacaucuccggcaucaacgccagcguggugaacauccagaaggagaucgaccgccugaacgaggucgccaagaaccucaacgagucccugaucgaccugcaggagcucgggaaguacgagcaguacaucaaguggccgugguacaucuggcugggcuucaucgccggccugaucgcgaucgugauggugaccaucaugcucugcugcaugaccagcugcugcuccugccugaaggggugcugcagcugcggcuccugcugcaaguucgacgaggacgacagcgagcccguccugaagggggugaagcuccacuacacgugaggacuagucccuguucccagagcccacuuuuuuuucuuuuuuugaaauaaaauagccugucuuucagaucucaaaggcucuuuucagagccaccaaaaaaaaaaaaaaaaaaaaaaaaaaaaaaaaaaaaaaaaaaaaaaaaaaaaaaaaaaaaaaaaaaaaaaaaaaaaaaaaaaaaaaaaaaaaaaaaaaaaa

SEQ ID NO: 23753 - RNA, 4191 nt, Artificial Sequence
  SARS-CoV-2/Wuhan/WIV05/2019__EPI_ISL_402128 spike protein mRNA gc (1-1273)(K986P_V987P_K986P_V987P_L18F_T20N_P26S_D138Y_R190S_K417T _E484K_N501Y_D614G_H655Y_T1027I)
aggagagggcgcuuggcuugcaaggacccugagcugcggcauugaagcacacccaacccaacucgacugaagucagccucacugaaccggaucugagaaucuucucucucugggcuugccagggcucuccgaaccuagcuagcauccucuucaauuccaacuagaaagcuuaccauguucguguuccugguccuccugccccuggugagcucccagugcgugaacuucaccaaccgcacgcagcugccgagcgccuacaccaacagcuucacccggggcgucuacuaccccgacaagguguuccgcuccagcgugcugcacuccacccaggaccucuuccugcccuucuucagcaacgucacgugguuccacgccauccacguguccgggaccaacggcaccaagcgguucgacaacccggugcugcccuucaacgacggggucuacuucgcgagcaccgagaaguccaacaucauccgcggcuggaucuucgggacgacccucgacagcaagacccagucccugcugaucgugaacaacgccaccaacguggucaucaaggugugcgaguuccaguucugcaacuaccccuuccucggcguguacuaccacaagaacaacaagagcuggauggaguccgaguuccgggucuacagcuccgccaacaacugcacguucgaguacgugagccagcccuuccugauggaccuggagggcaagcaggggaacuucaagaaccucagcgaguucguguucaagaacaucgacggcuacuucaagaucuacuccaagcacaccccgaucaaccugguccgggaccugccccagggguucagcgcccucgagccccugguggaccugcccaucggcaucaacaucacccgcuuccagacccuccuggcccugcaccgguccuaccucacgccgggggacagcagcuccggcuggaccgcgggcgccgccgccuacuacgugggguaccugcagccccgcaccuuccugcucaaguacaacgagaacggcaccaucacggacgcggucgacugcgcccuggacccccugagcgagaccaagugcacccucaaguccuucaccguggagaaggggaucuaccagacgagcaacuuccgggugcagcccaccgaguccaucguccgcuucccgaacaucaccaaccugugccccuucggcgagguguucaacgccacccgguucgccagcgucuacgccuggaaccgcaagcggaucuccaacugcguggcggacuacagcgugcuguacaacuccgccagcuucuccacguucaagugcuacggcgucagccccaccaagcucaacgaccugugcuucaccaacguguacgccgacuccuucgugauccgcggggacgagguccggcagaucgcccccggccagaccgggaccaucgccgacuacaacuacaagcugccggacgacuucacgggcugcgugaucgcguggaacagcaacaaccucgacuccaaggucgggggcaacuacaacuaccuguaccgccuguuccgcaagagcaaccucaagcccuucgagcgggacaucuccaccgagaucuaccaggccggcagcacccccugcaacggggugaagggcuucaacugcuacuucccccugcaguccuacggguuccagccgaccuacggcgugggguaccagcccuaccggguggucgugcugagcuucgagcuccugcacgcccccgccacggugugcggccccaagaaguccaccaaccuggucaagaacaagugcgugaacuucaacuucaacggccucaccgggaccggcgugcugaccgagagcaacaagaaguuccugccguuccagcaguucgggcgcgacaucgccgacacgaccgacgcgguccgcgacccccagacccuggagauccucgacaucacccccugcagcuucggcgggguguccgugaucacgccgggcaccaacaccagcaaccaggucgccgugcuguaccagggcgugaacugcaccgagguccccguggccauccacgccgaccagcugacgcccaccuggcggguguacuccaccggcagcaacgucuuccagacccgcgccgggugccucaucggcgcggaguacgugaacaacuccuacgagugcgacauccccaucggggccggcaucugcgccagcuaccagacgcagaccaacuccccgcggcgcgcccggagcguggcgucccagagcaucaucgccuacaccaugucccugggcgccgagaacagcgucgccuacuccaacaacagcaucgccauccccaccaacuucacgaucuccgugaccaccgagauccugcccgugagcaugaccaagacgagcgucgacugcaccauguacaucugcggggacuccaccgagugcagcaaccuccugcugcaguacggcuccuucugcacccagcucaaccgcgcgcugacggggaucgccguggagcaggacaagaacacccaggagguguucgcccaggucaagcagaucuacaagacgcccccgaucaaggacuucggcggguucaacuucagccagauccugcccgaccccuccaagcccagcaagcgguccuucaucgaggaccuccuguucaacaaggugacccuggccgacgccggcuucaucaagcaguacggcgacugccucggggacaucgcggcccgcgaccugaucugcgcccagaaguucaacggccugaccgugcucccgccccugcugaccgacgagaugaucgcccaguacaccagcgcccuccuggcggggaccaucacguccggcuggaccuucggggccggcgccgcccugcagauccccuucgcgaugcagauggccuaccgguucaacggcaucggggucacccagaacgugcucuacgagaaccagaagcugaucgccaaccaguucaacagcgccaucggcaagauccaggacucccugagcuccaccgccagcgcgcucgggaagcugcaggacguggucaaccagaacgcccaggcccugaacacgcucgugaagcagcuguccagcaacuucggcgccaucuccagcgugcugaacgacauccucucccgccuggacccgcccgaggccgaggugcagaucgaccggcugaucaccgggcgccuccagagccugcagaccuacgugacccagcagcugauccgggcggccgagauccgcgccagcgccaaccucgccgcgaucaagauguccgagugcguccugggccagagcaagcggguggacuucugcggcaagggguaccaccugauguccuucccccagagcgccccgcacggcguggucuuccuccacgugacguacguccccgcccaggagaagaacuucaccaccgcccccgcgaucugccacgacgggaaggcccacuucccccgcgagggcguguucguguccaacgggacccacugguucgucacgcagcggaacuucuacgagccgcagaucaucaccaccgacaacaccuucgugagcggcaacugcgacguggucaucggcaucgugaacaacacgguguacgacccccugcagcccgagcuggacuccuucaaggaggagcucgacaaguacuucaagaaccacaccagccccgacgucgaccugggggacaucuccggcaucaacgccagcguggugaacauccagaaggagaucgaccgccugaacgaggucgccaagaaccucaacgagucccugaucgaccugcaggagcucgggaaguacgagcaguacaucaaguggccgugguacaucuggcugggcuucaucgccggccugaucgcgaucgugauggugaccaucaugcucugcugcaugaccagcugcugcuccugccugaaggggugcugcagcugcggcuccugcugcaaguucgacgaggacgacagcgagcccguccugaagggggugaagcuccacuacacgugaggacuagucccuguucccagagcccacuuuuuuuucuuuuuuugaaauaaaauagccugucuuucagaucucaaaggcucuuuucagagccaccaaaaaaaaaaaaaaaaaaaaaaaaaaaaaaaaaaaaaaaaaaaaaaaaaaaaaaaaaaaaaaaaaaaaaaaaaaaaaaaaaaaaaaaaaaaaaaaaaaaaa

SEQ ID NO: 23754 - RNA, 4191 nt, Artificial Sequence
  SARS-CoV-2/Wuhan/WIV05/2019__EPI_ISL_402128 spike protein mRNA gc (1-1273)(K986P_V987P_K986P_V987P_S13I_W152C_L452R_D614G)
aggagagggcgcuuggcuugcaaggacccugagcugcggcauugaagcacacccaacccaacucgacugaagucagccucacugaaccggaucugagaaucuucucucucugggcuugccagggcucuccgaaccuagcuagcauccucuucaauuccaacuagaaagcuuaccauguucguguuccugguccuccugccccuggugagcauccagugcgugaaccucaccacccgcacgcagcugccgcccgccuacaccaacagcuucacccggggcgucuacuaccccgacaagguguuccgcuccagcgugcugcacuccacccaggaccucuuccugcccuucuucagcaacgucacgugguuccacgccauccacguguccgggaccaacggcaccaagcgguucgacaacccggugcugcccuucaacgacggggucuacuucgcgagcaccgagaaguccaacaucauccgcggcuggaucuucgggacgacccucgacagcaagacccagucccugcugaucgugaacaacgccaccaacguggucaucaaggugugcgaguuccaguucugcaacgaccccuuccucggcguguacuaccacaagaacaacaagagcugcauggaguccgaguuccgggucuacagcuccgccaacaacugcacguucgaguacgugagccagcccuuccugauggaccuggagggcaagcaggggaacuucaagaaccuccgcgaguucguguucaagaacaucgacggcuacuucaagaucuacuccaagcacaccccgaucaaccugguccgggaccugccccagggguucagcgcccucgagccccugguggaccugcccaucggcaucaacaucacccgcuuccagacccuccuggcccugcaccgguccuaccucacgccgggggacagcagcuccggcuggaccgcgggcgccgccgccuacuacgugggguaccugcagccccgcaccuuccugcucaaguacaacgagaacggcaccaucacggacgcggucgacugcgcccuggacccccugagcgagaccaagugcacccucaaguccuucaccguggagaaggggaucuaccagacgagcaacuuccgggugcagcccaccgaguccaucguccgcuucccgaacaucaccaaccugugccccuucggcgagguguucaacgccacccgguucgccagcgucuacgccuggaaccgcaagcggaucuccaacugcguggcggacuacagcgugcuguacaacuccgccagcuucuccacguucaagugcuacggcgucagccccaccaagcucaacgaccugugcuucaccaacguguacgccgacuccuucgugauccgcggggacgagguccggcagaucgcccccggccagaccgggaagaucgccgacuacaacuacaagcugccggacgacuucacgggcugcgugaucgcguggaacagcaacaaccucgacuccaaggucgggggcaacuacaacuaccgcuaccgccuguuccgcaagagcaaccucaagcccuucgagcgggacaucuccaccgagaucuaccaggccggcagcacccccugcaacgggguggagggcuucaacugcuacuucccccugcaguccuacggguuccagccgaccaacggcgugggguaccagcccuaccggguggucgugcugagcuucgagcuccugcacgcccccgccacggugugcggccccaagaaguccaccaaccuggucaagaacaagugcgugaacuucaacuucaacggccucaccgggaccggcgugcugaccgagagcaacaagaaguuccugccguuccagcaguucgggcgcgacaucgccgacacgaccgacgcgguccgcgacccccagacccuggagauccucgacaucacccccugcagcuucggcgggguguccgugaucacgccgggcaccaacaccagcaaccaggucgccgugcuguaccagggcgugaacugcaccgagguccccguggccauccacgccgaccagcugacgcccaccuggcggguguacuccaccggcagcaacgucuuccagacccgcgccgggugccucaucggcgcggagcacgugaacaacuccuacgagugcgacauccccaucggggccggcaucugcgccagcuaccagacgcagaccaacuccccgcggcgcgcccggagcguggcgucccagagcaucaucgccuacaccaugucccugggcgccgagaacagcgucgccuacuccaacaacagcaucgccauccccaccaacuucacgaucuccgugaccaccgagauccugcccgugagcaugaccaagacgagcgucgacugcaccauguacaucugcggggacuccaccgagugcagcaaccuccugcugcaguacggcuccuucugcacccagcucaaccgcgcgcugacggggaucgccguggagcaggacaagaacacccaggagguguucgcccaggucaagcagaucuacaagacgcccccgaucaaggacuucggcggguucaacuucagccagauccugcccgaccccuccaagcccagcaagcgguccuucaucgaggaccuccuguucaacaaggugacccuggccgacgccggcuucaucaagcaguacggcgacugccucggggacaucgcggcccgcgaccugaucugcgcccagaaguucaacggccugaccgugcucccgccccugcugaccgacgagaugaucgcccaguacaccagcgcccuccuggcggggaccaucacguccggcuggaccuucggggccggcgccgcccugcagauccccuucgcgaugcagauggccuaccgguucaacggcaucggggucacccagaacgugcucuacgagaaccagaagcugaucgccaaccaguucaacagcgccaucggcaagauccaggacucccugagcuccaccgccagcgcgcucgggaagcugcaggacguggucaaccagaacgcccaggcccugaacacgcucgugaagcagcuguccagcaacuucggcgccaucuccagcgugcugaacgacauccucucccgccuggacccgcccgaggccgaggugcagaucgaccggcugaucaccgggcgccuccagagccugcagaccuacgugacccagcagcugauccgggcggccgagauccgcgccagcgccaaccucgccgcgaccaagauguccgagugcguccugggccagagcaagcggguggacuucugcggcaagggguaccaccugauguccuucccccagagcgccccgcacggcguggucuuccuccacgugacguacguccccgcccaggagaagaacuucaccaccgcccccgcgaucugccacgacgggaaggcccacuucccccgcgagggcguguucguguccaacgggacccacugguucgucacgcagcggaacuucuacgagccgcagaucaucaccaccgacaacaccuucgugagcggcaacugcgacguggucaucggcaucgugaacaacacgguguacgacccccugcagcccgagcuggacuccuucaaggaggagcucgacaaguacuucaagaaccacaccagccccgacgucgaccugggggacaucuccggcaucaacgccagcguggugaacauccagaaggagaucgaccgccugaacgaggucgccaagaaccucaacgagucccugaucgaccugcaggagcucgggaaguacgagcaguacaucaaguggccgugguacaucuggcugggcuucaucgccggccugaucgcgaucgugauggugaccaucaugcucugcugcaugaccagcugcugcuccugccugaaggggugcugcagcugcggcuccugcugcaaguucgacgaggacgacagcgagcccguccugaagggggugaagcuccacuacacgugaggacuagucccuguucccagagcccacuuuuuuuucuuuuuuugaaauaaaauagccugucuuucagaucucaaaggcucuuuucagagccaccaaaaaaaaaaaaaaaaaaaaaaaaaaaaaaaaaaaaaaaaaaaaaaaaaaaaaaaaaaaaaaaaaaaaaaaaaaaaaaaaaaaaaaaaaaaaaaaaaaaaa

SEQ ID NO: 23755 - RNA, 4191 nt, Artificial Sequence
  SARS-CoV-2/Wuhan/WIV05/2019__EPI_ISL_402128 spike protein mRNA gc (1-1273)(K986P_V987P)
aggagagggcgcuuggcuugcaaggacccugagcugcggcauugaagcacacccaacccaacucgacugaagucagccucacugaaccggaucugagaaucuucucucucugggcuugccagggcucuccgaaccuagcuagcauccucuucaauuccaacuagaaagcuuaccauguucguguuccugguccuccugccccuggugagcucccagugcgugaaccucaccacccgcacgcagcugccgcccgccuacaccaacagcuucacccggggcgucuacuaccccgacaagguguuccgcuccagcgugcugcacuccacccaggaccucuuccugcccuucuucagcaacgucacgugguuccacgccauccacguguccgggaccaacggcaccaagcgguucgacaacccggugcugcccuucaacgacggggucuacuucgcgagcaccgagaaguccaacaucauccgcggcuggaucuucgggacgacccucgacagcaagacccagucccugcugaucgugaacaacgccaccaacguggucaucaaggugugcgaguuccaguucugcaacgaccccuuccucggcguguacuaccacaagaacaacaagagcuggauggaguccgaguuccgggucuacagcuccgccaacaacugcacguucgaguacgugagccagcccuuccugauggaccuggagggcaagcaggggaacuucaagaaccuccgcgaguucguguucaagaacaucgacggcuacuucaagaucuacuccaagcacaccccgaucaaccugguccgggaccugccccagggguucagcgcccucgagccccugguggaccugcccaucggcaucaacaucacccgcuuccagacccuccuggcccugcaccgguccuaccucacgccgggggacagcagcuccggcuggaccgcgggcgccgccgccuacuacgugggguaccugcagccccgcaccuuccugcucaaguacaacgagaacggcaccaucacggacgcggucgacugcgcccuggacccccugagcgagaccaagugcacccucaaguccuucaccguggagaaggggaucuaccagacgagcaacuuccgggugcagcccaccgaguccaucguccgcuucccgaacaucaccaaccugugccccuucggcgagguguucaacgccacccgguucgccagcgucuacgccuggaaccgcaagcggaucuccaacugcguggcggacuacagcgugcuguacaacuccgccagcuucuccacguucaagugcuacggcgucagccccaccaagcucaacgaccugugcuucaccaacguguacgccgacuccuucgugauccgcggggacgagguccggcagaucgcccccggccagaccgggaagaucgccgacuacaacuacaagcugccggacgacuucacgggcugcgugaucgcguggaacagcaacaaccucgacuccaaggucgggggcaacuacaacuaccuguaccgccuguuccgcaagagcaaccucaagcccuucgagcgggacaucuccaccgagaucuaccaggccggcagcacccccugcaacgggguggagggcuucaacugcuacuucccccugcaguccuacggguuccagccgaccaacggcgugggguaccagcccuaccggguggucgugcugagcuucgagcuccugcacgcccccgccacggugugcggccccaagaaguccaccaaccuggucaagaacaagugcgugaacuucaacuucaacggccucaccgggaccggcgugcugaccgagagcaacaagaaguuccugccguuccagcaguucgggcgcgacaucgccgacacgaccgacgcgguccgcgacccccagacccuggagauccucgacaucacccccugcagcuucggcgggguguccgugaucacgccgggcaccaacaccagcaaccaggucgccgugcuguaccaggacgugaacugcaccgagguccccguggccauccacgccgaccagcugacgcccaccuggcggguguacuccaccggcagcaacgucuuccagacccgcgccgggugccucaucggcgcggagcacgugaacaacuccuacgagugcgacauccccaucggggccggcaucugcgccagcuaccagacgcagaccaacuccccgcggcgcgcccggagcguggcgucccagagcaucaucgccuacaccaugucccugggcgccgagaacagcgucgccuacuccaacaacagcaucgccauccccaccaacuucacgaucuccgugaccaccgagauccugcccgugagcaugaccaagacgagcgucgacugcaccauguacaucugcggggacuccaccgagugcagcaaccuccugcugcaguacggcuccuucugcacccagcucaaccgcgcgcugacggggaucgccguggagcaggacaagaacacccaggagguguucgcccaggucaagcagaucuacaagacgcccccgaucaaggacuucggcggguucaacuucagccagauccugcccgaccccuccaagcccagcaagcgguccuucaucgaggaccuccuguucaacaaggugacccuggccgacgccggcuucaucaagcaguacggcgacugccucggggacaucgcggcccgcgaccugaucugcgcccagaaguucaacggccugaccgugcucccgccccugcugaccgacgagaugaucgcccaguacaccagcgcccuccuggcggggaccaucacguccggcuggaccuucggggccggcgccgcccugcagauccccuucgcgaugcagauggccuaccgguucaacggcaucggggucacccagaacgugcucuacgagaaccagaagcugaucgccaaccaguucaacagcgccaucggcaagauccaggacucccugagcuccaccgccagcgcgcucgggaagcugcaggacguggucaaccagaacgcccaggcccugaacacgcucgugaagcagcuguccagcaacuucggcgccaucuccagcgugcugaacgacauccucucccgccuggacccgcccgaggccgagguccagaucgaccggcugaucaccgggcgccuccagagccugcagaccuacgugacccagcagcugauccgggcggccgagauccgcgccagcgccaaccucgccgcgaccaagauguccgagugcgugcugggccagagcaagcgggucgacuucugcggcaagggguaccaccugauguccuucccccagagcgcgccccacggcgugguguuccuccacgucacguacgugcccgcccaggagaagaacuucaccaccgccccggccaucugccacgacgggaaggcccacuucccccgcgagggcgucuucguguccaacgggacccacugguucgugacgcagcggaacuucuacgagccccagaucaucaccaccgacaacaccuucgucagcggcaacugcgacguggugaucggcaucgucaacaacacgguguacgacccccugcagccggagcuggacuccuucaaggaggagcucgacaaguacuucaagaaccacaccagccccgacguggaccugggggacaucuccggcaucaacgccagcgucgugaacauccagaaggagaucgaccgccugaacgagguggccaagaaccucaacgagucccugaucgaccugcaggagcucgggaaguacgagcaguacaucaaguggcccugguacaucuggcugggcuucaucgccggccugaucgcgaucgucauggugaccaucaugcucugcugcaugaccagcugcugcuccugccugaaggggugcugcagcugcggcuccugcugcaaguucgacgaggacgacagcgagccggugcugaagggggucaagcuccacuacacgugaggacuagucccuguucccagagcccacuuuuuuuucuuuuuuugaaauaaaauagccugucuuucagaucucaaaggcucuuuucagagccaccaaaaaaaaaaaaaaaaaaaaaaaaaaaaaaaaaaaaaaaaaaaaaaaaaaaaaaaaaaaaaaaaaaaaaaaaaaaaaaaaaaaaaaaaaaaaaaaaaaaaa

SEQ ID NO: 23756 - RNA, 4191 nt, Artificial Sequence
  SARS-CoV-2/Wuhan/WIV05/2019__EPI_ISL_402128 spike protein mRNA gc (1-1273)(K986P_V987P_ D614G)
aggagagggcgcuuggcuugcaaggacccugagcugcggcauugaagcacacccaacccaacucgacugaagucagccucacugaaccggaucugagaaucuucucucucugggcuugccagggcucuccgaaccuagcuagcauccucuucaauuccaacuagaaagcuuaccauguucguguuccugguccuccugccccuggugagcucccagugcgugaaccucaccacccgcacgcagcugccgcccgccuacaccaacagcuucacccggggcgucuacuaccccgacaagguguuccgcuccagcgugcugcacuccacccaggaccucuuccugcccuucuucagcaacgucacgugguuccacgccauccacguguccgggaccaacggcaccaagcgguucgacaacccggugcugcccuucaacgacggggucuacuucgcgagcaccgagaaguccaacaucauccgcggcuggaucuucgggacgacccucgacagcaagacccagucccugcugaucgugaacaacgccaccaacguggucaucaaggugugcgaguuccaguucugcaacgaccccuuccucggcguguacuaccacaagaacaacaagagcuggauggaguccgaguuccgggucuacagcuccgccaacaacugcacguucgaguacgugagccagcccuuccugauggaccuggagggcaagcaggggaacuucaagaaccuccgcgaguucguguucaagaacaucgacggcuacuucaagaucuacuccaagcacaccccgaucaaccugguccgggaccugccccagggguucagcgcccucgagccccugguggaccugcccaucggcaucaacaucacccgcuuccagacccuccuggcccugcaccgguccuaccucacgccgggggacagcagcuccggcuggaccgcgggcgccgccgccuacuacgugggguaccugcagccccgcaccuuccugcucaaguacaacgagaacggcaccaucacggacgcggucgacugcgcccuggacccccugagcgagaccaagugcacccucaaguccuucaccguggagaaggggaucuaccagacgagcaacuuccgggugcagcccaccgaguccaucguccgcuucccgaacaucaccaaccugugccccuucggcgagguguucaacgccacccgguucgccagcgucuacgccuggaaccgcaagcggaucuccaacugcguggcggacuacagcgugcuguacaacuccgccagcuucuccacguucaagugcuacggcgucagccccaccaagcucaacgaccugugcuucaccaacguguacgccgacuccuucgugauccgcggggacgagguccggcagaucgcccccggccagaccgggaagaucgccgacuacaacuacaagcugccggacgacuucacgggcugcgugaucgcguggaacagcaacaaccucgacuccaaggucgggggcaacuacaacuaccuguaccgccuguuccgcaagagcaaccucaagcccuucgagcgggacaucuccaccgagaucuaccaggccggcagcacccccugcaacgggguggagggcuucaacugcuacuucccccugcaguccuacggguuccagccgaccaacggcgugggguaccagcccuaccggguggucgugcugagcuucgagcuccugcacgcccccgccacggugugcggccccaagaaguccaccaaccuggucaagaacaagugcgugaacuucaacuucaacggccucaccgggaccggcgugcugaccgagagcaacaagaaguuccugccguuccagcaguucgggcgcgacaucgccgacacgaccgacgcgguccgcgacccccagacccuggagauccucgacaucacccccugcagcuucggcgggguguccgugaucacgccgggcaccaacaccagcaaccaggucgccgugcuguaccagggcgugaacugcaccgagguccccguggccauccacgccgaccagcugacgcccaccuggcggguguacuccaccgggagcaacgucuuccagacccgcgccggcugccucaucggggcggagcacgugaacaacuccuacgagugcgacauccccaucggcgccggcaucugcgccagcuaccagacgcagaccaacuccccgcggcgcgcccggagcguggcgucccagagcaucaucgccuacaccaugucccugggggccgagaacagcgucgccuacuccaacaacagcaucgccauccccaccaacuucacgaucuccgugaccaccgagauccugcccgugagcaugaccaagacgagcgucgacugcaccauguacaucugcggcgacuccaccgagugcagcaaccuccugcugcaguacggguccuucugcacccagcucaaccgcgcgcugacgggcaucgccguggagcaggacaagaacacccaggagguguucgcccaggucaagcagaucuacaagacgcccccgaucaaggacuucgggggcuucaacuucagccagauccugcccgaccccuccaagcccagcaagcgguccuucaucgaggaccuccuguucaacaaggugacccuggccgacgccggcuucaucaagcaguacggggacugccucggcgacaucgcggcccgcgaccugaucugcgcccagaaguucaacgggcugaccgugcucccgccccugcugaccgacgagaugaucgcccaguacaccagcgcccuccuggcgggcaccaucacguccggguggaccuucggcgccggcgccgcccugcagauccccuucgcgaugcagauggccuaccgguucaacgggaucggcgucacccagaacgugcucuacgagaaccagaagcugaucgccaaccaguucaacagcgccaucgggaagauccaggacucccugagcuccaccgccagcgcgcucggcaagcugcaggacguggucaaccagaacgcccaggcccugaacacgcucgugaagcagcuguccagcaacuucggggccaucuccagcgugcugaacgacauccucucccgccuggacccgcccgaggccgagguccagaucgaccggcugaucaccggccgccuccagagccugcagaccuacgugacccagcagcugauccgggcggccgagauccgcgccagcgccaaccucgccgcgaccaagauguccgagugcgugcugggccagagcaagcgggucgacuucugcgggaagggcuaccaccugauguccuucccccagagcgcgccccacggggugguguuccuccacgucacguacgugcccgcccaggagaagaacuucaccaccgccccggccaucugccacgacggcaaggcccacuucccccgcgagggggucuucguguccaacggcacccacugguucgugacgcagcggaacuucuacgagccccagaucaucaccaccgacaacaccuucgucagcggcaacugcgacguggugaucgggaucgucaacaacacgguguacgacccccugcagccggagcuggacuccuucaaggaggagcucgacaaguacuucaagaaccacaccagccccgacguggaccugggcgacaucuccgggaucaacgccagcgucgugaacauccagaaggagaucgaccgccugaacgagguggccaagaaccucaacgagucccugaucgaccugcaggagcucggcaaguacgagcaguacaucaaguggcccugguacaucuggcugggcuucaucgccgggcugaucgcgaucgucauggugaccaucaugcucugcugcaugaccagcugcugcuccugccugaagggcugcugcagcugcggguccugcugcaaguucgacgaggacgacagcgagccggugcugaagggcgucaagcuccacuacacgugaggacuagucccuguucccagagcccacuuuuuuuucuuuuuuugaaauaaaauagccugucuuucagaucucaaaggcucuuuucagagccaccaaaaaaaaaaaaaaaaaaaaaaaaaaaaaaaaaaaaaaaaaaaaaaaaaaaaaaaaaaaaaaaaaaaaaaaaaaaaaaaaaaaaaaaaaaaaaaaaaaaaa

SEQ ID NO: 23757 - RNA, 4191 nt, Artificial Sequence
  SARS-CoV-2/Wuhan/WIV05/2019__EPI_ISL_402128 spike protein mRNA gc (1-1273)(K986P_V987P_A222V_D614G)
aggagagggcgcuuggcuugcaaggacccugagcugcggcauugaagcacacccaacccaacucgacugaagucagccucacugaaccggaucugagaaucuucucucucugggcuugccagggcucuccgaaccuagcuagcauccucuucaauuccaacuagaaagcuuaccauguucguguuccugguccuccugccccuggugagcucccagugcgugaaccucaccacccgcacgcagcugccgcccgccuacaccaacagcuucacccggggcgucuacuaccccgacaagguguuccgcuccagcgugcugcacuccacccaggaccucuuccugcccuucuucagcaacgucacgugguuccacgccauccacguguccgggaccaacggcaccaagcgguucgacaacccggugcugcccuucaacgacggggucuacuucgcgagcaccgagaaguccaacaucauccgcggcuggaucuucgggacgacccucgacagcaagacccagucccugcugaucgugaacaacgccaccaacguggucaucaaggugugcgaguuccaguucugcaacgaccccuuccucggcguguacuaccacaagaacaacaagagcuggauggaguccgaguuccgggucuacagcuccgccaacaacugcacguucgaguacgugagccagcccuuccugauggaccuggagggcaagcaggggaacuucaagaaccuccgcgaguucguguucaagaacaucgacggcuacuucaagaucuacuccaagcacaccccgaucaaccugguccgggaccugccccagggguucagcgugcucgagccccugguggaccugcccaucggcaucaacaucacccgcuuccagacccuccuggcccugcaccgguccuaccucacgccgggggacagcagcuccggcuggaccgccggcgcggccgccuacuacgucggguaccugcagccccgcaccuuccugcucaaguacaacgagaacggcaccaucacggacgccguggacugcgcgcuggacccccugagcgagaccaagugcacccucaaguccuucaccguggagaaggggaucuaccagacgagcaacuuccggguccagcccaccgaguccaucgugcgcuucccgaacaucaccaaccugugccccuucggcgaggucuucaacgccacccgguucgccagcguguacgccuggaaccgcaagcggaucuccaacugcguggccgacuacagcguccuguacaacuccgcgagcuucuccacguucaagugcuacggcgugagccccaccaagcucaacgaccugugcuucaccaacguguacgccgacuccuucgucauccgcggggacgaggugcggcagaucgcccccggccagaccgggaagaucgccgacuacaacuacaagcugccggacgacuucacgggcugcgugaucgccuggaacagcaacaaccucgacuccaaggucgggggcaacuacaacuaccuguaccgccuguuccgcaagagcaaccucaagcccuucgagcgggacaucuccaccgagaucuaccaggcgggcagcacccccugcaacgggguggagggcuucaacugcuacuucccccugcaguccuacggguuccagccgaccaacggcgugggguaccagcccuaccgggucguggugcugagcuucgagcuccugcacgcccccgccacggucugcggccccaagaaguccaccaaccuggugaagaacaagugcgugaacuucaacuucaacggccucaccgggaccggcguccugaccgagagcaacaagaaguuccugccguuccagcaguucgggcgcgacaucgccgacacgaccgacgccgugcgcgacccccagacccuggagauccucgacaucacccccugcagcuucggcgggguguccgucaucacgccgggcaccaacaccagcaaccagguggcggugcuguaccagggcgucaacugcaccgaggugcccguggccauccacgccgaccagcugacgcccaccuggcgggucuacuccaccgggagcaacguguuccagacccgcgccggcugccucaucggggccgagcacgugaacaacuccuacgagugcgacauccccaucggcgcgggcaucugcgccagcuaccagacgcagaccaacuccccgcggcgcgcccggagcgucgccucccagagcaucaucgcguacaccaugucccugggggccgagaacagcguggccuacuccaacaacagcaucgccauccccaccaacuucacgaucuccgugaccaccgagauccugcccgucagcaugaccaagacgagcguggacugcaccauguacaucugcggcgacuccaccgagugcagcaaccuccugcugcaguacggguccuucugcacccagcucaaccgcgcccugacgggcaucgcgguggagcaggacaagaacacccaggaggucuucgcccaggugaagcagaucuacaagacgcccccgaucaaggacuucgggggcuucaacuucagccagauccugcccgaccccuccaagcccagcaagcgguccuucaucgaggaccuccuguucaacaaggugacccuggccgacgccggcuucaucaagcaguacggggacugccucggcgacaucgccgcgcgcgaccugaucugcgcccagaaguucaacgggcugaccguccucccgccccugcugaccgacgagaugaucgcccaguacaccagcgcccuccuggccggcaccaucacguccggguggaccuucggcgcgggcgccgcccugcagauccccuucgccaugcagauggcguaccgguucaacgggaucggcgugacccagaacgugcucuacgagaaccagaagcugaucgccaaccaguucaacagcgccaucgggaagauccaggacucccugagcuccaccgccagcgcccucggcaagcugcaggacgucgugaaccagaacgcgcaggcccugaacacgcucgugaagcagcuguccagcaacuucggggccaucuccagcguccugaacgacauccucucccgccuggacccgcccgaggccgaggugcagaucgaccggcugaucaccggccgccuccagagccugcagaccuacgugacccagcagcugauccgggccgcggagauccgcgccagcgccaaccucgccgccaccaagauguccgagugcguccugggccagagcaagcggguggacuucugcgggaagggcuaccaccugauguccuucccccagagcgcgccccacgggguggucuuccuccacgugacguacguccccgcccaggagaagaacuucaccaccgccccggccaucugccacgacggcaaggcgcacuucccccgcgaggggguguucguguccaacggcacccacugguucgucacgcagcggaacuucuacgagccccagaucaucaccaccgacaacaccuucgugagcggcaacugcgacguggucaucgggaucgugaacaacacgguguacgacccccugcagccggagcuggacuccuucaaggaggagcucgacaaguacuucaagaaccacaccagccccgacgucgaccugggcgacaucuccgggaucaacgccagcguggugaacauccagaaggagaucgaccgccugaacgaggucgccaagaaccucaacgagucccugaucgaccugcaggagcucggcaaguacgagcaguacaucaaguggcccugguacaucuggcugggcuucaucgccgggcugaucgccaucgugauggugaccaucaugcucugcugcaugaccagcugcugcuccugccugaagggcugcugcagcugcggguccugcugcaaguucgacgaggacgacagcgagccgguccugaagggcgugaagcuccacuacacgugaggacuagucccuguucccagagcccacuuuuuuuucuuuuuuugaaauaaaauagccugucuuucagaucucaaaggcucuuuucagagccaccaaaaaaaaaaaaaaaaaaaaaaaaaaaaaaaaaaaaaaaaaaaaaaaaaaaaaaaaaaaaaaaaaaaaaaaaaaaaaaaaaaaaaaaaaaaaaaaaaaaaa

SEQ ID NO: 23758 - RNA, 4191 nt, Artificial Sequence
  SARS-CoV-2/Wuhan/WIV05/2019__EPI_ISL_402128 spike protein mRNA gc (1-1273)(K986P_V987P_N439K_D614G)
aggagagggcgcuuggcuugcaaggacccugagcugcggcauugaagcacacccaacccaacucgacugaagucagccucacugaaccggaucugagaaucuucucucucugggcuugccagggcucuccgaaccuagcuagcauccucuucaauuccaacuagaaagcuuaccauguucguguuccugguccuccugccccuggugagcucccagugcgugaaccucaccacccgcacgcagcugccgcccgccuacaccaacagcuucacccggggcgucuacuaccccgacaagguguuccgcuccagcgugcugcacuccacccaggaccucuuccugcccuucuucagcaacgucacgugguuccacgccauccacguguccgggaccaacggcaccaagcgguucgacaacccggugcugcccuucaacgacggggucuacuucgcgagcaccgagaaguccaacaucauccgcggcuggaucuucgggacgacccucgacagcaagacccagucccugcugaucgugaacaacgccaccaacguggucaucaaggugugcgaguuccaguucugcaacgaccccuuccucggcguguacuaccacaagaacaacaagagcuggauggaguccgaguuccgggucuacagcuccgccaacaacugcacguucgaguacgugagccagcccuuccugauggaccuggagggcaagcaggggaacuucaagaaccuccgcgaguucguguucaagaacaucgacggcuacuucaagaucuacuccaagcacaccccgaucaaccugguccgggaccugccccagggguucagcgcccucgagccccugguggaccugcccaucggcaucaacaucacccgcuuccagacccuccuggcccugcaccgguccuaccucacgccgggggacagcagcuccggcuggaccgcgggcgccgccgccuacuacgugggguaccugcagccccgcaccuuccugcucaaguacaacgagaacggcaccaucacggacgcggucgacugcgcccuggacccccugagcgagaccaagugcacccucaaguccuucaccguggagaaggggaucuaccagacgagcaacuuccgggugcagcccaccgaguccaucguccgcuucccgaacaucaccaaccugugccccuucggcgagguguucaacgccacccgguucgccagcgucuacgccuggaaccgcaagcggaucuccaacugcguggcggacuacagcgugcuguacaacuccgccagcuucuccacguucaagugcuacggcgucagccccaccaagcucaacgaccugugcuucaccaacguguacgccgacuccuucgugauccgcggggacgagguccggcagaucgcccccggccagaccgggaagaucgccgacuacaacuacaagcugccggacgacuucacgggcugcgugaucgcguggaacagcaagaaccucgacuccaaggucgggggcaacuacaacuaccuguaccgccuguuccgcaagagcaaccucaagcccuucgagcgggacaucuccaccgagaucuaccaggccggcagcacccccugcaacgggguggagggcuucaacugcuacuucccccugcaguccuacggguuccagccgaccaacggcgugggguaccagcccuaccggguggucgugcugagcuucgagcuccugcacgcccccgccacggugugcggccccaagaaguccaccaaccuggucaagaacaagugcgugaacuucaacuucaacggccucaccgggaccggcgugcugaccgagagcaacaagaaguuccugccguuccagcaguucgggcgcgacaucgccgacacgaccgacgcgguccgcgacccccagacccuggagauccucgacaucacccccugcagcuucggcgggguguccgugaucacgccgggcaccaacaccagcaaccaggucgccgugcuguaccagggcgugaacugcaccgagguccccguggccauccacgccgaccagcugacgcccaccuggcggguguacuccaccgggagcaacgucuuccagacccgcgccggcugccucaucggggcggagcacgugaacaacuccuacgagugcgacauccccaucggcgccggcaucugcgccagcuaccagacgcagaccaacuccccgcggcgcgcccggagcguggcgucccagagcaucaucgccuacaccaugucccugggggccgagaacagcgucgccuacuccaacaacagcaucgccauccccaccaacuucacgaucuccgugaccaccgagauccugcccgugagcaugaccaagacgagcgucgacugcaccauguacaucugcggcgacuccaccgagugcagcaaccuccugcugcaguacggguccuucugcacccagcucaaccgcgcgcugacgggcaucgccguggagcaggacaagaacacccaggagguguucgcccaggucaagcagaucuacaagacgcccccgaucaaggacuucgggggcuucaacuucagccagauccugcccgaccccuccaagcccagcaagcgguccuucaucgaggaccuccuguucaacaaggugacccuggccgacgccggcuucaucaagcaguacggggacugccucggcgacaucgcggcccgcgaccugaucugcgcccagaaguucaacgggcugaccgugcucccgccccugcugaccgacgagaugaucgcccaguacaccagcgcccuccuggcgggcaccaucacguccggguggaccuucggcgccggcgccgcccugcagauccccuucgcgaugcagauggccuaccgguucaacgggaucggcgucacccagaacgugcucuacgagaaccagaagcugaucgccaaccaguucaacagcgccaucgggaagauccaggacucccugagcuccaccgccagcgcgcucggcaagcugcaggacguggucaaccagaacgcccaggcccugaacacgcucgugaagcagcuguccagcaacuucggggccaucuccagcgugcugaacgacauccucucccgccuggacccgcccgaggccgagguccagaucgaccggcugaucaccggccgccuccagagccugcagaccuacgugacccagcagcugauccgggcggccgagauccgcgccagcgccaaccucgccgcgaccaagauguccgagugcgugcugggccagagcaagcgggucgacuucugcgggaagggcuaccaccugauguccuucccccagagcgcgccccacggggugguguuccuccacgucacguacgugcccgcccaggagaagaacuucaccaccgccccggccaucugccacgacggcaaggcccacuucccccgcgagggggucuucguguccaacggcacccacugguucgugacgcagcggaacuucuacgagccccagaucaucaccaccgacaacaccuucgucagcggcaacugcgacguggugaucgggaucgucaacaacacgguguacgacccccugcagccggagcuggacuccuucaaggaggagcucgacaaguacuucaagaaccacaccagccccgacguggaccugggcgacaucuccgggaucaacgccagcgucgugaacauccagaaggagaucgaccgccugaacgagguggccaagaaccucaacgagucccugaucgaccugcaggagcucggcaaguacgagcaguacaucaaguggcccugguacaucuggcugggcuucaucgccgggcugaucgcgaucgucauggugaccaucaugcucugcugcaugaccagcugcugcuccugccugaagggcugcugcagcugcggguccugcugcaaguucgacgaggacgacagcgagccggugcugaagggcgucaagcuccacuacacgugaggacuagucccuguucccagagcccacuuuuuuuucuuuuuuugaaauaaaauagccugucuuucagaucucaaaggcucuuuucagagccaccaaaaaaaaaaaaaaaaaaaaaaaaaaaaaaaaaaaaaaaaaaaaaaaaaaaaaaaaaaaaaaaaaaaaaaaaaaaaaaaaaaaaaaaaaaaaaaaaaaaaa

SEQ ID NO: 23759 - RNA, 4191 nt, Artificial Sequence
  SARS-CoV-2/Wuhan/WIV05/2019__EPI_ISL_402128 spike protein mRNA gc (1-1273)(K986P_V987P_S477N_D614G)
aggagagggcgcuuggcuugcaaggacccugagcugcggcauugaagcacacccaacccaacucgacugaagucagccucacugaaccggaucugagaaucuucucucucugggcuugccagggcucuccgaaccuagcuagcauccucuucaauuccaacuagaaagcuuaccauguucguguuccugguccuccugccccuggugagcucccagugcgugaaccucaccacccgcacgcagcugccgcccgccuacaccaacagcuucacccggggcgucuacuaccccgacaagguguuccgcuccagcgugcugcacuccacccaggaccucuuccugcccuucuucagcaacgucacgugguuccacgccauccacguguccgggaccaacggcaccaagcgguucgacaacccggugcugcccuucaacgacggggucuacuucgcgagcaccgagaaguccaacaucauccgcggcuggaucuucgggacgacccucgacagcaagacccagucccugcugaucgugaacaacgccaccaacguggucaucaaggugugcgaguuccaguucugcaacgaccccuuccucggcguguacuaccacaagaacaacaagagcuggauggaguccgaguuccgggucuacagcuccgccaacaacugcacguucgaguacgugagccagcccuuccugauggaccuggagggcaagcaggggaacuucaagaaccuccgcgaguucguguucaagaacaucgacggcuacuucaagaucuacuccaagcacaccccgaucaaccugguccgggaccugccccagggguucagcgcccucgagccccugguggaccugcccaucggcaucaacaucacccgcuuccagacccuccuggcccugcaccgguccuaccucacgccgggggacagcagcuccggcuggaccgcgggcgccgccgccuacuacgugggguaccugcagccccgcaccuuccugcucaaguacaacgagaacggcaccaucacggacgcggucgacugcgcccuggacccccugagcgagaccaagugcacccucaaguccuucaccguggagaaggggaucuaccagacgagcaacuuccgggugcagcccaccgaguccaucguccgcuucccgaacaucaccaaccugugccccuucggcgagguguucaacgccacccgguucgccagcgucuacgccuggaaccgcaagcggaucuccaacugcguggcggacuacagcgugcuguacaacuccgccagcuucuccacguucaagugcuacggcgucagccccaccaagcucaacgaccugugcuucaccaacguguacgccgacuccuucgugauccgcggggacgagguccggcagaucgcccccggccagaccgggaagaucgccgacuacaacuacaagcugccggacgacuucacgggcugcgugaucgcguggaacagcaacaaccucgacuccaaggucgggggcaacuacaacuaccuguaccgccuguuccgcaagagcaaccucaagcccuucgagcgggacaucuccaccgagaucuaccaggccggcaacacccccugcaacgggguggagggcuucaacugcuacuucccccugcagagcuacggguuccagccgaccaacggcgugggguaccagcccuaccggguggucgugcuguccuucgagcuccugcacgcccccgccacggugugcggccccaagaaguccaccaaccuggucaagaacaagugcgugaacuucaacuucaacggccucaccgggaccggcgugcugaccgagagcaacaagaaguuccugccguuccagcaguucgggcgcgacaucgccgacacgaccgacgcgguccgcgacccccagacccuggagauccucgacaucacccccugcagcuucggcggggugagcgugaucacgccgggcaccaacaccuccaaccaggucgccgugcuguaccagggcgugaacugcaccgagguccccguggccauccacgccgaccagcugacgcccaccuggcggguguacagcaccggguccaacgucuuccagacccgcgccggcugccucaucggggcggagcacgugaacaacagcuacgagugcgacauccccaucggcgccggcaucugcgccuccuaccagacgcagaccaacagcccgcggcgcgcccgguccguggcgagccaguccaucaucgccuacaccaugagccugggggccgagaacuccgucgccuacagcaacaacuccaucgccauccccaccaacuucacgaucagcgugaccaccgagauccugcccguguccaugaccaagacgagcgucgacugcaccauguacaucugcggcgacagcaccgagugcuccaaccuccugcugcaguacgggagcuucugcacccagcucaaccgcgcgcugacgggcaucgccguggagcaggacaagaacacccaggagguguucgcccaggucaagcagaucuacaagacgcccccgaucaaggacuucgggggcuucaacuucucccagauccugcccgaccccagcaagcccuccaagcggagcuucaucgaggaccuccuguucaacaaggugacccuggccgacgccggcuucaucaagcaguacggggacugccucggcgacaucgcggcccgcgaccugaucugcgcccagaaguucaacgggcugaccgugcucccgccccugcugaccgacgagaugaucgcccaguacaccuccgcccuccuggcgggcaccaucacgagcggguggaccuucggcgccggcgccgcccugcagauccccuucgcgaugcagauggccuaccgguucaacgggaucggcgucacccagaacgugcucuacgagaaccagaagcugaucgccaaccaguucaacuccgccaucgggaagauccaggacagccuguccagcaccgccuccgcgcucggcaagcugcaggacguggucaaccagaacgcccaggcccugaacacgcucgugaagcagcugagcuccaacuucggggccaucagcuccgugcugaacgacauccucagccgccuggacccgcccgaggccgagguccagaucgaccggcugaucaccggccgccuccagucccugcagaccuacgugacccagcagcugauccgggcggccgagauccgcgccagcgccaaccucgccgcgaccaagaugagcgagugcgugcugggccaguccaagcgggucgacuucugcgggaagggcuaccaccugaugagcuucccccaguccgcgccccacggggugguguuccuccacgucacguacgugcccgcccaggagaagaacuucaccaccgccccggccaucugccacgacggcaaggcccacuucccccgcgagggggucuucgugagcaacggcacccacugguucgugacgcagcggaacuucuacgagccccagaucaucaccaccgacaacaccuucgucuccggcaacugcgacguggugaucgggaucgucaacaacacgguguacgacccccugcagccggagcuggacagcuucaaggaggagcucgacaaguacuucaagaaccacaccucccccgacguggaccugggcgacaucagcgggaucaacgccuccgucgugaacauccagaaggagaucgaccgccugaacgagguggccaagaaccucaacgagagccugaucgaccugcaggagcucggcaaguacgagcaguacaucaaguggcccugguacaucuggcugggcuucaucgccgggcugaucgcgaucgucauggugaccaucaugcucugcugcaugaccuccugcugcagcugccugaagggcugcugcuccugcgggagcugcugcaaguucgacgaggacgacuccgagccggugcugaagggcgucaagcuccacuacacgugaggacuagucccuguucccagagcccacuuuuuuuucuuuuuuugaaauaaaauagccugucuuucagaucucaaaggcucuuuucagagccaccaaaaaaaaaaaaaaaaaaaaaaaaaaaaaaaaaaaaaaaaaaaaaaaaaaaaaaaaaaaaaaaaaaaaaaaaaaaaaaaaaaaaaaaaaaaaaaaaaaaaa

SEQ ID NO: 23760 - RNA, 4191 nt, Artificial Sequence
  SARS-CoV-2/Wuhan/WIV05/2019__EPI_ISL_402128 spike protein mRNA gc (1-1273)(K986P_V987P_N501Y_D614G)
aggagagggcgcuuggcuugcaaggacccugagcugcggcauugaagcacacccaacccaacucgacugaagucagccucacugaaccggaucugagaaucuucucucucugggcuugccagggcucuccgaaccuagcuagcauccucuucaauuccaacuagaaagcuuaccauguucguguuccugguccuccugccccuggugagcucccagugcgugaaccucaccacccgcacgcagcugccgcccgccuacaccaacagcuucacccggggcgucuacuaccccgacaagguguuccgcuccagcgugcugcacuccacccaggaccucuuccugcccuucuucagcaacgucacgugguuccacgccauccacguguccgggaccaacggcaccaagcgguucgacaacccggugcugcccuucaacgacggggucuacuucgcgagcaccgagaaguccaacaucauccgcggcuggaucuucgggacgacccucgacagcaagacccagucccugcugaucgugaacaacgccaccaacguggucaucaaggugugcgaguuccaguucugcaacgaccccuuccucggcguguacuaccacaagaacaacaagagcuggauggaguccgaguuccgggucuacagcuccgccaacaacugcacguucgaguacgugagccagcccuuccugauggaccuggagggcaagcaggggaacuucaagaaccuccgcgaguucguguucaagaacaucgacggcuacuucaagaucuacuccaagcacaccccgaucaaccugguccgggaccugccccagggguucagcgcccucgagccccugguggaccugcccaucggcaucaacaucacccgcuuccagacccuccuggcccugcaccgguccuaccucacgccgggggacagcagcuccggcuggaccgcgggcgccgccgccuacuacgugggguaccugcagccccgcaccuuccugcucaaguacaacgagaacggcaccaucacggacgcggucgacugcgcccuggacccccugagcgagaccaagugcacccucaaguccuucaccguggagaaggggaucuaccagacgagcaacuuccgggugcagcccaccgaguccaucguccgcuucccgaacaucaccaaccugugccccuucggcgagguguucaacgccacccgguucgccagcgucuacgccuggaaccgcaagcggaucuccaacugcguggcggacuacagcgugcuguacaacuccgccagcuucuccacguucaagugcuacggcgucagccccaccaagcucaacgaccugugcuucaccaacguguacgccgacuccuucgugauccgcggggacgagguccggcagaucgcccccggccagaccgggaagaucgccgacuacaacuacaagcugccggacgacuucacgggcugcgugaucgcguggaacagcaacaaccucgacuccaaggucgggggcaacuacaacuaccuguaccgccuguuccgcaagagcaaccucaagcccuucgagcgggacaucuccaccgagaucuaccaggccggcagcacccccugcaacgggguggagggcuucaacugcuacuucccccugcaguccuacggguuccagccgaccuacggcgugggguaccagcccuaccggguggucgugcugagcuucgagcuccugcacgcccccgccacggugugcggccccaagaaguccaccaaccuggucaagaacaagugcgugaacuucaacuucaacggccucaccgggaccggcgugcugaccgagagcaacaagaaguuccugccguuccagcaguucgggcgcgacaucgccgacacgaccgacgcgguccgcgacccccagacccuggagauccucgacaucacccccugcagcuucggcgggguguccgugaucacgccgggcaccaacaccagcaaccaggucgccgugcuguaccagggcgugaacugcaccgagguccccguggccauccacgccgaccagcugacgcccaccuggcggguguacuccaccgggagcaacgucuuccagacccgcgccggcugccucaucggggcggagcacgugaacaacuccuacgagugcgacauccccaucggcgccggcaucugcgccagcuaccagacgcagaccaacuccccgcggcgcgcccggagcguggcgucccagagcaucaucgccuacaccaugucccugggggccgagaacagcgucgccuacuccaacaacagcaucgccauccccaccaacuucacgaucuccgugaccaccgagauccugcccgugagcaugaccaagacgagcgucgacugcaccauguacaucugcggcgacuccaccgagugcagcaaccuccugcugcaguacggguccuucugcacccagcucaaccgcgcgcugacgggcaucgccguggagcaggacaagaacacccaggagguguucgcccaggucaagcagaucuacaagacgcccccgaucaaggacuucgggggcuucaacuucagccagauccugcccgaccccuccaagcccagcaagcgguccuucaucgaggaccuccuguucaacaaggugacccuggccgacgccggcuucaucaagcaguacggggacugccucggcgacaucgcggcccgcgaccugaucugcgcccagaaguucaacgggcugaccgugcucccgccccugcugaccgacgagaugaucgcccaguacaccagcgcccuccuggcgggcaccaucacguccggguggaccuucggcgccggcgccgcccugcagauccccuucgcgaugcagauggccuaccgguucaacgggaucggcgucacccagaacgugcucuacgagaaccagaagcugaucgccaaccaguucaacagcgccaucgggaagauccaggacucccugagcuccaccgccagcgcgcucggcaagcugcaggacguggucaaccagaacgcccaggcccugaacacgcucgugaagcagcuguccagcaacuucggggccaucuccagcgugcugaacgacauccucucccgccuggacccgcccgaggccgagguccagaucgaccggcugaucaccggccgccuccagagccugcagaccuacgugacccagcagcugauccgggcggccgagauccgcgccagcgccaaccucgccgcgaccaagauguccgagugcgugcugggccagagcaagcgggucgacuucugcgggaagggcuaccaccugauguccuucccccagagcgcgccccacggggugguguuccuccacgucacguacgugcccgcccaggagaagaacuucaccaccgccccggccaucugccacgacggcaaggcccacuucccccgcgagggggucuucguguccaacggcacccacugguucgugacgcagcggaacuucuacgagccccagaucaucaccaccgacaacaccuucgucagcggcaacugcgacguggugaucgggaucgucaacaacacgguguacgacccccugcagccggagcuggacuccuucaaggaggagcucgacaaguacuucaagaaccacaccagccccgacguggaccugggcgacaucuccgggaucaacgccagcgucgugaacauccagaaggagaucgaccgccugaacgagguggccaagaaccucaacgagucccugaucgaccugcaggagcucggcaaguacgagcaguacaucaaguggcccugguacaucuggcugggcuucaucgccgggcugaucgcgaucgucauggugaccaucaugcucugcugcaugaccagcugcugcuccugccugaagggcugcugcagcugcggguccugcugcaaguucgacgaggacgacagcgagccggugcugaagggcgucaagcuccacuacacgugaggacuagucccuguucccagagcccacuuuuuuuucuuuuuuugaaauaaaauagccugucuuucagaucucaaaggcucuuuucagagccaccaaaaaaaaaaaaaaaaaaaaaaaaaaaaaaaaaaaaaaaaaaaaaaaaaaaaaaaaaaaaaaaaaaaaaaaaaaaaaaaaaaaaaaaaaaaaaaaaaaaaa

SEQ ID NO: 23761 - RNA, 4185 nt, Artificial Sequence
  SARS-CoV-2/Wuhan/WIV05/2019__EPI_ISL_402128 spike protein mRNA gc (1-1273)(K986P_V987P_H69del_V70del_D614G)
aggagagggcgcuuggcuugcaaggacccugagcugcggcauugaagcacacccaacccaacucgacugaagucagccucacugaaccggaucugagaaucuucucucucugggcuugccagggcucuccgaaccuagcuagcauccucuucaauuccaacuagaaagcuuaccauguucguguuccugguccuccugccccuggugagcucccagugcgugaaccucaccacccgcacgcagcugccgcccgccuacaccaacagcuucacccggggcgucuacuaccccgacaagguguuccgcuccagcgugcugcacuccacccaggaccucuuccugcccuucuucagcaacgucacgugguuccacgccaucuccgggaccaacggcaccaagcgguucgacaacccggugcugcccuucaacgacgggguguacuucgcgagcaccgagaaguccaacaucauccgcggcuggaucuucgggacgacccucgacagcaagacccagucccugcugaucgucaacaacgccaccaacguggugaucaaggucugcgaguuccaguucugcaacgaccccuuccucggcguguacuaccacaagaacaacaagagcuggauggaguccgaguuccggguguacagcuccgccaacaacugcacguucgaguacgucagccagcccuuccugauggaccuggagggcaagcaggggaacuucaagaaccuccgcgaguucguguucaagaacaucgacggcuacuucaagaucuacuccaagcacaccccgaucaaccuggugcgggaccugccccagggguucagcgcccucgagccccuggucgaccugcccaucggcaucaacaucacccgcuuccagacccuccuggcccugcaccgguccuaccucacgccgggggacagcagcuccggcuggaccgcgggcgccgccgccuacuacgugggguaccugcagccccgcaccuuccugcucaaguacaacgagaacggcaccaucacggacgcgguggacugcgcccuggacccccugagcgagaccaagugcacccucaaguccuucaccgucgagaaggggaucuaccagacgagcaacuuccgggugcagcccaccgaguccaucgugcgcuucccgaacaucaccaaccugugccccuucggcgaggucuucaacgccacccgguucgccagcguguacgccuggaaccgcaagcggaucuccaacugcgucgcggacuacagcgugcuguacaacuccgccagcuucuccacguucaagugcuacggcgugagccccaccaagcucaacgaccugugcuucaccaacgucuacgccgacuccuucgugauccgcggggacgaggugcggcagaucgcccccggccagaccgggaagaucgccgacuacaacuacaagcugccggacgacuucacgggcugcgucaucgcguggaacagcaacaaccucgacuccaaggucgggggcaacuacaacuaccuguaccgccuguuccgcaagagcaaccucaagcccuucgagcgggacaucuccaccgagaucuaccaggccggcagcacccccugcaacgggguggagggcuucaacugcuacuucccccugcaguccuacggguuccagccgaccaacggcgugggguaccagcccuaccggguggugguccugagcuucgagcuccugcacgcccccgccacggugugcggccccaagaaguccaccaaccuggugaagaacaagugcgucaacuucaacuucaacggccucaccgggaccggcgugcugaccgagagcaacaagaaguuccugccguuccagcaguucgggcgcgacaucgccgacacgaccgacgcggugcgcgacccccagacccuggagauccucgacaucacccccugcagcuucggcggggucuccgugaucacgccgggcaccaacaccagcaaccagguggccguccuguaccagggcgugaacugcaccgaggugcccgucgccauccacgccgaccagcugacgcccaccuggcggguguacuccaccgggagcaacguguuccagacccgcgccggcugccucaucggggcggagcacgucaacaacuccuacgagugcgacauccccaucggcgccggcaucugcgccagcuaccagacgcagaccaacuccccgcggcgcgcccggagcguggcgucccagagcaucaucgccuacaccaugucccugggggccgagaacagcguggccuacuccaacaacagcaucgccauccccaccaacuucacgaucuccgucaccaccgagauccugcccgugagcaugaccaagacgagcguggacugcaccauguacaucugcggcgacuccaccgagugcagcaaccuccugcugcaguacggguccuucugcacccagcucaaccgcgcgcugacgggcaucgccgucgagcaggacaagaacacccaggagguguucgcccaggugaagcagaucuacaagacgcccccgaucaaggacuucgggggcuucaacuucagccagauccugcccgaccccuccaagcccagcaagcgguccuucaucgaggaccuccuguucaacaaggucacccuggccgacgccggcuucaucaagcaguacggggacugccucggcgacaucgcggcccgcgaccugaucugcgcccagaaguucaacgggcugaccgugcucccgccccugcugaccgacgagaugaucgcccaguacaccagcgcccuccuggcgggcaccaucacguccggguggaccuucggcgccggcgccgcccugcagauccccuucgcgaugcagauggccuaccgguucaacgggaucggcgugacccagaacguccucuacgagaaccagaagcugaucgccaaccaguucaacagcgccaucgggaagauccaggacucccugagcuccaccgccagcgcgcucggcaagcugcaggacguggugaaccagaacgcccaggcccugaacacgcucgucaagcagcuguccagcaacuucggggccaucuccagcgugcugaacgacauccucucccgccuggacccgcccgaggccgaggugcagaucgaccggcugaucaccggccgccuccagagccugcagaccuacgucacccagcagcugauccgggcggccgagauccgcgccagcgccaaccucgccgcgaccaagauguccgagugcgugcugggccagagcaagcggguggacuucugcgggaagggcuaccaccugauguccuucccccagagcgcgccccacggggucguguuccuccacgugacguacguccccgcccaggagaagaacuucaccaccgccccggccaucugccacgacggcaaggcccacuucccccgcgaggggguguucgucuccaacggcacccacugguucgugacgcagcggaacuucuacgagccccagaucaucaccaccgacaacaccuucgugagcggcaacugcgacgucgugaucgggaucgugaacaacacggucuacgacccccugcagccggagcuggacuccuucaaggaggagcucgacaaguacuucaagaaccacaccagccccgacguggaccugggcgacaucuccgggaucaacgccagcguggucaacauccagaaggagaucgaccgccugaacgagguggccaagaaccucaacgagucccugaucgaccugcaggagcucggcaaguacgagcaguacaucaaguggcccugguacaucuggcugggcuucaucgccgggcugaucgcgaucgugauggucaccaucaugcucugcugcaugaccagcugcugcuccugccugaagggcugcugcagcugcggguccugcugcaaguucgacgaggacgacagcgagccggugcugaagggcgugaagcuccacuacacgugaggacuagucccuguucccagagcccacuuuuuuuucuuuuuuugaaauaaaauagccugucuuucagaucucaaaggcucuuuucagagccaccaaaaaaaaaaaaaaaaaaaaaaaaaaaaaaaaaaaaaaaaaaaaaaaaaaaaaaaaaaaaaaaaaaaaaaaaaaaaaaaaaaaaaaaaaaaaaaaaaaaaa

SEQ ID NO: 23762 - RNA, 4191 nt, Artificial Sequence
  SARS-CoV-2/Wuhan/WIV05/2019__EPI_ISL_402128 spike protein mRNA gc (1-1273)(K986P_V987P_Y453F_D614G)
aggagagggcgcuuggcuugcaaggacccugagcugcggcauugaagcacacccaacccaacucgacugaagucagccucacugaaccggaucugagaaucuucucucucugggcuugccagggcucuccgaaccuagcuagcauccucuucaauuccaacuagaaagcuuaccauguucguguuccugguccuccugccccuggugagcucccagugcgugaaccucaccacccgcacgcagcugccgcccgccuacaccaacagcuucacccggggcgucuacuaccccgacaagguguuccgcuccagcgugcugcacuccacccaggaccucuuccugcccuucuucagcaacgucacgugguuccacgccauccacguguccgggaccaacggcaccaagcgguucgacaacccggugcugcccuucaacgacggggucuacuucgcgagcaccgagaaguccaacaucauccgcggcuggaucuucgggacgacccucgacagcaagacccagucccugcugaucgugaacaacgccaccaacguggucaucaaggugugcgaguuccaguucugcaacgaccccuuccucggcguguacuaccacaagaacaacaagagcuggauggaguccgaguuccgggucuacagcuccgccaacaacugcacguucgaguacgugagccagcccuuccugauggaccuggagggcaagcaggggaacuucaagaaccuccgcgaguucguguucaagaacaucgacggcuacuucaagaucuacuccaagcacaccccgaucaaccugguccgggaccugccccagggguucagcgcccucgagccccugguggaccugcccaucggcaucaacaucacccgcuuccagacccuccuggcccugcaccgguccuaccucacgccgggggacagcagcuccggcuggaccgcgggcgccgccgccuacuacgugggguaccugcagccccgcaccuuccugcucaaguacaacgagaacggcaccaucacggacgcggucgacugcgcccuggacccccugagcgagaccaagugcacccucaaguccuucaccguggagaaggggaucuaccagacgagcaacuuccgggugcagcccaccgaguccaucguccgcuucccgaacaucaccaaccugugccccuucggcgagguguucaacgccacccgguucgccagcgucuacgccuggaaccgcaagcggaucuccaacugcguggcggacuacagcgugcuguacaacuccgccagcuucuccacguucaagugcuacggcgucagccccaccaagcucaacgaccugugcuucaccaacguguacgccgacuccuucgugauccgcggggacgagguccggcagaucgcccccggccagaccgggaagaucgccgacuacaacuacaagcugccggacgacuucacgggcugcgugaucgcguggaacagcaacaaccucgacuccaaggucgggggcaacuacaacuaccuguuccgccuguuccgcaagagcaaccucaagcccuucgagcgggacaucuccaccgagaucuaccaggccggcagcacccccugcaacgggguggagggcuucaacugcuacuucccccugcaguccuacggguuccagccgaccaacggcgugggguaccagcccuaccggguggucgugcugagcuucgagcuccugcacgcccccgccacggugugcggccccaagaaguccaccaaccuggucaagaacaagugcgugaacuucaacuucaacggccucaccgggaccggcgugcugaccgagagcaacaagaaguuccugccguuccagcaguucgggcgcgacaucgccgacacgaccgacgcgguccgcgacccccagacccuggagauccucgacaucacccccugcagcuucggcgggguguccgugaucacgccgggcaccaacaccagcaaccaggucgccgugcuguaccagggcgugaacugcaccgagguccccguggccauccacgccgaccagcugacgcccaccuggcggguguacuccaccgggagcaacgucuuccagacccgcgccggcugccucaucggggcggagcacgugaacaacuccuacgagugcgacauccccaucggcgccggcaucugcgccagcuaccagacgcagaccaacuccccgcggcgcgcccggagcguggcgucccagagcaucaucgccuacaccaugucccugggggccgagaacagcgucgccuacuccaacaacagcaucgccauccccaccaacuucacgaucuccgugaccaccgagauccugcccgugagcaugaccaagacgagcgucgacugcaccauguacaucugcggcgacuccaccgagugcagcaaccuccugcugcaguacggguccuucugcacccagcucaaccgcgcgcugacgggcaucgccguggagcaggacaagaacacccaggagguguucgcccaggucaagcagaucuacaagacgcccccgaucaaggacuucgggggcuucaacuucagccagauccugcccgaccccuccaagcccagcaagcgguccuucaucgaggaccuccuguucaacaaggugacccuggccgacgccggcuucaucaagcaguacggggacugccucggcgacaucgcggcccgcgaccugaucugcgcccagaaguucaacgggcugaccgugcucccgccccugcugaccgacgagaugaucgcccaguacaccagcgcccuccuggcgggcaccaucacguccggguggaccuucggcgccggcgccgcccugcagauccccuucgcgaugcagauggccuaccgguucaacgggaucggcgucacccagaacgugcucuacgagaaccagaagcugaucgccaaccaguucaacagcgccaucgggaagauccaggacucccugagcuccaccgccagcgcgcucggcaagcugcaggacguggucaaccagaacgcccaggcccugaacacgcucgugaagcagcuguccagcaacuucggggccaucuccagcgugcugaacgacauccucucccgccuggacccgcccgaggccgagguccagaucgaccggcugaucaccggccgccuccagagccugcagaccuacgugacccagcagcugauccgggcggccgagauccgcgccagcgccaaccucgccgcgaccaagauguccgagugcgugcugggccagagcaagcgggucgacuucugcgggaagggcuaccaccugauguccuucccccagagcgcgccccacggggugguguuccuccacgucacguacgugcccgcccaggagaagaacuucaccaccgccccggccaucugccacgacggcaaggcccacuucccccgcgagggggucuucguguccaacggcacccacugguucgugacgcagcggaacuucuacgagccccagaucaucaccaccgacaacaccuucgucagcggcaacugcgacguggugaucgggaucgucaacaacacgguguacgacccccugcagccggagcuggacuccuucaaggaggagcucgacaaguacuucaagaaccacaccagccccgacguggaccugggcgacaucuccgggaucaacgccagcgucgugaacauccagaaggagaucgaccgccugaacgagguggccaagaaccucaacgagucccugaucgaccugcaggagcucggcaaguacgagcaguacaucaaguggcccugguacaucuggcugggcuucaucgccgggcugaucgcgaucgucauggugaccaucaugcucugcugcaugaccagcugcugcuccugccugaagggcugcugcagcugcggguccugcugcaaguucgacgaggacgacagcgagccggugcugaagggcgucaagcuccacuacacgugaggacuagucccuguucccagagcccacuuuuuuuucuuuuuuugaaauaaaauagccugucuuucagaucucaaaggcucuuuucagagccaccaaaaaaaaaaaaaaaaaaaaaaaaaaaaaaaaaaaaaaaaaaaaaaaaaaaaaaaaaaaaaaaaaaaaaaaaaaaaaaaaaaaaaaaaaaaaaaaaaaaaa

SEQ ID NO: 23763 - RNA, 4191 nt, Artificial Sequence
  SARS-CoV-2/Wuhan/WIV05/2019__EPI_ISL_402128 spike protein mRNA gc (1-1273)(K986P_V987P_D614G_I692V)
aggagagggcgcuuggcuugcaaggacccugagcugcggcauugaagcacacccaacccaacucgacugaagucagccucacugaaccggaucugagaaucuucucucucugggcuugccagggcucuccgaaccuagcuagcauccucuucaauuccaacuagaaagcuuaccauguucguguuccugguccuccugccccuggugagcucccagugcgugaaccucaccacccgcacgcagcugccgcccgccuacaccaacagcuucacccggggcgucuacuaccccgacaagguguuccgcuccagcgugcugcacuccacccaggaccucuuccugcccuucuucagcaacgucacgugguuccacgccauccacguguccgggaccaacggcaccaagcgguucgacaacccggugcugcccuucaacgacggggucuacuucgcgagcaccgagaaguccaacaucauccgcggcuggaucuucgggacgacccucgacagcaagacccagucccugcugaucgugaacaacgccaccaacguggucaucaaggugugcgaguuccaguucugcaacgaccccuuccucggcguguacuaccacaagaacaacaagagcuggauggaguccgaguuccgggucuacagcuccgccaacaacugcacguucgaguacgugagccagcccuuccugauggaccuggagggcaagcaggggaacuucaagaaccuccgcgaguucguguucaagaacaucgacggcuacuucaagaucuacuccaagcacaccccgaucaaccugguccgggaccugccccagggguucagcgcccucgagccccugguggaccugcccaucggcaucaacaucacccgcuuccagacccuccuggcccugcaccgguccuaccucacgccgggggacagcagcuccggcuggaccgcgggcgccgccgccuacuacgugggguaccugcagccccgcaccuuccugcucaaguacaacgagaacggcaccaucacggacgcggucgacugcgcccuggacccccugagcgagaccaagugcacccucaaguccuucaccguggagaaggggaucuaccagacgagcaacuuccgggugcagcccaccgaguccaucguccgcuucccgaacaucaccaaccugugccccuucggcgagguguucaacgccacccgguucgccagcgucuacgccuggaaccgcaagcggaucuccaacugcguggcggacuacagcgugcuguacaacuccgccagcuucuccacguucaagugcuacggcgucagccccaccaagcucaacgaccugugcuucaccaacguguacgccgacuccuucgugauccgcggggacgagguccggcagaucgcccccggccagaccgggaagaucgccgacuacaacuacaagcugccggacgacuucacgggcugcgugaucgcguggaacagcaacaaccucgacuccaaggucgggggcaacuacaacuaccuguaccgccuguuccgcaagagcaaccucaagcccuucgagcgggacaucuccaccgagaucuaccaggccggcagcacccccugcaacgggguggagggcuucaacugcuacuucccccugcaguccuacggguuccagccgaccaacggcgugggguaccagcccuaccggguggucgugcugagcuucgagcuccugcacgcccccgccacggugugcggccccaagaaguccaccaaccuggucaagaacaagugcgugaacuucaacuucaacggccucaccgggaccggcgugcugaccgagagcaacaagaaguuccugccguuccagcaguucgggcgcgacaucgccgacacgaccgacgcgguccgcgacccccagacccuggagauccucgacaucacccccugcagcuucggcgggguguccgugaucacgccgggcaccaacaccagcaaccaggucgccgugcuguaccagggcgugaacugcaccgagguccccguggccauccacgccgaccagcugacgcccaccuggcggguguacuccaccgggagcaacgucuuccagacccgcgccggcugccucaucggggcggagcacgugaacaacuccuacgagugcgacauccccaucggcgccggcaucugcgccagcuaccagacgcagaccaacuccccgcggcgcgcccggagcguggcgucccagagcgucaucgccuacaccaugucccugggggccgagaacagcguggccuacuccaacaacagcaucgccauccccaccaacuucacgaucuccgugaccaccgagauccugcccgucagcaugaccaagacgagcguggacugcaccauguacaucugcggcgacuccaccgagugcagcaaccuccugcugcaguacggguccuucugcacccagcucaaccgcgcgcugacgggcaucgccguggagcaggacaagaacacccaggaggucuucgcccaggugaagcagaucuacaagacgcccccgaucaaggacuucgggggcuucaacuucagccagauccugcccgaccccuccaagcccagcaagcgguccuucaucgaggaccuccuguucaacaaggugacccuggccgacgccggcuucaucaagcaguacggggacugccucggcgacaucgcggcccgcgaccugaucugcgcccagaaguucaacgggcugaccguccucccgccccugcugaccgacgagaugaucgcccaguacaccagcgcccuccuggcgggcaccaucacguccggguggaccuucggcgccggcgccgcccugcagauccccuucgcgaugcagauggccuaccgguucaacgggaucggcgugacccagaacgugcucuacgagaaccagaagcugaucgccaaccaguucaacagcgccaucgggaagauccaggacucccugagcuccaccgccagcgcgcucggcaagcugcaggacgucgugaaccagaacgcccaggcccugaacacgcucgugaagcagcuguccagcaacuucggggccaucuccagcguccugaacgacauccucucccgccuggacccgcccgaggccgaggugcagaucgaccggcugaucaccggccgccuccagagccugcagaccuacgugacccagcagcugauccgggcggccgagauccgcgccagcgccaaccucgccgcgaccaagauguccgagugcguccugggccagagcaagcggguggacuucugcgggaagggcuaccaccugauguccuucccccagagcgcgccccacgggguggucuuccuccacgugacguacguccccgcccaggagaagaacuucaccaccgccccggccaucugccacgacggcaaggcccacuucccccgcgaggggguguucguguccaacggcacccacugguucgucacgcagcggaacuucuacgagccccagaucaucaccaccgacaacaccuucgugagcggcaacugcgacguggucaucgggaucgugaacaacacgguguacgacccccugcagccggagcuggacuccuucaaggaggagcucgacaaguacuucaagaaccacaccagccccgacgucgaccugggcgacaucuccgggaucaacgccagcguggugaacauccagaaggagaucgaccgccugaacgaggucgccaagaaccucaacgagucccugaucgaccugcaggagcucggcaaguacgagcaguacaucaaguggcccugguacaucuggcugggcuucaucgccgggcugaucgcgaucgugauggugaccaucaugcucugcugcaugaccagcugcugcuccugccugaagggcugcugcagcugcggguccugcugcaaguucgacgaggacgacagcgagccgguccugaagggcgugaagcuccacuacacgugaggacuagucccuguucccagagcccacuuuuuuuucuuuuuuugaaauaaaauagccugucuuucagaucucaaaggcucuuuucagagccaccaaaaaaaaaaaaaaaaaaaaaaaaaaaaaaaaaaaaaaaaaaaaaaaaaaaaaaaaaaaaaaaaaaaaaaaaaaaaaaaaaaaaaaaaaaaaaaaaaaaaa

SEQ ID NO: 23764 - RNA, 4191 nt, Artificial Sequence
  SARS-CoV-2/Wuhan/WIV05/2019__EPI_ISL_402128 spike protein mRNA gc (1-1273)(K986P_V987P_D614G_M1229I)
aggagagggcgcuuggcuugcaaggacccugagcugcggcauugaagcacacccaacccaacucgacugaagucagccucacugaaccggaucugagaaucuucucucucugggcuugccagggcucuccgaaccuagcuagcauccucuucaauuccaacuagaaagcuuaccauguucguguuccugguccuccugccccuggugagcucccagugcgugaaccucaccacccgcacgcagcugccgcccgccuacaccaacagcuucacccggggcgucuacuaccccgacaagguguuccgcuccagcgugcugcacuccacccaggaccucuuccugcccuucuucagcaacgucacgugguuccacgccauccacguguccgggaccaacggcaccaagcgguucgacaacccggugcugcccuucaacgacggggucuacuucgcgagcaccgagaaguccaacaucauccgcggcuggaucuucgggacgacccucgacagcaagacccagucccugcugaucgugaacaacgccaccaacguggucaucaaggugugcgaguuccaguucugcaacgaccccuuccucggcguguacuaccacaagaacaacaagagcuggauggaguccgaguuccgggucuacagcuccgccaacaacugcacguucgaguacgugagccagcccuuccugauggaccuggagggcaagcaggggaacuucaagaaccuccgcgaguucguguucaagaacaucgacggcuacuucaagaucuacuccaagcacaccccgaucaaccugguccgggaccugccccagggguucagcgcccucgagccccugguggaccugcccaucggcaucaacaucacccgcuuccagacccuccuggcccugcaccgguccuaccucacgccgggggacagcagcuccggcuggaccgcgggcgccgccgccuacuacgugggguaccugcagccccgcaccuuccugcucaaguacaacgagaacggcaccaucacggacgcggucgacugcgcccuggacccccugagcgagaccaagugcacccucaaguccuucaccguggagaaggggaucuaccagacgagcaacuuccgggugcagcccaccgaguccaucguccgcuucccgaacaucaccaaccugugccccuucggcgagguguucaacgccacccgguucgccagcgucuacgccuggaaccgcaagcggaucuccaacugcguggcggacuacagcgugcuguacaacuccgccagcuucuccacguucaagugcuacggcgucagccccaccaagcucaacgaccugugcuucaccaacguguacgccgacuccuucgugauccgcggggacgagguccggcagaucgcccccggccagaccgggaagaucgccgacuacaacuacaagcugccggacgacuucacgggcugcgugaucgcguggaacagcaacaaccucgacuccaaggucgggggcaacuacaacuaccuguaccgccuguuccgcaagagcaaccucaagcccuucgagcgggacaucuccaccgagaucuaccaggccggcagcacccccugcaacgggguggagggcuucaacugcuacuucccccugcaguccuacggguuccagccgaccaacggcgugggguaccagcccuaccggguggucgugcugagcuucgagcuccugcacgcccccgccacggugugcggccccaagaaguccaccaaccuggucaagaacaagugcgugaacuucaacuucaacggccucaccgggaccggcgugcugaccgagagcaacaagaaguuccugccguuccagcaguucgggcgcgacaucgccgacacgaccgacgcgguccgcgacccccagacccuggagauccucgacaucacccccugcagcuucggcgggguguccgugaucacgccgggcaccaacaccagcaaccaggucgccgugcuguaccagggcgugaacugcaccgagguccccguggccauccacgccgaccagcugacgcccaccuggcggguguacuccaccgggagcaacgucuuccagacccgcgccggcugccucaucggggcggagcacgugaacaacuccuacgagugcgacauccccaucggcgccggcaucugcgccagcuaccagacgcagaccaacuccccgcggcgcgcccggagcguggcgucccagagcaucaucgccuacaccaugucccugggggccgagaacagcgucgccuacuccaacaacagcaucgccauccccaccaacuucacgaucuccgugaccaccgagauccugcccgugagcaugaccaagacgagcgucgacugcaccauguacaucugcggcgacuccaccgagugcagcaaccuccugcugcaguacggguccuucugcacccagcucaaccgcgcgcugacgggcaucgccguggagcaggacaagaacacccaggagguguucgcccaggucaagcagaucuacaagacgcccccgaucaaggacuucgggggcuucaacuucagccagauccugcccgaccccuccaagcccagcaagcgguccuucaucgaggaccuccuguucaacaaggugacccuggccgacgccggcuucaucaagcaguacggggacugccucggcgacaucgcggcccgcgaccugaucugcgcccagaaguucaacgggcugaccgugcucccgccccugcugaccgacgagaugaucgcccaguacaccagcgcccuccuggcgggcaccaucacguccggguggaccuucggcgccggcgccgcccugcagauccccuucgcgaugcagauggccuaccgguucaacgggaucggcgucacccagaacgugcucuacgagaaccagaagcugaucgccaaccaguucaacagcgccaucgggaagauccaggacucccugagcuccaccgccagcgcgcucggcaagcugcaggacguggucaaccagaacgcccaggcccugaacacgcucgugaagcagcuguccagcaacuucggggccaucuccagcgugcugaacgacauccucucccgccuggacccgcccgaggccgagguccagaucgaccggcugaucaccggccgccuccagagccugcagaccuacgugacccagcagcugauccgggcggccgagauccgcgccagcgccaaccucgccgcgaccaagauguccgagugcgugcugggccagagcaagcgggucgacuucugcgggaagggcuaccaccugauguccuucccccagagcgcgccccacggggugguguuccuccacgucacguacgugcccgcccaggagaagaacuucaccaccgccccggccaucugccacgacggcaaggcccacuucccccgcgagggggucuucguguccaacggcacccacugguucgugacgcagcggaacuucuacgagccccagaucaucaccaccgacaacaccuucgucagcggcaacugcgacguggugaucgggaucgucaacaacacgguguacgacccccugcagccggagcuggacuccuucaaggaggagcucgacaaguacuucaagaaccacaccagccccgacguggaccugggcgacaucuccgggaucaacgccagcgucgugaacauccagaaggagaucgaccgccugaacgagguggccaagaaccucaacgagucccugaucgaccugcaggagcucggcaaguacgagcaguacaucaaguggcccugguacaucuggcugggcuucaucgccgggcugaucgcgaucgucaucgugaccaucaugcucugcugcaugaccagcugcugcuccugccugaagggcugcugcagcugcggguccugcugcaaguucgacgaggacgacagcgagccggugcugaagggcgucaagcuccacuacacgugaggacuagucccuguucccagagcccacuuuuuuuucuuuuuuugaaauaaaauagccugucuuucagaucucaaaggcucuuuucagagccaccaaaaaaaaaaaaaaaaaaaaaaaaaaaaaaaaaaaaaaaaaaaaaaaaaaaaaaaaaaaaaaaaaaaaaaaaaaaaaaaaaaaaaaaaaaaaaaaaaaaaa

SEQ ID NO: 23765 - RNA, 4185 nt, Artificial Sequence
  SARS-CoV-2/Wuhan/WIV05/2019__EPI_ISL_402128 spike protein mRNA gc (1-1273)(K986P_V987P_H69del_V70del_A222V_Y453F_S477N_D614G_I692V)
aggagagggcgcuuggcuugcaaggacccugagcugcggcauugaagcacacccaacccaacucgacugaagucagccucacugaaccggaucugagaaucuucucucucugggcuugccagggcucuccgaaccuagcuagcauccucuucaauuccaacuagaaagcuuaccauguucguguuccugguccuccugccccuggugagcucccagugcgugaaccucaccacccgcacgcagcugccgcccgccuacaccaacagcuucacccggggcgucuacuaccccgacaagguguuccgcuccagcgugcugcacuccacccaggaccucuuccugcccuucuucagcaacgucacgugguuccacgccaucuccgggaccaacggcaccaagcgguucgacaacccggugcugcccuucaacgacgggguguacuucgcgagcaccgagaaguccaacaucauccgcggcuggaucuucgggacgacccucgacagcaagacccagucccugcugaucgucaacaacgccaccaacguggugaucaaggucugcgaguuccaguucugcaacgaccccuuccucggcguguacuaccacaagaacaacaagagcuggauggaguccgaguuccggguguacagcuccgccaacaacugcacguucgaguacgucagccagcccuuccugauggaccuggagggcaagcaggggaacuucaagaaccuccgcgaguucguguucaagaacaucgacggcuacuucaagaucuacuccaagcacaccccgaucaaccuggugcgggaccugccccagggguucagcguccucgagccccugguggaccugcccaucggcaucaacaucacccgcuuccagacccuccuggcccugcaccgguccuaccucacgccgggggacagcagcuccggcuggaccgccggcgcggccgccuacuacgugggguaccugcagccccgcaccuuccugcucaaguacaacgagaacggcaccaucacggacgccgucgacugcgcgcuggacccccugagcgagaccaagugcacccucaaguccuucaccguggagaaggggaucuaccagacgagcaacuuccgggugcagcccaccgaguccaucguccgcuucccgaacaucaccaaccugugccccuucggcgagguguucaacgccacccgguucgccagcgucuacgccuggaaccgcaagcggaucuccaacugcguggccgacuacagcgugcuguacaacuccgcgagcuucuccacguucaagugcuacggcgucagccccaccaagcucaacgaccugugcuucaccaacguguacgccgacuccuucgugauccgcggggacgagguccggcagaucgcccccggccagaccgggaagaucgccgacuacaacuacaagcugccggacgacuucacgggcugcgugaucgccuggaacagcaacaaccucgacuccaaggucgggggcaacuacaacuaccuguuccgccuguuccgcaagagcaaccucaagcccuucgagcgggacaucuccaccgagaucuaccaggcgggcaacacccccugcaacgggguggagggcuucaacugcuacuucccccugcagagcuacggguuccagccgaccaacggcgugggguaccagcccuaccggguggucgugcuguccuucgagcuccugcacgcccccgccacggugugcggccccaagaaguccaccaaccuggucaagaacaagugcgugaacuucaacuucaacggccucaccgggaccggcgugcugaccgagagcaacaagaaguuccugccguuccagcaguucgggcgcgacaucgccgacacgaccgacgccguccgcgacccccagacccuggagauccucgacaucacccccugcagcuucggcggggugagcgugaucacgccgggcaccaacaccuccaaccaggucgcggugcuguaccagggcgugaacugcaccgagguccccguggccauccacgccgaccagcugacgcccaccuggcggguguacagcaccggguccaacgucuuccagacccgcgccggcugccucaucggggccgagcacgugaacaacagcuacgagugcgacauccccaucggcgcgggcaucugcgccuccuaccagacgcagaccaacagcccgcggcgcgcccgguccguggccagccaguccgucaucgcguacaccaugagccugggggccgagaacuccguggccuacagcaacaacuccaucgccauccccaccaacuucacgaucagcgugaccaccgagauccugcccgucuccaugaccaagacgagcguggacugcaccauguacaucugcggcgacagcaccgagugcuccaaccuccugcugcaguacgggagcuucugcacccagcucaaccgcgcccugacgggcaucgcgguggagcaggacaagaacacccaggaggucuucgcccaggugaagcagaucuacaagacgcccccgaucaaggacuucgggggcuucaacuucucccagauccugcccgaccccagcaagcccuccaagcggagcuucaucgaggaccuccuguucaacaaggugacccuggccgacgccggcuucaucaagcaguacggggacugccucggcgacaucgccgcgcgcgaccugaucugcgcccagaaguucaacgggcugaccguccucccgccccugcugaccgacgagaugaucgcccaguacaccuccgcccuccuggccggcaccaucacgagcggguggaccuucggcgcgggcgccgcccugcagauccccuucgccaugcagauggcguaccgguucaacgggaucggcgugacccagaacgugcucuacgagaaccagaagcugaucgccaaccaguucaacuccgccaucgggaagauccaggacagccuguccagcaccgccuccgcccucggcaagcugcaggacgucgugaaccagaacgcgcaggcccugaacacgcucgugaagcagcugagcuccaacuucggggccaucagcuccguccugaacgacauccucagccgccuggacccgcccgaggccgaggugcagaucgaccggcugaucaccggccgccuccagucccugcagaccuacgugacccagcagcugauccgggccgcggagauccgcgccagcgccaaccucgccgccaccaagaugagcgagugcguccugggccaguccaagcggguggacuucugcgggaagggcuaccaccugaugagcuucccccaguccgcgccccacgggguggucuuccuccacgugacguacguccccgcccaggagaagaacuucaccaccgccccggccaucugccacgacggcaaggcgcacuucccccgcgaggggguguucgugagcaacggcacccacugguucgucacgcagcggaacuucuacgagccccagaucaucaccaccgacaacaccuucguguccggcaacugcgacguggucaucgggaucgugaacaacacgguguacgacccccugcagccggagcuggacagcuucaaggaggagcucgacaaguacuucaagaaccacaccucccccgacgucgaccugggcgacaucagcgggaucaacgccuccguggugaacauccagaaggagaucgaccgccugaacgaggucgccaagaaccucaacgagagccugaucgaccugcaggagcucggcaaguacgagcaguacaucaaguggcccugguacaucuggcugggcuucaucgccgggcugaucgccaucgugauggugaccaucaugcucugcugcaugaccuccugcugcagcugccugaagggcugcugcuccugcgggagcugcugcaaguucgacgaggacgacuccgagccgguccugaagggcgugaagcuccacuacacgugaggacuagucccuguucccagagcccacuuuuuuuucuuuuuuugaaauaaaauagccugucuuucagaucucaaaggcucuuuucagagccaccaaaaaaaaaaaaaaaaaaaaaaaaaaaaaaaaaaaaaaaaaaaaaaaaaaaaaaaaaaaaaaaaaaaaaaaaaaaaaaaaaaaaaaaaaaaaaaaaaaaaa

SEQ ID NO: 23766 - RNA, 4185 nt, Artificial Sequence
  SARS-CoV-2/Wuhan/WIV05/2019__EPI_ISL_402128 spike protein mRNA gc (1-1273)(K986P_V987P_H69del_V70del_Y453F_D614G_I692V_M1229I)
aggagagggcgcuuggcuugcaaggacccugagcugcggcauugaagcacacccaacccaacucgacugaagucagccucacugaaccggaucugagaaucuucucucucugggcuugccagggcucuccgaaccuagcuagcauccucuucaauuccaacuagaaagcuuaccauguucguguuccugguccuccugccccuggugagcucccagugcgugaaccucaccacccgcacgcagcugccgcccgccuacaccaacagcuucacccggggcgucuacuaccccgacaagguguuccgcuccagcgugcugcacuccacccaggaccucuuccugcccuucuucagcaacgucacgugguuccacgccaucuccgggaccaacggcaccaagcgguucgacaacccggugcugcccuucaacgacgggguguacuucgcgagcaccgagaaguccaacaucauccgcggcuggaucuucgggacgacccucgacagcaagacccagucccugcugaucgucaacaacgccaccaacguggugaucaaggucugcgaguuccaguucugcaacgaccccuuccucggcguguacuaccacaagaacaacaagagcuggauggaguccgaguuccggguguacagcuccgccaacaacugcacguucgaguacgucagccagcccuuccugauggaccuggagggcaagcaggggaacuucaagaaccuccgcgaguucguguucaagaacaucgacggcuacuucaagaucuacuccaagcacaccccgaucaaccuggugcgggaccugccccagggguucagcgcccucgagccccuggucgaccugcccaucggcaucaacaucacccgcuuccagacccuccuggcccugcaccgguccuaccucacgccgggggacagcagcuccggcuggaccgcgggcgccgccgccuacuacgugggguaccugcagccccgcaccuuccugcucaaguacaacgagaacggcaccaucacggacgcgguggacugcgcccuggacccccugagcgagaccaagugcacccucaaguccuucaccgucgagaaggggaucuaccagacgagcaacuuccgggugcagcccaccgaguccaucgugcgcuucccgaacaucaccaaccugugccccuucggcgaggucuucaacgccacccgguucgccagcguguacgccuggaaccgcaagcggaucuccaacugcgucgcggacuacagcgugcuguacaacuccgccagcuucuccacguucaagugcuacggcgugagccccaccaagcucaacgaccugugcuucaccaacgucuacgccgacuccuucgugauccgcggggacgaggugcggcagaucgcccccggccagaccgggaagaucgccgacuacaacuacaagcugccggacgacuucacgggcugcgucaucgcguggaacagcaacaaccucgacuccaaggucgggggcaacuacaacuaccuguuccgccuguuccgcaagagcaaccucaagcccuucgagcgggacaucuccaccgagaucuaccaggccggcagcacccccugcaacgggguggagggcuucaacugcuacuucccccugcaguccuacggguuccagccgaccaacggcgugggguaccagcccuaccggguggugguccugagcuucgagcuccugcacgcccccgccacggugugcggccccaagaaguccaccaaccuggugaagaacaagugcgucaacuucaacuucaacggccucaccgggaccggcgugcugaccgagagcaacaagaaguuccugccguuccagcaguucgggcgcgacaucgccgacacgaccgacgcggugcgcgacccccagacccuggagauccucgacaucacccccugcagcuucggcggggucuccgugaucacgccgggcaccaacaccagcaaccagguggccguccuguaccagggcgugaacugcaccgaggugcccgucgccauccacgccgaccagcugacgcccaccuggcggguguacuccaccgggagcaacguguuccagacccgcgccggcugccucaucggggcggagcacgucaacaacuccuacgagugcgacauccccaucggcgccggcaucugcgccagcuaccagacgcagaccaacuccccgcggcgcgcccggagcguggcgucccagagcgugaucgccuacaccaugucccugggggccgagaacagcgucgccuacuccaacaacagcaucgccauccccaccaacuucacgaucuccgugaccaccgagauccugcccgugagcaugaccaagacgagcgucgacugcaccauguacaucugcggcgacuccaccgagugcagcaaccuccugcugcaguacggguccuucugcacccagcucaaccgcgcgcugacgggcaucgccguggagcaggacaagaacacccaggagguguucgcccaggucaagcagaucuacaagacgcccccgaucaaggacuucgggggcuucaacuucagccagauccugcccgaccccuccaagcccagcaagcgguccuucaucgaggaccuccuguucaacaaggugacccuggccgacgccggcuucaucaagcaguacggggacugccucggcgacaucgcggcccgcgaccugaucugcgcccagaaguucaacgggcugaccgugcucccgccccugcugaccgacgagaugaucgcccaguacaccagcgcccuccuggcgggcaccaucacguccggguggaccuucggcgccggcgccgcccugcagauccccuucgcgaugcagauggccuaccgguucaacgggaucggcgucacccagaacgugcucuacgagaaccagaagcugaucgccaaccaguucaacagcgccaucgggaagauccaggacucccugagcuccaccgccagcgcgcucggcaagcugcaggacguggucaaccagaacgcccaggcccugaacacgcucgugaagcagcuguccagcaacuucggggccaucuccagcgugcugaacgacauccucucccgccuggacccgcccgaggccgagguccagaucgaccggcugaucaccggccgccuccagagccugcagaccuacgugacccagcagcugauccgggcggccgagauccgcgccagcgccaaccucgccgcgaccaagauguccgagugcgugcugggccagagcaagcgggucgacuucugcgggaagggcuaccaccugauguccuucccccagagcgcgccccacggggugguguuccuccacgucacguacgugcccgcccaggagaagaacuucaccaccgccccggccaucugccacgacggcaaggcccacuucccccgcgagggggucuucguguccaacggcacccacugguucgugacgcagcggaacuucuacgagccccagaucaucaccaccgacaacaccuucgucagcggcaacugcgacguggugaucgggaucgucaacaacacgguguacgacccccugcagccggagcuggacuccuucaaggaggagcucgacaaguacuucaagaaccacaccagccccgacguggaccugggcgacaucuccgggaucaacgccagcgucgugaacauccagaaggagaucgaccgccugaacgagguggccaagaaccucaacgagucccugaucgaccugcaggagcucggcaaguacgagcaguacaucaaguggcccugguacaucuggcugggcuucaucgccgggcugaucgcgaucgucaucgugaccaucaugcucugcugcaugaccagcugcugcuccugccugaagggcugcugcagcugcggguccugcugcaaguucgacgaggacgacagcgagccggugcugaagggcgucaagcuccacuacacgugaggacuagucccuguucccagagcccacuuuuuuuucuuuuuuugaaauaaaauagccugucuuucagaucucaaaggcucuuuucagagccaccaaaaaaaaaaaaaaaaaaaaaaaaaaaaaaaaaaaaaaaaaaaaaaaaaaaaaaaaaaaaaaaaaaaaaaaaaaaaaaaaaaaaaaaaaaaaaaaaaaaaa

SEQ ID NO: 23767 - RNA, 4182 nt, Artificial Sequence
  SARS-CoV-2/Wuhan/WIV05/2019__EPI_ISL_402128 spike protein mRNA gc (1-1273)(K986P_V987P_K986P_V987P_H69del_V70del_Y144del_N501Y_A570 D_D614G_P681H_T716I_S982A_D1118H)
aggagagggcgcuuggcuugcaaggacccugagcugcggcauugaagcacacccaacccaacucgacugaagucagccucacugaaccggaucugagaaucuucucucucugggcuugccagggcucuccgaaccuagcuagcauccucuucaauuccaacuagaaagcuuaccauguucguguuccugguccuccugccccuggugagcucccagugcgugaaccucaccacccgcacgcagcugccgcccgccuacaccaacagcuucacccggggcgucuacuaccccgacaagguguuccgcuccagcgugcugcacuccacccaggaccucuuccugcccuucuucagcaacgucacgugguuccacgccaucuccgggaccaacggcaccaagcgguucgacaacccggugcugcccuucaacgacgggguguacuucgcgagcaccgagaaguccaacaucauccgcggcuggaucuucgggacgacccucgacagcaagacccagucccugcugaucgucaacaacgccaccaacguggugaucaaggucugcgaguuccaguucugcaacgaccccuuccucggcguguaccacaagaacaacaagagcuggauggaguccgaguuccggguguacagcuccgccaacaacugcacguucgaguacgucagccagcccuuccugauggaccuggagggcaagcaggggaacuucaagaaccuccgcgaguucguguucaagaacaucgacggcuacuucaagaucuacuccaagcacaccccgaucaaccuggugcgggaccugccccagggguucagcgcccucgagccccuggucgaccugcccaucggcaucaacaucacccgcuuccagacccuccuggcccugcaccgguccuaccucacgccgggggacagcagcuccggcuggaccgcgggcgccgccgccuacuacgugggguaccugcagccccgcaccuuccugcucaaguacaacgagaacggcaccaucacggacgcgguggacugcgcccuggacccccugagcgagaccaagugcacccucaaguccuucaccgucgagaaggggaucuaccagacgagcaacuuccgggugcagcccaccgaguccaucgugcgcuucccgaacaucaccaaccugugccccuucggcgaggucuucaacgccacccgguucgccagcguguacgccuggaaccgcaagcggaucuccaacugcgucgcggacuacagcgugcuguacaacuccgccagcuucuccacguucaagugcuacggcgugagccccaccaagcucaacgaccugugcuucaccaacgucuacgccgacuccuucgugauccgcggggacgaggugcggcagaucgcccccggccagaccgggaagaucgccgacuacaacuacaagcugccggacgacuucacgggcugcgucaucgcguggaacagcaacaaccucgacuccaaggucgggggcaacuacaacuaccuguaccgccuguuccgcaagagcaaccucaagcccuucgagcgggacaucuccaccgagaucuaccaggccggcagcacccccugcaacgggguggagggcuucaacugcuacuucccccugcaguccuacggguuccagccgaccuacggcgugggguaccagcccuaccggguggugguccugagcuucgagcuccugcacgcccccgccacggugugcggccccaagaaguccaccaaccuggugaagaacaagugcgucaacuucaacuucaacggccucaccgggaccggcgugcugaccgagagcaacaagaaguuccugccguuccagcaguucgggcgcgacaucgacgacacgaccgacgccgugcgcgacccccagacccuggagauccucgacaucacccccugcagcuucggcggggucuccgugaucacgccgggcaccaacaccagcaaccagguggcgguccuguaccagggcgugaacugcaccgaggugcccgucgccauccacgccgaccagcugacgcccaccuggcggguguacuccaccgggagcaacguguuccagacccgcgccggcugccucaucggggccgagcacgucaacaacuccuacgagugcgacauccccaucggcgcgggcaucugcgccagcuaccagacgcagaccaacucccaccggcgcgcccggagcguggccucccagagcaucaucgcguacaccaugucccugggggccgagaacagcguggccuacuccaacaacagcaucgccaucccgaucaacuucaccaucuccgucacgaccgagauccugcccgugagcaugaccaagaccagcguggacugcacgauguacaucugcggcgacuccaccgagugcagcaaccuccugcugcaguacggguccuucugcacccagcucaaccgcgcccugaccggcaucgcggucgagcaggacaagaacacgcaggagguguucgcccaggugaagcagaucuacaagaccccgcccaucaaggacuucgggggcuucaacuucagccagauccugcccgaccccuccaagcccagcaagcgguccuucaucgaggaccuccuguucaacaaggucacccuggccgacgccggcuucaucaagcaguacggggacugccucggcgacaucgccgcgcgcgaccugaucugcgcccagaaguucaacgggcugaccgugcugcccccgcuccugacggacgagaugaucgcccaguacaccagcgcccuccuggccggcaccaucaccuccggguggacguucggcgcgggcgccgcccugcagauccccuucgccaugcagauggcguaccgguucaacgggaucggcgugacccagaacguccucuacgagaaccagaagcugaucgccaaccaguucaacagcgccaucgggaagauccaggacucccugagcuccaccgccagcgcccucggcaagcugcaggacguggugaaccagaacgcgcaggcccugaacacccucgucaagcagcuguccagcaacuucggggccaucuccagcgugcugaacgacauccucgcccgccuggacccgcccgaggccgaggugcagaucgaccggcugaucacgggccgccuccagucccugcagaccuacgucacccagcagcugauccgggcggccgagauccgcgccagcgccaaccucgccgcgaccaagaugagcgagugcgugcugggccaguccaagcggguggacuucugcgggaagggcuaccaccugaugagcuucccccaguccgcgccccacggggucguguuccuccacgugaccuacguccccgcccaggagaagaacuucacgaccgcccccgccaucugccacgacggcaaggcccacuucccgcgcgaggggguguucgucagcaacggcacccacugguucgugacccagcggaacuucuacgagccccagaucaucacgacccacaacaccuucguguccggcaacugcgacgucgugaucgggaucgugaacaacaccgucuacgacccccugcagcccgagcuggacagcuucaaggaggagcucgacaaguacuucaagaaccacacguccccggacguggaccugggcgacaucagcgggaucaacgccuccguggucaacauccagaaggagaucgaccgccugaacgagguggccaagaaccucaacgagagccugaucgaccugcaggagcucggcaaguacgagcaguacaucaaguggcccugguacaucuggcugggcuucaucgccgggcugaucgcgaucgugauggucaccaucaugcucugcugcaugaccuccugcugcagcugccugaagggcugcugcuccugcgggagcugcugcaaguucgacgaggacgacuccgagcccgugcugaagggcgugaagcuccacuacaccugaggacuagucccuguucccagagcccacuuuuuuuucuuuuuuugaaauaaaauagccugucuuucagaucucaaaggcucuuuucagagccaccaaaaaaaaaaaaaaaaaaaaaaaaaaaaaaaaaaaaaaaaaaaaaaaaaaaaaaaaaaaaaaaaaaaaaaaaaaaaaaaaaaaaaaaaaaaaaaaaaaaaa

SEQ ID NO: 23768 - RNA, 4191 nt, Artificial Sequence
  SARS-CoV-2/Wuhan/WIV05/2019__EPI_ISL_402128 spike protein mRNA gc (1-1273)(K986P_V987P_K986P_V987P_K417N_E484K_N501Y_D614G)
aggagagggcgcuuggcuugcaaggacccugagcugcggcauugaagcacacccaacccaacucgacugaagucagccucacugaaccggaucugagaaucuucucucucugggcuugccagggcucuccgaaccuagcuagcauccucuucaauuccaacuagaaagcuuaccauguucguguuccugguccuccugccccuggugagcucccagugcgugaaccucaccacccgcacgcagcugccgcccgccuacaccaacagcuucacccggggcgucuacuaccccgacaagguguuccgcuccagcgugcugcacuccacccaggaccucuuccugcccuucuucagcaacgucacgugguuccacgccauccacguguccgggaccaacggcaccaagcgguucgacaacccggugcugcccuucaacgacggggucuacuucgcgagcaccgagaaguccaacaucauccgcggcuggaucuucgggacgacccucgacagcaagacccagucccugcugaucgugaacaacgccaccaacguggucaucaaggugugcgaguuccaguucugcaacgaccccuuccucggcguguacuaccacaagaacaacaagagcuggauggaguccgaguuccgggucuacagcuccgccaacaacugcacguucgaguacgugagccagcccuuccugauggaccuggagggcaagcaggggaacuucaagaaccuccgcgaguucguguucaagaacaucgacggcuacuucaagaucuacuccaagcacaccccgaucaaccugguccgggaccugccccagggguucagcgcccucgagccccugguggaccugcccaucggcaucaacaucacccgcuuccagacccuccuggcccugcaccgguccuaccucacgccgggggacagcagcuccggcuggaccgcgggcgccgccgccuacuacgugggguaccugcagccccgcaccuuccugcucaaguacaacgagaacggcaccaucacggacgcggucgacugcgcccuggacccccugagcgagaccaagugcacccucaaguccuucaccguggagaaggggaucuaccagacgagcaacuuccgggugcagcccaccgaguccaucguccgcuucccgaacaucaccaaccugugccccuucggcgagguguucaacgccacccgguucgccagcgucuacgccuggaaccgcaagcggaucuccaacugcguggcggacuacagcgugcuguacaacuccgccagcuucuccacguucaagugcuacggcgucagccccaccaagcucaacgaccugugcuucaccaacguguacgccgacuccuucgugauccgcggggacgagguccggcagaucgcccccggccagaccgggaacaucgccgacuacaacuacaagcugccggacgacuucacgggcugcgugaucgcguggaacagcaacaaccucgacuccaaggucgggggcaacuacaacuaccuguaccgccuguuccgcaagagcaaccucaagcccuucgagcgggacaucuccaccgagaucuaccaggccggcagcacccccugcaacggggugaagggcuucaacugcuacuucccccugcaguccuacggguuccagccgaccuacggcgugggguaccagcccuaccggguggucgugcugagcuucgagcuccugcacgcccccgccacggugugcggccccaagaaguccaccaaccuggucaagaacaagugcgugaacuucaacuucaacggccucaccgggaccggcgugcugaccgagagcaacaagaaguuccugccguuccagcaguucgggcgcgacaucgccgacacgaccgacgcgguccgcgacccccagacccuggagauccucgacaucacccccugcagcuucggcgggguguccgugaucacgccgggcaccaacaccagcaaccaggucgccgugcuguaccagggcgugaacugcaccgagguccccguggccauccacgccgaccagcugacgcccaccuggcggguguacuccaccgggagcaacgucuuccagacccgcgccggcugccucaucggggcggagcacgugaacaacuccuacgagugcgacauccccaucggcgccggcaucugcgccagcuaccagacgcagaccaacuccccgcggcgcgcccggagcguggcgucccagagcaucaucgccuacaccaugucccugggggccgagaacagcgucgccuacuccaacaacagcaucgccauccccaccaacuucacgaucuccgugaccaccgagauccugcccgugagcaugaccaagacgagcgucgacugcaccauguacaucugcggcgacuccaccgagugcagcaaccuccugcugcaguacggguccuucugcacccagcucaaccgcgcgcugacgggcaucgccguggagcaggacaagaacacccaggagguguucgcccaggucaagcagaucuacaagacgcccccgaucaaggacuucgggggcuucaacuucagccagauccugcccgaccccuccaagcccagcaagcgguccuucaucgaggaccuccuguucaacaaggugacccuggccgacgccggcuucaucaagcaguacggggacugccucggcgacaucgcggcccgcgaccugaucugcgcccagaaguucaacgggcugaccgugcucccgccccugcugaccgacgagaugaucgcccaguacaccagcgcccuccuggcgggcaccaucacguccggguggaccuucggcgccggcgccgcccugcagauccccuucgcgaugcagauggccuaccgguucaacgggaucggcgucacccagaacgugcucuacgagaaccagaagcugaucgccaaccaguucaacagcgccaucgggaagauccaggacucccugagcuccaccgccagcgcgcucggcaagcugcaggacguggucaaccagaacgcccaggcccugaacacgcucgugaagcagcuguccagcaacuucggggccaucuccagcgugcugaacgacauccucucccgccuggacccgcccgaggccgagguccagaucgaccggcugaucaccggccgccuccagagccugcagaccuacgugacccagcagcugauccgggcggccgagauccgcgccagcgccaaccucgccgcgaccaagauguccgagugcgugcugggccagagcaagcgggucgacuucugcgggaagggcuaccaccugauguccuucccccagagcgcgccccacggggugguguuccuccacgucacguacgugcccgcccaggagaagaacuucaccaccgccccggccaucugccacgacggcaaggcccacuucccccgcgagggggucuucguguccaacggcacccacugguucgugacgcagcggaacuucuacgagccccagaucaucaccaccgacaacaccuucgucagcggcaacugcgacguggugaucgggaucgucaacaacacgguguacgacccccugcagccggagcuggacuccuucaaggaggagcucgacaaguacuucaagaaccacaccagccccgacguggaccugggcgacaucuccgggaucaacgccagcgucgugaacauccagaaggagaucgaccgccugaacgagguggccaagaaccucaacgagucccugaucgaccugcaggagcucggcaaguacgagcaguacaucaaguggcccugguacaucuggcugggcuucaucgccgggcugaucgcgaucgucauggugaccaucaugcucugcugcaugaccagcugcugcuccugccugaagggcugcugcagcugcggguccugcugcaaguucgacgaggacgacagcgagccggugcugaagggcgucaagcuccacuacacgugaggacuagucccuguucccagagcccacuuuuuuuucuuuuuuugaaauaaaauagccugucuuucagaucucaaaggcucuuuucagagccaccaaaaaaaaaaaaaaaaaaaaaaaaaaaaaaaaaaaaaaaaaaaaaaaaaaaaaaaaaaaaaaaaaaaaaaaaaaaaaaaaaaaaaaaaaaaaaaaaaaaaa

SEQ ID NO: 23769 - RNA, 4182 nt, Artificial Sequence
  SARS-CoV-2/Wuhan/WIV05/2019__EPI_ISL_402128 spike protein mRNA gc (1-1273)(K986P_V987P_K986P_V987P_L18F_D80A_D215G_L242del_A243del_ L244del_R246I_K417N_E484K_N501Y_D614G_A701V)
aggagagggcgcuuggcuugcaaggacccugagcugcggcauugaagcacacccaacccaacucgacugaagucagccucacugaaccggaucugagaaucuucucucucugggcuugccagggcucuccgaaccuagcuagcauccucuucaauuccaacuagaaagcuuaccauguucguguuccugguccuccugccccuggugagcucccagugcgugaacuucaccacccgcacgcagcucccgcccgccuacaccaacagcuucacccggggcgucuacuaccccgacaagguguuccgcuccagcgugcugcacuccacccaggaccuguuccuccccuucuucagcaacgucacgugguuccacgccauccacguguccgggaccaacggcaccaagcgguucgcgaacccggugcugcccuucaacgacggggucuacuucgccagcaccgagaaguccaacaucauccgcggcuggaucuucgggacgacccuggacagcaagacccagucccuccugaucgugaacaacgccaccaacguggucaucaaggugugcgaguuccaguucugcaacgaccccuuccugggcguguacuaccacaagaacaacaagagcuggauggaguccgaguuccgggucuacagcuccgccaacaacugcacguucgaguacgugagccagcccuuccucauggaccuggagggcaagcaggggaacuucaagaaccugcgcgaguucguguucaagaacaucgacggcuacuucaagaucuacuccaagcacaccccgaucaaccucguccgggggcugccccagggcuucagcgcccuggagccccucguggaccugcccaucgggaucaacaucacccgcuuccagacccugcacaucuccuaccucacgccgggcgacagcagcuccggcuggaccgcgggggccgccgccuacuacgugggcuaccugcagccccggaccuuccugcucaaguacaacgagaacgggaccaucacggacgcggucgacugcgcccuggacccccugagcgagaccaagugcacccucaaguccuucaccguggagaagggcaucuaccagacgagcaacuuccgcgugcagcccaccgaguccaucguccgguucccgaacaucaccaaccugugccccuucggcgagguguucaacgccacccgcuucgccagcgucuacgccuggaaccggaagcgcaucuccaacugcguggcggacuacagcgugcuguacaacuccgccagcuucuccacguucaagugcuacggggucagccccaccaagcucaacgaccugugcuucaccaacguguacgccgacuccuucgugauccggggcgacgagguccgccagaucgcccccgggcagaccggcaacaucgccgacuacaacuacaagcugccggacgacuucacggggugcgugaucgcguggaacagcaacaaccucgacuccaaggugggcggcaacuacaacuaccuguaccggcuguuccgcaagagcaaccucaagcccuucgagcgggacaucuccaccgagaucuaccaggccgggagcacccccugcaacggcgucaagggguucaacugcuacuucccccugcaguccuacggcuuccagccgaccuacggggugggcuaccagcccuaccgcguggucgugcugagcuucgagcuccugcacgcccccgccacggugugcggccccaagaaguccaccaaccuggucaagaacaagugcgugaacuucaacuucaacgggcucaccggcaccggggugcugaccgagagcaacaagaaguuccugccguuccagcaguucggccgggacaucgccgacacgaccgacgcgguccgcgacccccagacccucgagauccuggacaucacccccugcagcuucgggggcguguccgugaucacgccgggcaccaacaccagcaaccaggucgccgugcuguaccagggggugaacugcaccgagguccccguggccauccacgccgaccagcugacgcccaccuggcgcguguacuccaccggcagcaacgucuuccagacccgggccgggugccucaucggcgcggagcacgugaacaacuccuacgagugcgacauccccaucggcgccgggaucugcgccagcuaccagacgcagaccaacuccccgcgccgggcccgcagcguggcgucccagagcaucaucgccuacaccaugucccugggcgucgagaacagcguggccuacuccaacaacagcaucgccauccccaccaacuucacgaucuccgugaccaccgagauccugcccgucagcaugaccaagacgagcguggacugcaccauguacaucugcggggacuccaccgagugcagcaaccuccugcugcaguacggcuccuucugcacccagcucaaccgggcccugacggggaucgcgguggagcaggacaagaacacccaggaggucuucgcccaggugaagcagaucuacaagacgcccccgaucaaggacuucggcggcuucaacuucagccagauccugcccgaccccuccaagcccagcaagcgcuccuucaucgaggaccuccuguucaacaaggugacccuggccgacgccggguucaucaagcaguacggcgacugccucggggacaucgccgcgcgggaccugaucugcgcccagaaguucaacggccugaccguccucccgccccugcugaccgacgagaugaucgcccaguacaccagcgcccuccuggccgggaccaucacguccggcuggaccuucggcgcgggggccgcccugcagauccccuucgccaugcagauggcguaccgcuucaacggcaucggggugacccagaacgugcucuacgagaaccagaagcugaucgccaaccaguucaacagcgccaucggcaagauccaggacucccugagcuccaccgccagcgcccucgggaagcugcaggacgucgugaaccagaacgcgcaggcccugaacacgcucgugaagcagcuguccagcaacuucggcgccaucuccagcguccugaacgacauccucucccggcuggacccgcccgaggccgaggugcagaucgaccgccugaucaccggccggcuccagagccugcagaccuacgugacccagcagcugauccgcgccgcggagauccgggccagcgccaaccucgccgccaccaagauguccgagugcguccuggggcagagcaagcgcguggacuucugcggcaagggguaccaccugauguccuucccccagagcgcgccccacggcguggucuuccuccacgugacguacguccccgcccaggagaagaacuucaccaccgccccggccaucugccacgacgggaaggcgcacuucccccgggagggcguguucguguccaacggcacccacugguucgucacgcagcgcaacuucuacgagccccagaucaucaccaccgacaacaccuucgugagcgggaacugcgacguggucaucggcaucgugaacaacacgguguacgacccccugcagccggagcuggacuccuucaaggaggagcucgacaaguacuucaagaaccacaccagccccgacgucgaccugggggacaucuccggcaucaacgccagcguggugaacauccagaaggagaucgaccggcugaacgaggucgccaagaaccucaacgagucccugaucgaccugcaggagcucggcaaguacgagcaguacaucaaguggcccugguacaucuggcugggguucaucgccggccugaucgccaucgugauggugaccaucaugcucugcugcaugaccagcugcugcuccugccugaaggggugcugcagcugcggcuccugcugcaaguucgacgaggacgacagcgagccgguccugaagggggugaagcuccacuacacgugaggacuagucccuguucccagagcccacuuuuuuuucuuuuuuugaaauaaaauagccugucuuucagaucucaaaggcucuuuucagagccaccaaaaaaaaaaaaaaaaaaaaaaaaaaaaaaaaaaaaaaaaaaaaaaaaaaaaaaaaaaaaaaaaaaaaaaaaaaaaaaaaaaaaaaaaaaaaaaaaaaaaa

SEQ ID NO: 23770 - RNA, 4191 nt, Artificial Sequence
  SARS-CoV-2/Wuhan/WIV05/2019__EPI_ISL_402128 spike protein mRNA gc (1-1273)(K986P_V987P_K986P_V987P_E484K_D614G)
aggagagggcgcuuggcuugcaaggacccugagcugcggcauugaagcacacccaacccaacucgacugaagucagccucacugaaccggaucugagaaucuucucucucugggcuugccagggcucuccgaaccuagcuagcauccucuucaauuccaacuagaaagcuuaccauguucguguuccugguccuccugccccuggugagcucccagugcgugaaccucaccacccgcacgcagcugccgcccgccuacaccaacagcuucacccggggcgucuacuaccccgacaagguguuccgcuccagcgugcugcacuccacccaggaccucuuccugcccuucuucagcaacgucacgugguuccacgccauccacguguccgggaccaacggcaccaagcgguucgacaacccggugcugcccuucaacgacggggucuacuucgcgagcaccgagaaguccaacaucauccgcggcuggaucuucgggacgacccucgacagcaagacccagucccugcugaucgugaacaacgccaccaacguggucaucaaggugugcgaguuccaguucugcaacgaccccuuccucggcguguacuaccacaagaacaacaagagcuggauggaguccgaguuccgggucuacagcuccgccaacaacugcacguucgaguacgugagccagcccuuccugauggaccuggagggcaagcaggggaacuucaagaaccuccgcgaguucguguucaagaacaucgacggcuacuucaagaucuacuccaagcacaccccgaucaaccugguccgggaccugccccagggguucagcgcccucgagccccugguggaccugcccaucggcaucaacaucacccgcuuccagacccuccuggcccugcaccgguccuaccucacgccgggggacagcagcuccggcuggaccgcgggcgccgccgccuacuacgugggguaccugcagccccgcaccuuccugcucaaguacaacgagaacggcaccaucacggacgcggucgacugcgcccuggacccccugagcgagaccaagugcacccucaaguccuucaccguggagaaggggaucuaccagacgagcaacuuccgggugcagcccaccgaguccaucguccgcuucccgaacaucaccaaccugugccccuucggcgagguguucaacgccacccgguucgccagcgucuacgccuggaaccgcaagcggaucuccaacugcguggcggacuacagcgugcuguacaacuccgccagcuucuccacguucaagugcuacggcgucagccccaccaagcucaacgaccugugcuucaccaacguguacgccgacuccuucgugauccgcggggacgagguccggcagaucgcccccggccagaccgggaagaucgccgacuacaacuacaagcugccggacgacuucacgggcugcgugaucgcguggaacagcaacaaccucgacuccaaggucgggggcaacuacaacuaccuguaccgccuguuccgcaagagcaaccucaagcccuucgagcgggacaucuccaccgagaucuaccaggccggcagcacccccugcaacggggugaagggcuucaacugcuacuucccccugcaguccuacggguuccagccgaccaacggcgugggguaccagcccuaccggguggucgugcugagcuucgagcuccugcacgcccccgccacggugugcggccccaagaaguccaccaaccuggucaagaacaagugcgugaacuucaacuucaacggccucaccgggaccggcgugcugaccgagagcaacaagaaguuccugccguuccagcaguucgggcgcgacaucgccgacacgaccgacgcgguccgcgacccccagacccuggagauccucgacaucacccccugcagcuucggcgggguguccgugaucacgccgggcaccaacaccagcaaccaggucgccgugcuguaccagggcgugaacugcaccgagguccccguggccauccacgccgaccagcugacgcccaccuggcggguguacuccaccgggagcaacgucuuccagacccgcgccggcugccucaucggggcggagcacgugaacaacuccuacgagugcgacauccccaucggcgccggcaucugcgccagcuaccagacgcagaccaacuccccgcggcgcgcccggagcguggcgucccagagcaucaucgccuacaccaugucccugggggccgagaacagcgucgccuacuccaacaacagcaucgccauccccaccaacuucacgaucuccgugaccaccgagauccugcccgugagcaugaccaagacgagcgucgacugcaccauguacaucugcggcgacuccaccgagugcagcaaccuccugcugcaguacggguccuucugcacccagcucaaccgcgcgcugacgggcaucgccguggagcaggacaagaacacccaggagguguucgcccaggucaagcagaucuacaagacgcccccgaucaaggacuucgggggcuucaacuucagccagauccugcccgaccccuccaagcccagcaagcgguccuucaucgaggaccuccuguucaacaaggugacccuggccgacgccggcuucaucaagcaguacggggacugccucggcgacaucgcggcccgcgaccugaucugcgcccagaaguucaacgggcugaccgugcucccgccccugcugaccgacgagaugaucgcccaguacaccagcgcccuccuggcgggcaccaucacguccggguggaccuucggcgccggcgccgcccugcagauccccuucgcgaugcagauggccuaccgguucaacgggaucggcgucacccagaacgugcucuacgagaaccagaagcugaucgccaaccaguucaacagcgccaucgggaagauccaggacucccugagcuccaccgccagcgcgcucggcaagcugcaggacguggucaaccagaacgcccaggcccugaacacgcucgugaagcagcuguccagcaacuucggggccaucuccagcgugcugaacgacauccucucccgccuggacccgcccgaggccgagguccagaucgaccggcugaucaccggccgccuccagagccugcagaccuacgugacccagcagcugauccgggcggccgagauccgcgccagcgccaaccucgccgcgaccaagauguccgagugcgugcugggccagagcaagcgggucgacuucugcgggaagggcuaccaccugauguccuucccccagagcgcgccccacggggugguguuccuccacgucacguacgugcccgcccaggagaagaacuucaccaccgccccggccaucugccacgacggcaaggcccacuucccccgcgagggggucuucguguccaacggcacccacugguucgugacgcagcggaacuucuacgagccccagaucaucaccaccgacaacaccuucgucagcggcaacugcgacguggugaucgggaucgucaacaacacgguguacgacccccugcagccggagcuggacuccuucaaggaggagcucgacaaguacuucaagaaccacaccagccccgacguggaccugggcgacaucuccgggaucaacgccagcgucgugaacauccagaaggagaucgaccgccugaacgagguggccaagaaccucaacgagucccugaucgaccugcaggagcucggcaaguacgagcaguacaucaaguggcccugguacaucuggcugggcuucaucgccgggcugaucgcgaucgucauggugaccaucaugcucugcugcaugaccagcugcugcuccugccugaagggcugcugcagcugcggguccugcugcaaguucgacgaggacgacagcgagccggugcugaagggcgucaagcuccacuacacgugaggacuagucccuguucccagagcccacuuuuuuuucuuuuuuugaaauaaaauagccugucuuucagaucucaaaggcucuuuucagagccaccaaaaaaaaaaaaaaaaaaaaaaaaaaaaaaaaaaaaaaaaaaaaaaaaaaaaaaaaaaaaaaaaaaaaaaaaaaaaaaaaaaaaaaaaaaaaaaaaaaaaa

SEQ ID NO: 23771 - RNA, 4191 nt, Artificial Sequence
  SARS-CoV-2/Wuhan/WIV05/2019__EPI_ISL_402128 spike protein mRNA gc (1-1273)(K986P_V987P_K986P_V987P_L18F_T20N_P26S_D138Y_R190S_K417T _E484K_N501Y_D614G_H655Y_T1027I)
aggagagggcgcuuggcuugcaaggacccugagcugcggcauugaagcacacccaacccaacucgacugaagucagccucacugaaccggaucugagaaucuucucucucugggcuugccagggcucuccgaaccuagcuagcauccucuucaauuccaacuagaaagcuuaccauguucguguuccugguccuccugccccuggugagcucccagugcgugaacuucaccaaccgcacccagcucccgagcgccuacacgaacuccuucacccggggcgucuacuaccccgacaagguguuccgcagcuccgugcugcacagcacccaggaccuguuccuccccuucuucuccaacgucaccugguuccacgccauccacgugagcgggacgaacggcaccaagcgguucgacaaccccgugcugccguucaacgacggggucuacuucgcguccaccgagaaguccaacaucauccgcggcuggaucuucgggaccacgcuggacuccaagacccagagccuccugaucgugaacaacgccaccaacguggucaucaaggugugcgaguuccaguucugcaacuaccccuuccugggcguguacuaccacaagaacaacaaguccuggauggagagcgaguuccgggucuacuccagcgccaacaacugcaccuucgaguacgugucccagcccuuccucauggaccuggagggcaagcaggggaacuucaagaaccugagcgaguucguguucaagaacaucgacggcuacuucaagaucuacuccaagcacacgcccaucaaccucguccgcgaccugccgcagggguucagcgcccuggagccccucguggaccugcccaucggcaucaacaucacccgguuccagacccugcucgcccugcaccgcagcuaccugacccccggggacuccagcuccggcuggacggcgggcgccgccgccuacuacgugggguaccuccagccgcggaccuuccugcugaaguacaacgagaacggcaccaucaccgacgcggucgacugcgcccucgacccccugagcgagacgaagugcacccugaaguccuucaccguggagaaggggaucuaccagaccagcaacuuccgcgugcagcccacggaguccaucguccgguuccccaacaucaccaaccucugcccguucggcgagguguucaacgccacccgcuucgccagcgucuacgccuggaaccggaagcgcaucuccaacugcguggcggacuacagcgugcuguacaacuccgccagcuucuccaccuucaagugcuacggcgucagccccacgaagcugaacgaccucugcuucaccaacguguacgccgacuccuucgugauccgcggggacgagguccggcagaucgcccccggccagaccgggaccaucgccgacuacaacuacaagcugcccgacgacuucacgggcugcgugaucgcguggaacagcaacaaccuggacuccaaggucgggggcaacuacaacuaccucuaccggcuguuccgcaagagcaaccugaagccguucgagcgggacaucuccaccgagaucuaccaggccggcagcacccccugcaacggggugaagggcuucaacugcuacuucccccuccagagcuacggguuccagcccaccuacggcgugggguaccagccguaccgcguggucgugcuguccuucgagcugcuccacgcccccgccacggugugcggccccaagaaguccaccaaccuggucaagaacaagugcgugaacuucaacuucaacggccugaccgggaccggcgugcucaccgagagcaacaagaaguuccugcccuuccagcaguucgggcgggacaucgccgacacgaccgacgcgguccgcgacccgcagacccuggagauccuggacaucacccccugcagcuucggcgggguguccgugaucacgcccggcaccaacaccagcaaccaggucgccgugcucuaccagggcgugaacugcaccgaggucccgguggccauccacgccgaccagcugacgcccaccuggcgcguguacuccaccgggagcaacgucuuccagacccgggccggcugccugaucggggcggaguacgugaacaacuccuacgagugcgacauccccaucggcgccggcaucugcgccagcuaccagacgcagaccaacagcccccgccgggcccgcagcguggcgucccagagcaucaucgccuacaccaugucccucggggccgagaacagcgucgccuacuccaacaacagcaucgccaucccgaccaacuucacgaucagcgugaccaccgagauccugcccguguccaugaccaagacgagcgucgacugcaccauguacaucugcggcgacuccaccgagugcagcaaccugcuccugcaguacggguccuucugcacccagcugaaccgggcgcucacgggcaucgccguggagcaggacaagaacacccaggagguguucgcccaggucaagcagaucuacaagaccccgcccaucaaggacuucgggggcuucaacuucagccagauccugcccgaccccuccaagcccagcaagcgcuccuucaucgaggaccuccuguucaacaaggugacccuggccgacgccggcuucaucaagcaguacggggacugccugggcgacaucgcggcccgggaccucaucugcgcccagaaguucaacgggcugacggugcugcccccgcuccugaccgacgagaugaucgcccaguacaccagcgcccugcucgcgggcaccaucacguccggguggaccuucggcgccggcgccgcccugcagauccccuucgcgaugcagauggccuaccgcuucaacgggaucggcgucacccagaacgugcuguacgagaaccagaagcucaucgccaaccaguucaacagcgccaucgggaagauccaggacucccugagcuccaccgccagcgcgcugggcaagcuccaggacguggucaaccagaacgcccaggcccugaacacgcuggugaagcagcucuccagcaacuucggggccaucuccagcgugcugaacgacauccugagccggcucgacccgcccgaggccgagguccagaucgaccgccugaucaccggccggcugcagucccuccagaccuacgugacccagcagcugauccgcgcggccgagauccgggccagcgccaaccuggccgcgaucaagauguccgagugcgugcucggccagagcaagcgcgucgacuucugcgggaagggcuaccaccugauguccuucccccagagcgcgccccacggggugguguuccugcacgucaccuacgugcccgcccaggagaagaacuucacgaccgcccccgccaucugccacgacggcaaggcccacuucccgcgggagggggucuucguguccaacggcacccacugguucgugacccagcgcaacuucuacgagccccagaucaucacgaccgacaacaccuucgucagcggcaacugcgacguggugaucgggaucgucaacaacaccguguacgacccccuccagcccgagcuggacuccuucaaggaggagcuggacaaguacuucaagaaccacacgagcccggacguggaccucggcgacaucuccgggaucaacgccagcgucgugaacauccagaaggagaucgaccggcugaacgagguggccaagaaccugaacgagucccucaucgaccugcaggagcugggcaaguacgagcaguacaucaaguggcccugguacaucuggcucggcuucaucgccgggcugaucgcgaucgucauggugaccaucaugcugugcugcaugaccagcugcugcuccugccucaagggcugcugcagcugcggguccugcugcaaguucgacgaggacgacagcgagcccgugcugaagggcgucaagcugcacuacaccugaggacuagucccuguucccagagcccacuuuuuuuucuuuuuuugaaauaaaauagccugucuuucagaucucaaaggcucuuuucagagccaccaaaaaaaaaaaaaaaaaaaaaaaaaaaaaaaaaaaaaaaaaaaaaaaaaaaaaaaaaaaaaaaaaaaaaaaaaaaaaaaaaaaaaaaaaaaaaaaaaaaaa

SEQ ID NO: 23772 - RNA, 4191 nt, Artificial Sequence
  SARS-CoV-2/Wuhan/WIV05/2019__EPI_ISL_402128 spike protein mRNA gc (1-1273)(K986P_V987P_K986P_V987P_S13I_W152C_L452R_D614G)
aggagagggcgcuuggcuugcaaggacccugagcugcggcauugaagcacacccaacccaacucgacugaagucagccucacugaaccggaucugagaaucuucucucucugggcuugccagggcucuccgaaccuagcuagcauccucuucaauuccaacuagaaagcuuaccauguucguguuccugguccuccugccccuggugagcauccagugcgugaaccucaccacccgcacgcagcugccgcccgccuacaccaacuccuucacccggggcgucuacuaccccgacaagguguuccgcagcuccgugcugcacagcacccaggaccucuuccugcccuucuucuccaacgucacgugguuccacgccauccacgugagcgggaccaacggcaccaagcgguucgacaacccggugcugcccuucaacgacggggucuacuucgcguccaccgagaaguccaacaucauccgcggcuggaucuucgggacgacccucgacagcaagacccagagccugcugaucgugaacaacgccaccaacguggucaucaaggugugcgaguuccaguucugcaacgaccccuuccucggcguguacuaccacaagaacaacaaguccugcauggagagcgaguuccgggucuacuccagcgccaacaacugcacguucgaguacgugucccagcccuuccugauggaccuggagggcaagcaggggaacuucaagaaccuccgcgaguucguguucaagaacaucgacggcuacuucaagaucuacagcaagcacaccccgaucaaccugguccgggaccugccccagggguucuccgcccucgagccccugguggaccugcccaucggcaucaacaucacccgcuuccagacccuccuggcccugcaccggagcuaccucacgccgggggacuccagcagcggcuggaccgcgggcgccgccgccuacuacgugggguaccugcagccccgcaccuuccugcucaaguacaacgagaacggcaccaucacggacgcggucgacugcgcccuggacccccuguccgagaccaagugcacccucaagagcuucaccguggagaaggggaucuaccagacguccaacuuccgggugcagcccaccgagagcaucguccgcuucccgaacaucaccaaccugugccccuucggcgagguguucaacgccacccgguucgccuccgucuacgccuggaaccgcaagcggaucagcaacugcguggcggacuacuccgugcuguacaacagcgccuccuucagcacguucaagugcuacggcgucucccccaccaagcucaacgaccugugcuucaccaacguguacgccgacagcuucgugauccgcggggacgagguccggcagaucgcccccggccagaccgggaagaucgccgacuacaacuacaagcugccggacgacuucacgggcugcgugaucgcguggaacuccaacaaccucgacagcaaggucgggggcaacuacaacuaccgcuaccggcuguuccgcaaguccaaccugaagcccuucgagcgggacaucagcaccgagaucuaccaggccggcuccacccccugcaacgggguggagggcuucaacugcuacuucccccuccagagcuacggguuccagccgaccaacggcgugggguaccagcccuaccgcguggucgugcuguccuucgagcugcuccacgcccccgccacggugugcggccccaagaaguccaccaaccuggucaagaacaagugcgugaacuucaacuucaacggccugaccgggaccggcgugcucaccgagagcaacaagaaguuccugccguuccagcaguucgggcgcgacaucgccgacacgaccgacgcgguccgggacccccagacccuggagauccuggacaucacccccugcagcuucggcggggugagcgugaucacgccgggcaccaacaccuccaaccaggucgccgugcucuaccagggcgugaacugcaccgagguccccguggccauccacgccgaccagcugacgcccaccuggcgcguguacagcaccggguccaacgucuuccagacccgggccggcugccugaucggggcggagcacgugaacaacagcuacgagugcgacauccccaucggcgccggcaucugcgccuccuaccagacgcagaccaacagcccgcgccgggcccgcuccguggcgagccaguccaucaucgccuacaccaugagccucggggccgagaacuccgucgccuacagcaacaacuccaucgccauccccaccaacuucacgaucagcgugaccaccgagauccugcccguguccaugaccaagacgagcgucgacugcaccauguacaucugcggcgacagcaccgagugcuccaaccugcuccugcaguacgggagcuucugcacccagcugaaccgggcgcucacgggcaucgccguggagcaggacaagaacacccaggagguguucgcccaggucaagcagaucuacaagacgcccccgaucaaggacuucgggggcuucaacuucucccagauccugcccgaccccagcaagcccuccaagcgcagcuucaucgaggaccuccuguucaacaaggugacccuggccgacgccggcuucaucaagcaguacggggacugccugggcgacaucgcggcccgggaccucaucugcgcccagaaguucaacgggcugaccgugcugccgccccuccugaccgacgagaugaucgcccaguacaccuccgcccugcucgcgggcaccaucacgagcggguggaccuucggcgccggcgccgcccugcagauccccuucgcgaugcagauggccuaccgcuucaacgggaucggcgucacccagaacgugcuguacgagaaccagaagcucaucgccaaccaguucaacuccgccaucgggaagauccaggacagccuguccagcaccgccuccgcgcugggcaagcuccaggacguggucaaccagaacgcccaggcccugaacacgcuggugaagcagcucagcuccaacuucggggccaucagcuccgugcugaacgacauccugagccggcucgacccgcccgaggccgagguccagaucgaccgccugaucaccggccggcugcagucccuccagaccuacgugacccagcagcugauccgcgcggccgagauccgggccagcgccaaccuggccgcgaccaagaugagcgagugcgugcucggccaguccaagcgcgucgacuucugcgggaagggcuaccaccugaugagcuucccccaguccgcgccccacggggugguguuccugcacgucacguacgugcccgcccaggagaagaacuucaccaccgccccggccaucugccacgacggcaaggcccacuucccccgggagggggucuucgugagcaacggcacccacugguucgugacgcagcgcaacuucuacgagccccagaucaucaccaccgacaacaccuucgucuccggcaacugcgacguggugaucgggaucgucaacaacacgguguacgacccccuccagccggagcuggacagcuucaaggaggagcuggacaaguacuucaagaaccacaccucccccgacguggaccucggcgacaucagcgggaucaacgccuccgucgugaacauccagaaggagaucgaccggcugaacgagguggccaagaaccugaacgagagccucaucgaccugcaggagcugggcaaguacgagcaguacaucaaguggcccugguacaucuggcucggcuucaucgccgggcugaucgcgaucgucauggugaccaucaugcugugcugcaugaccuccugcugcagcugccucaagggcugcugcuccugcgggagcugcugcaaguucgacgaggacgacuccgagccggugcugaagggcgucaagcugcacuacacgugaggacuagucccuguucccagagcccacuuuuuuuucuuuuuuugaaauaaaauagccugucuuucagaucucaaaggcucuuuucagagccaccaaaaaaaaaaaaaaaaaaaaaaaaaaaaaaaaaaaaaaaaaaaaaaaaaaaaaaaaaaaaaaaaaaaaaaaaaaaaaaaaaaaaaaaaaaaaaaaaaaaaa

SEQ ID NO: 23773 - RNA, 4191 nt, Artificial Sequence
  SARS-CoV-2/Wuhan/WIV05/2019__EPI_ISL_402128 spike protein mRNA gc (1-1273)(K986P_V987P)
aggagagggcgcuuggcuugcaaggacccugagcugcggcauugaagcacacccaacccaacucgacugaagucagccucacugaaccggaucugagaaucuucucucucugggcuugccagggcucuccgaaccuagcuagcauccucuucaauuccaacuagaaagcuuaccauguucguguuccuggugcugcugccccuggugagcagccagugcgugaaccugaccacccggacccagcugccaccagccuacaccaacagcuucacccggggcgucuacuaccccgacaagguguuccggagcagcguccugcacagcacccaggaccuguuccugcccuucuucagcaacgugaccugguuccacgccauccacgugagcggcaccaacggcaccaagcgguucgacaaccccgugcugcccuucaacgacggcguguacuucgccagcaccgagaagagcaacaucauccggggcuggaucuucggcaccacccuggacagcaagacccagagccugcugaucgugaauaacgccaccaacguggugaucaaggugugcgaguuccaguucugcaacgaccccuuccugggcguguacuaccacaagaacaacaagagcuggauggagagcgaguuccggguguacagcagcgccaacaacugcaccuucgaguacgugagccagcccuuccugauggaccuggagggcaagcagggcaacuucaagaaccugcgggaguucguguucaagaacaucgacggcuacuucaagaucuacagcaagcacaccccaaucaaccuggugcgggaucugccccagggcuucucagcccuggagccccugguggaccugcccaucggcaucaacaucacccgguuccagacccugcuggcccugcaccggagcuaccugaccccaggcgacagcagcagcggguggacagcaggcgcggcugcuuacuacgugggcuaccugcagccccggaccuuccugcugaaguacaacgagaacggcaccaucaccgacgccguggacugcgcccuggacccucugagcgagaccaagugcacccugaagagcuucaccguggagaagggcaucuaccagaccagcaacuuccgggugcagcccaccgagagcaucgugcgguuccccaacaucaccaaccugugccccuucggcgagguguucaacgccacccgguucgccagcguguacgccuggaaccggaagcggaucagcaacugcguggccgacuacagcgugcuguacaacagcgccagcuucagcaccuucaagugcuacggcgugagccccaccaagcugaacgaccugugcuucaccaacguguacgccgacagcuucgugauccguggcgacgaggugcggcagaucgcacccggccagacaggcaagaucgccgacuacaacuacaagcugcccgacgacuucaccggcugcgugaucgccuggaacagcaacaaccucgacagcaaggugggcggcaacuacaacuaccuguaccggcuguuccggaagagcaaccugaagcccuucgagcgggacaucagcaccgagaucuaccaagccggcuccaccccuugcaacggcguggagggcuucaacugcuacuucccucugcagagcuacggcuuccagcccaccaacggcgugggcuaccagcccuaccgggugguggugcugagcuucgagcugcugcacgccccagccaccguguguggccccaagaagagcaccaaccuggugaagaacaagugcgugaacuucaacuucaacggccuuaccggcaccggcgugcugaccgagagcaacaagaaauuccugcccuuucagcaguucggccgggacaucgccgacaccaccgacgcugugcgggauccccagacccuggagauccuggacaucaccccuugcagcuucggcggcgugagcgugaucaccccaggcaccaacaccagcaaccagguggccgugcuguaccaggacgugaacugcaccgaggugcccguggccauccacgccgaccagcugacacccaccuggcgggucuacagcaccggcagcaacguguuccagacccgggccgguugccugaucggcgccgagcacgugaacaacagcuacgagugcgacauccccaucggcgccggcaucugugccagcuaccagacccagaccaauucaccccggagggcaaggagcguggccagccagagcaucaucgccuacaccaugagccugggcgccgagaacagcguggccuacagcaacaacagcaucgccauccccaccaacuucaccaucagcgugaccaccgagauucugcccgugagcaugaccaagaccagcguggacugcaccauguacaucugcggcgacagcaccgagugcagcaaccugcugcugcaguacggcagcuucugcacccagcugaaccgggcccugaccggcaucgccguggagcaggacaagaacacccaggagguguucgcccaggugaagcagaucuacaagaccccucccaucaaggacuucggcggcuucaacuucagccagauccugcccgaccccagcaagcccagcaagcggagcuucaucgaggaccugcuguucaacaaggugacccuagccgacgccggcuucaucaagcaguacggcgacugccucggcgacauagccgcccgggaccugaucugcgcccagaaguucaacggccugaccgugcugccuccccugcugaccgacgagaugaucgcccaguacaccagcgcccuguuagccggaaccaucaccagcggcuggacuuucggcgcuggagccgcucugcagauccccuucgccaugcagauggccuaccgguucaacggcaucggcgugacccagaacgugcuguacgagaaccagaagcugaucgccaaccaguucaacagcgccaucggcaagauccaggacagccugagcagcaccgcuagcgcccugggcaagcugcaggacguggugaaccagaacgcccaggcccugaacacccuggugaagcagcugagcagcaacuucggcgccaucagcagcgugcugaacgacauccugagccggcuggacccucccgaggccgaggugcagaucgaccggcugaucacuggccggcugcagagccugcagaccuacgugacccagcagcugauccgggccgccgagauucgggccagcgccaaccuggccgccaccaagaugagcgagugcgugcugggccagagcaagcggguggacuucugcggcaagggcuaccaccugaugagcuuuccccagagcgcaccccacggagugguguuccugcacgugaccuacgugcccgcccaggagaagaacuucaccaccgccccagccaucugccacgacggcaaggcccacuuuccccgggagggcguguucgugagcaacggcacccacugguucgugacccagcggaacuucuacgagccccagaucaucaccaccgacaacaccuucgugagcggcaacugcgacguggugaucggcaucgugaacaacaccguguacgauccccugcagcccgagcuggacagcuucaaggaggagcuggacaaguacuucaagaaucacaccagccccgacguggaccugggcgacaucagcggcaucaacgccagcguggugaacauccagaaggagaucgaucggcugaacgagguggccaagaaccugaacgagagccugaucgaccugcaggagcugggcaaguacgagcaguacaucaaguggcccugguacaucuggcugggcuucaucgccggccugaucgccaucgugauggugaccaucaugcugugcugcaugaccagcugcugcagcugccugaagggcuguugcagcugcggcagcugcugcaaguucgacgaggacgacagcgagcccgugcugaagggcgugaagcugcacuacaccugaggacuagucccuguucccagagcccacuuuuuuuucuuuuuuugaaauaaaauagccugucuuucagaucucaaaggcucuuuucagagccaccaaaaaaaaaaaaaaaaaaaaaaaaaaaaaaaaaaaaaaaaaaaaaaaaaaaaaaaaaaaaaaaaaaaaaaaaaaaaaaaaaaaaaaaaaaaaaaaaaaaaa

SEQ ID NO: 23774 - RNA, 4191 nt, Artificial Sequence
  SARS-CoV-2/Wuhan/WIV05/2019__EPI_ISL_402128 spike protein mRNA gc (1-1273)(K986P_V987P_ D614G)
aggagagggcgcuuggcuugcaaggacccugagcugcggcauugaagcacacccaacccaacucgacugaagucagccucacugaaccggaucugagaaucuucucucucugggcuugccagggcucuccgaaccuagcuagcauccucuucaauuccaacuagaaagcuuaccauguucguguuccuggugcugcugccccuggugagcagccagugcgugaaccugaccacccggacccagcugccaccagccuacaccaacagcuucacccggggcgucuacuaccccgacaagguguuccggagcagcguccugcacagcacccaggaccuguuccugcccuucuucagcaacgugaccugguuccacgccauccacgugagcggcaccaacggcaccaagcgguucgacaaccccgugcugcccuucaacgacggcguguacuucgccagcaccgagaagagcaacaucauccggggcuggaucuucggcaccacccuggacagcaagacccagagccugcugaucgugaauaacgccaccaacguggugaucaaggugugcgaguuccaguucugcaacgaccccuuccugggcguguacuaccacaagaacaacaagagcuggauggagagcgaguuccggguguacagcagcgccaacaacugcaccuucgaguacgugagccagcccuuccugauggaccuggagggcaagcagggcaacuucaagaaccugcgggaguucguguucaagaacaucgacggcuacuucaagaucuacagcaagcacaccccaaucaaccuggugcgggaucugccccagggcuucucagcccuggagccccugguggaccugcccaucggcaucaacaucacccgguuccagacccugcuggcccugcaccggagcuaccugaccccaggcgacagcagcagcggguggacagcaggcgcggcugcuuacuacgugggcuaccugcagccccggaccuuccugcugaaguacaacgagaacggcaccaucaccgacgccguggacugcgcccuggacccucugagcgagaccaagugcacccugaagagcuucaccguggagaagggcaucuaccagaccagcaacuuccgggugcagcccaccgagagcaucgugcgguuccccaacaucaccaaccugugccccuucggcgagguguucaacgccacccgguucgccagcguguacgccuggaaccggaagcggaucagcaacugcguggccgacuacagcgugcuguacaacagcgccagcuucagcaccuucaagugcuacggcgugagccccaccaagcugaacgaccugugcuucaccaacguguacgccgacagcuucgugauccguggcgacgaggugcggcagaucgcacccggccagacaggcaagaucgccgacuacaacuacaagcugcccgacgacuucaccggcugcgugaucgccuggaacagcaacaaccucgacagcaaggugggcggcaacuacaacuaccuguaccggcuguuccggaagagcaaccugaagcccuucgagcgggacaucagcaccgagaucuaccaagccggcuccaccccuugcaacggcguggagggcuucaacugcuacuucccucugcagagcuacggcuuccagcccaccaacggcgugggcuaccagcccuaccgggugguggugcugagcuucgagcugcugcacgccccagccaccguguguggccccaagaagagcaccaaccuggugaagaacaagugcgugaacuucaacuucaacggccuuaccggcaccggcgugcugaccgagagcaacaagaaauuccugcccuuucagcaguucggccgggacaucgccgacaccaccgacgcugugcgggauccccagacccuggagauccuggacaucaccccuugcagcuucggcggcgugagcgugaucaccccaggcaccaacaccagcaaccagguggccgugcuguaccagggcgugaacugcaccgaggugcccguggccauccacgccgaccagcugacacccaccuggcgggucuacagcaccggcagcaacguguuccagacccgggccgguugccugaucggcgccgagcacgugaacaacagcuacgagugcgacauccccaucggcgccggcaucugugccagcuaccagacccagaccaauucaccccggagggcaaggagcguggccagccagagcaucaucgccuacaccaugagccugggcgccgagaacagcguggccuacagcaacaacagcaucgccauccccaccaacuucaccaucagcgugaccaccgagauucugcccgugagcaugaccaagaccagcguggacugcaccauguacaucugcggcgacagcaccgagugcagcaaccugcugcugcaguacggcagcuucugcacccagcugaaccgggcccugaccggcaucgccguggagcaggacaagaacacccaggagguguucgcccaggugaagcagaucuacaagaccccucccaucaaggacuucggcggcuucaacuucagccagauccugcccgaccccagcaagcccagcaagcggagcuucaucgaggaccugcuguucaacaaggugacccuagccgacgccggcuucaucaagcaguacggcgacugccucggcgacauagccgcccgggaccugaucugcgcccagaaguucaacggccugaccgugcugccuccccugcugaccgacgagaugaucgcccaguacaccagcgcccuguuagccggaaccaucaccagcggcuggacuuucggcgcuggagccgcucugcagauccccuucgccaugcagauggccuaccgguucaacggcaucggcgugacccagaacgugcuguacgagaaccagaagcugaucgccaaccaguucaacagcgccaucggcaagauccaggacagccugagcagcaccgcuagcgcccugggcaagcugcaggacguggugaaccagaacgcccaggcccugaacacccuggugaagcagcugagcagcaacuucggcgccaucagcagcgugcugaacgacauccugagccggcuggacccucccgaggccgaggugcagaucgaccggcugaucacuggccggcugcagagccugcagaccuacgugacccagcagcugauccgggccgccgagauucgggccagcgccaaccuggccgccaccaagaugagcgagugcgugcugggccagagcaagcggguggacuucugcggcaagggcuaccaccugaugagcuuuccccagagcgcaccccacggagugguguuccugcacgugaccuacgugcccgcccaggagaagaacuucaccaccgccccagccaucugccacgacggcaaggcccacuuuccccgggagggcguguucgugagcaacggcacccacugguucgugacccagcggaacuucuacgagccccagaucaucaccaccgacaacaccuucgugagcggcaacugcgacguggugaucggcaucgugaacaacaccguguacgauccccugcagcccgagcuggacagcuucaaggaggagcuggacaaguacuucaagaaucacaccagccccgacguggaccugggcgacaucagcggcaucaacgccagcguggugaacauccagaaggagaucgaucggcugaacgagguggccaagaaccugaacgagagccugaucgaccugcaggagcugggcaaguacgagcaguacaucaaguggcccugguacaucuggcugggcuucaucgccggccugaucgccaucgugauggugaccaucaugcugugcugcaugaccagcugcugcagcugccugaagggcuguugcagcugcggcagcugcugcaaguucgacgaggacgacagcgagcccgugcugaagggcgugaagcugcacuacaccugaggacuagucccuguucccagagcccacuuuuuuuucuuuuuuugaaauaaaauagccugucuuucagaucucaaaggcucuuuucagagccaccaaaaaaaaaaaaaaaaaaaaaaaaaaaaaaaaaaaaaaaaaaaaaaaaaaaaaaaaaaaaaaaaaaaaaaaaaaaaaaaaaaaaaaaaaaaaaaaaaaaaa

SEQ ID NO: 23775 - RNA, 4191 nt, Artificial Sequence
  SARS-CoV-2/Wuhan/WIV05/2019__EPI_ISL_402128 spike protein mRNA gc (1-1273)(K986P_V987P_A222V_D614G)
aggagagggcgcuuggcuugcaaggacccugagcugcggcauugaagcacacccaacccaacucgacugaagucagccucacugaaccggaucugagaaucuucucucucugggcuugccagggcucuccgaaccuagcuagcauccucuucaauuccaacuagaaagcuuaccauguucguguuccuggugcugcugccccuggugagcagccagugcgugaaccugaccacccggacccagcugccaccagccuacaccaacagcuucacccggggcgucuacuaccccgacaagguguuccggagcagcguccugcacagcacccaggaccuguuccugcccuucuucagcaacgugaccugguuccacgccauccacgugagcggcaccaacggcaccaagcgguucgacaaccccgugcugcccuucaacgacggcguguacuucgccagcaccgagaagagcaacaucauccggggcuggaucuucggcaccacccuggacagcaagacccagagccugcugaucgugaauaacgccaccaacguggugaucaaggugugcgaguuccaguucugcaacgaccccuuccugggcguguacuaccacaagaacaacaagagcuggauggagagcgaguuccggguguacagcagcgccaacaacugcaccuucgaguacgugagccagcccuuccugauggaccuggagggcaagcagggcaacuucaagaaccugcgggaguucguguucaagaacaucgacggcuacuucaagaucuacagcaagcacaccccaaucaaccuggugcgggaucugccccagggcuucucagugcuggagccccugguggaccugcccaucggcaucaacaucacccgguuccagacccugcuggcccugcaccggagcuaccugaccccaggcgacagcagcagcggguggacagcaggcgcggcugcuuacuacgugggcuaccugcagccccggaccuuccugcugaaguacaacgagaacggcaccaucaccgacgccguggacugcgcccuggacccucugagcgagaccaagugcacccugaagagcuucaccguggagaagggcaucuaccagaccagcaacuuccgggugcagcccaccgagagcaucgugcgguuccccaacaucaccaaccugugccccuucggcgagguguucaacgccacccgguucgccagcguguacgccuggaaccggaagcggaucagcaacugcguggccgacuacagcgugcuguacaacagcgccagcuucagcaccuucaagugcuacggcgugagccccaccaagcugaacgaccugugcuucaccaacguguacgccgacagcuucgugauccguggcgacgaggugcggcagaucgcacccggccagacaggcaagaucgccgacuacaacuacaagcugcccgacgacuucaccggcugcgugaucgccuggaacagcaacaaccucgacagcaaggugggcggcaacuacaacuaccuguaccggcuguuccggaagagcaaccugaagcccuucgagcgggacaucagcaccgagaucuaccaagccggcuccaccccuugcaacggcguggagggcuucaacugcuacuucccucugcagagcuacggcuuccagcccaccaacggcgugggcuaccagcccuaccgggugguggugcugagcuucgagcugcugcacgccccagccaccguguguggccccaagaagagcaccaaccuggugaagaacaagugcgugaacuucaacuucaacggccuuaccggcaccggcgugcugaccgagagcaacaagaaauuccugcccuuucagcaguucggccgggacaucgccgacaccaccgacgcugugcgggauccccagacccuggagauccuggacaucaccccuugcagcuucggcggcgugagcgugaucaccccaggcaccaacaccagcaaccagguggccgugcuguaccagggcgugaacugcaccgaggugcccguggccauccacgccgaccagcugacacccaccuggcgggucuacagcaccggcagcaacguguuccagacccgggccgguugccugaucggcgccgagcacgugaacaacagcuacgagugcgacauccccaucggcgccggcaucugugccagcuaccagacccagaccaauucaccccggagggcaaggagcguggccagccagagcaucaucgccuacaccaugagccugggcgccgagaacagcguggccuacagcaacaacagcaucgccauccccaccaacuucaccaucagcgugaccaccgagauucugcccgugagcaugaccaagaccagcguggacugcaccauguacaucugcggcgacagcaccgagugcagcaaccugcugcugcaguacggcagcuucugcacccagcugaaccgggcccugaccggcaucgccguggagcaggacaagaacacccaggagguguucgcccaggugaagcagaucuacaagaccccucccaucaaggacuucggcggcuucaacuucagccagauccugcccgaccccagcaagcccagcaagcggagcuucaucgaggaccugcuguucaacaaggugacccuagccgacgccggcuucaucaagcaguacggcgacugccucggcgacauagccgcccgggaccugaucugcgcccagaaguucaacggccugaccgugcugccuccccugcugaccgacgagaugaucgcccaguacaccagcgcccuguuagccggaaccaucaccagcggcuggacuuucggcgcuggagccgcucugcagauccccuucgccaugcagauggccuaccgguucaacggcaucggcgugacccagaacgugcuguacgagaaccagaagcugaucgccaaccaguucaacagcgccaucggcaagauccaggacagccugagcagcaccgcuagcgcccugggcaagcugcaggacguggugaaccagaacgcccaggcccugaacacccuggugaagcagcugagcagcaacuucggcgccaucagcagcgugcugaacgacauccugagccggcuggacccucccgaggccgaggugcagaucgaccggcugaucacuggccggcugcagagccugcagaccuacgugacccagcagcugauccgggccgccgagauucgggccagcgccaaccuggccgccaccaagaugagcgagugcgugcugggccagagcaagcggguggacuucugcggcaagggcuaccaccugaugagcuuuccccagagcgcaccccacggagugguguuccugcacgugaccuacgugcccgcccaggagaagaacuucaccaccgccccagccaucugccacgacggcaaggcccacuuuccccgggagggcguguucgugagcaacggcacccacugguucgugacccagcggaacuucuacgagccccagaucaucaccaccgacaacaccuucgugagcggcaacugcgacguggugaucggcaucgugaacaacaccguguacgauccccugcagcccgagcuggacagcuucaaggaggagcuggacaaguacuucaagaaucacaccagccccgacguggaccugggcgacaucagcggcaucaacgccagcguggugaacauccagaaggagaucgaucggcugaacgagguggccaagaaccugaacgagagccugaucgaccugcaggagcugggcaaguacgagcaguacaucaaguggcccugguacaucuggcugggcuucaucgccggccugaucgccaucgugauggugaccaucaugcugugcugcaugaccagcugcugcagcugccugaagggcuguugcagcugcggcagcugcugcaaguucgacgaggacgacagcgagcccgugcugaagggcgugaagcugcacuacaccugaggacuagucccuguucccagagcccacuuuuuuuucuuuuuuugaaauaaaauagccugucuuucagaucucaaaggcucuuuucagagccaccaaaaaaaaaaaaaaaaaaaaaaaaaaaaaaaaaaaaaaaaaaaaaaaaaaaaaaaaaaaaaaaaaaaaaaaaaaaaaaaaaaaaaaaaaaaaaaaaaaaaa

SEQ ID NO: 23776 - RNA, 4191 nt, Artificial Sequence
  SARS-CoV-2/Wuhan/WIV05/2019__EPI_ISL_402128 spike protein mRNA gc (1-1273)(K986P_V987P_N439K_D614G)
aggagagggcgcuuggcuugcaaggacccugagcugcggcauugaagcacacccaacccaacucgacugaagucagccucacugaaccggaucugagaaucuucucucucugggcuugccagggcucuccgaaccuagcuagcauccucuucaauuccaacuagaaagcuuaccauguucguguuccuggugcugcugccccuggugagcagccagugcgugaaccugaccacccggacccagcugccaccagccuacaccaacagcuucacccggggcgucuacuaccccgacaagguguuccggagcagcguccugcacagcacccaggaccuguuccugcccuucuucagcaacgugaccugguuccacgccauccacgugagcggcaccaacggcaccaagcgguucgacaaccccgugcugcccuucaacgacggcguguacuucgccagcaccgagaagagcaacaucauccggggcuggaucuucggcaccacccuggacagcaagacccagagccugcugaucgugaauaacgccaccaacguggugaucaaggugugcgaguuccaguucugcaacgaccccuuccugggcguguacuaccacaagaacaacaagagcuggauggagagcgaguuccggguguacagcagcgccaacaacugcaccuucgaguacgugagccagcccuuccugauggaccuggagggcaagcagggcaacuucaagaaccugcgggaguucguguucaagaacaucgacggcuacuucaagaucuacagcaagcacaccccaaucaaccuggugcgggaucugccccagggcuucucagcccuggagccccugguggaccugcccaucggcaucaacaucacccgguuccagacccugcuggcccugcaccggagcuaccugaccccaggcgacagcagcagcggguggacagcaggcgcggcugcuuacuacgugggcuaccugcagccccggaccuuccugcugaaguacaacgagaacggcaccaucaccgacgccguggacugcgcccuggacccucugagcgagaccaagugcacccugaagagcuucaccguggagaagggcaucuaccagaccagcaacuuccgggugcagcccaccgagagcaucgugcgguuccccaacaucaccaaccugugccccuucggcgagguguucaacgccacccgguucgccagcguguacgccuggaaccggaagcggaucagcaacugcguggccgacuacagcgugcuguacaacagcgccagcuucagcaccuucaagugcuacggcgugagccccaccaagcugaacgaccugugcuucaccaacguguacgccgacagcuucgugauccguggcgacgaggugcggcagaucgcacccggccagacaggcaagaucgccgacuacaacuacaagcugcccgacgacuucaccggcugcgugaucgccuggaacagcaagaaccucgacagcaaggugggcggcaacuacaacuaccuguaccggcuguuccggaagagcaaccugaagcccuucgagcgggacaucagcaccgagaucuaccaagccggcuccaccccuugcaacggcguggagggcuucaacugcuacuucccucugcagagcuacggcuuccagcccaccaacggcgugggcuaccagcccuaccgggugguggugcugagcuucgagcugcugcacgccccagccaccguguguggccccaagaagagcaccaaccuggugaagaacaagugcgugaacuucaacuucaacggccuuaccggcaccggcgugcugaccgagagcaacaagaaauuccugcccuuucagcaguucggccgggacaucgccgacaccaccgacgcugugcgggauccccagacccuggagauccuggacaucaccccuugcagcuucggcggcgugagcgugaucaccccaggcaccaacaccagcaaccagguggccgugcuguaccagggcgugaacugcaccgaggugcccguggccauccacgccgaccagcugacacccaccuggcgggucuacagcaccggcagcaacguguuccagacccgggccgguugccugaucggcgccgagcacgugaacaacagcuacgagugcgacauccccaucggcgccggcaucugugccagcuaccagacccagaccaauucaccccggagggcaaggagcguggccagccagagcaucaucgccuacaccaugagccugggcgccgagaacagcguggccuacagcaacaacagcaucgccauccccaccaacuucaccaucagcgugaccaccgagauucugcccgugagcaugaccaagaccagcguggacugcaccauguacaucugcggcgacagcaccgagugcagcaaccugcugcugcaguacggcagcuucugcacccagcugaaccgggcccugaccggcaucgccguggagcaggacaagaacacccaggagguguucgcccaggugaagcagaucuacaagaccccucccaucaaggacuucggcggcuucaacuucagccagauccugcccgaccccagcaagcccagcaagcggagcuucaucgaggaccugcuguucaacaaggugacccuagccgacgccggcuucaucaagcaguacggcgacugccucggcgacauagccgcccgggaccugaucugcgcccagaaguucaacggccugaccgugcugccuccccugcugaccgacgagaugaucgcccaguacaccagcgcccuguuagccggaaccaucaccagcggcuggacuuucggcgcuggagccgcucugcagauccccuucgccaugcagauggccuaccgguucaacggcaucggcgugacccagaacgugcuguacgagaaccagaagcugaucgccaaccaguucaacagcgccaucggcaagauccaggacagccugagcagcaccgcuagcgcccugggcaagcugcaggacguggugaaccagaacgcccaggcccugaacacccuggugaagcagcugagcagcaacuucggcgccaucagcagcgugcugaacgacauccugagccggcuggacccucccgaggccgaggugcagaucgaccggcugaucacuggccggcugcagagccugcagaccuacgugacccagcagcugauccgggccgccgagauucgggccagcgccaaccuggccgccaccaagaugagcgagugcgugcugggccagagcaagcggguggacuucugcggcaagggcuaccaccugaugagcuuuccccagagcgcaccccacggagugguguuccugcacgugaccuacgugcccgcccaggagaagaacuucaccaccgccccagccaucugccacgacggcaaggcccacuuuccccgggagggcguguucgugagcaacggcacccacugguucgugacccagcggaacuucuacgagccccagaucaucaccaccgacaacaccuucgugagcggcaacugcgacguggugaucggcaucgugaacaacaccguguacgauccccugcagcccgagcuggacagcuucaaggaggagcuggacaaguacuucaagaaucacaccagccccgacguggaccugggcgacaucagcggcaucaacgccagcguggugaacauccagaaggagaucgaucggcugaacgagguggccaagaaccugaacgagagccugaucgaccugcaggagcugggcaaguacgagcaguacaucaaguggcccugguacaucuggcugggcuucaucgccggccugaucgccaucgugauggugaccaucaugcugugcugcaugaccagcugcugcagcugccugaagggcuguugcagcugcggcagcugcugcaaguucgacgaggacgacagcgagcccgugcugaagggcgugaagcugcacuacaccugaggacuagucccuguucccagagcccacuuuuuuuucuuuuuuugaaauaaaauagccugucuuucagaucucaaaggcucuuuucagagccaccaaaaaaaaaaaaaaaaaaaaaaaaaaaaaaaaaaaaaaaaaaaaaaaaaaaaaaaaaaaaaaaaaaaaaaaaaaaaaaaaaaaaaaaaaaaaaaaaaaaaa

SEQ ID NO: 23777 - RNA, 4191 nt, Artificial Sequence
  SARS-CoV-2/Wuhan/WIV05/2019__EPI_ISL_402128 spike protein mRNA gc (1-1273)(K986P_V987P_S477N_D614G)
aggagagggcgcuuggcuugcaaggacccugagcugcggcauugaagcacacccaacccaacucgacugaagucagccucacugaaccggaucugagaaucuucucucucugggcuugccagggcucuccgaaccuagcuagcauccucuucaauuccaacuagaaagcuuaccauguucguguuccuggugcugcugccccuggugagcagccagugcgugaaccugaccacccggacccagcugccaccagccuacaccaacagcuucacccggggcgucuacuaccccgacaagguguuccggagcagcguccugcacagcacccaggaccuguuccugcccuucuucagcaacgugaccugguuccacgccauccacgugagcggcaccaacggcaccaagcgguucgacaaccccgugcugcccuucaacgacggcguguacuucgccagcaccgagaagagcaacaucauccggggcuggaucuucggcaccacccuggacagcaagacccagagccugcugaucgugaauaacgccaccaacguggugaucaaggugugcgaguuccaguucugcaacgaccccuuccugggcguguacuaccacaagaacaacaagagcuggauggagagcgaguuccggguguacagcagcgccaacaacugcaccuucgaguacgugagccagcccuuccugauggaccuggagggcaagcagggcaacuucaagaaccugcgggaguucguguucaagaacaucgacggcuacuucaagaucuacagcaagcacaccccaaucaaccuggugcgggaucugccccagggcuucucagcccuggagccccugguggaccugcccaucggcaucaacaucacccgguuccagacccugcuggcccugcaccggagcuaccugaccccaggcgacagcagcagcggguggacagcaggcgcggcugcuuacuacgugggcuaccugcagccccggaccuuccugcugaaguacaacgagaacggcaccaucaccgacgccguggacugcgcccuggacccucugagcgagaccaagugcacccugaagagcuucaccguggagaagggcaucuaccagaccagcaacuuccgggugcagcccaccgagagcaucgugcgguuccccaacaucaccaaccugugccccuucggcgagguguucaacgccacccgguucgccagcguguacgccuggaaccggaagcggaucagcaacugcguggccgacuacagcgugcuguacaacagcgccagcuucagcaccuucaagugcuacggcgugagccccaccaagcugaacgaccugugcuucaccaacguguacgccgacagcuucgugauccguggcgacgaggugcggcagaucgcacccggccagacaggcaagaucgccgacuacaacuacaagcugcccgacgacuucaccggcugcgugaucgccuggaacagcaacaaccucgacagcaaggugggcggcaacuacaacuaccuguaccggcuguuccggaagagcaaccugaagcccuucgagcgggacaucagcaccgagaucuaccaagccggcaacaccccuugcaacggcguggagggcuucaacugcuacuucccucugcagagcuacggcuuccagcccaccaacggcgugggcuaccagcccuaccgggugguggugcugagcuucgagcugcugcacgccccagccaccguguguggccccaagaagagcaccaaccuggugaagaacaagugcgugaacuucaacuucaacggccuuaccggcaccggcgugcugaccgagagcaacaagaaauuccugcccuuucagcaguucggccgggacaucgccgacaccaccgacgcugugcgggauccccagacccuggagauccuggacaucaccccuugcagcuucggcggcgugagcgugaucaccccaggcaccaacaccagcaaccagguggccgugcuguaccagggcgugaacugcaccgaggugcccguggccauccacgccgaccagcugacacccaccuggcgggucuacagcaccggcagcaacguguuccagacccgggccgguugccugaucggcgccgagcacgugaacaacagcuacgagugcgacauccccaucggcgccggcaucugugccagcuaccagacccagaccaauucaccccggagggcaaggagcguggccagccagagcaucaucgccuacaccaugagccugggcgccgagaacagcguggccuacagcaacaacagcaucgccauccccaccaacuucaccaucagcgugaccaccgagauucugcccgugagcaugaccaagaccagcguggacugcaccauguacaucugcggcgacagcaccgagugcagcaaccugcugcugcaguacggcagcuucugcacccagcugaaccgggcccugaccggcaucgccguggagcaggacaagaacacccaggagguguucgcccaggugaagcagaucuacaagaccccucccaucaaggacuucggcggcuucaacuucagccagauccugcccgaccccagcaagcccagcaagcggagcuucaucgaggaccugcuguucaacaaggugacccuagccgacgccggcuucaucaagcaguacggcgacugccucggcgacauagccgcccgggaccugaucugcgcccagaaguucaacggccugaccgugcugccuccccugcugaccgacgagaugaucgcccaguacaccagcgcccuguuagccggaaccaucaccagcggcuggacuuucggcgcuggagccgcucugcagauccccuucgccaugcagauggccuaccgguucaacggcaucggcgugacccagaacgugcuguacgagaaccagaagcugaucgccaaccaguucaacagcgccaucggcaagauccaggacagccugagcagcaccgcuagcgcccugggcaagcugcaggacguggugaaccagaacgcccaggcccugaacacccuggugaagcagcugagcagcaacuucggcgccaucagcagcgugcugaacgacauccugagccggcuggacccucccgaggccgaggugcagaucgaccggcugaucacuggccggcugcagagccugcagaccuacgugacccagcagcugauccgggccgccgagauucgggccagcgccaaccuggccgccaccaagaugagcgagugcgugcugggccagagcaagcggguggacuucugcggcaagggcuaccaccugaugagcuuuccccagagcgcaccccacggagugguguuccugcacgugaccuacgugcccgcccaggagaagaacuucaccaccgccccagccaucugccacgacggcaaggcccacuuuccccgggagggcguguucgugagcaacggcacccacugguucgugacccagcggaacuucuacgagccccagaucaucaccaccgacaacaccuucgugagcggcaacugcgacguggugaucggcaucgugaacaacaccguguacgauccccugcagcccgagcuggacagcuucaaggaggagcuggacaaguacuucaagaaucacaccagccccgacguggaccugggcgacaucagcggcaucaacgccagcguggugaacauccagaaggagaucgaucggcugaacgagguggccaagaaccugaacgagagccugaucgaccugcaggagcugggcaaguacgagcaguacaucaaguggcccugguacaucuggcugggcuucaucgccggccugaucgccaucgugauggugaccaucaugcugugcugcaugaccagcugcugcagcugccugaagggcuguugcagcugcggcagcugcugcaaguucgacgaggacgacagcgagcccgugcugaagggcgugaagcugcacuacaccugaggacuagucccuguucccagagcccacuuuuuuuucuuuuuuugaaauaaaauagccugucuuucagaucucaaaggcucuuuucagagccaccaaaaaaaaaaaaaaaaaaaaaaaaaaaaaaaaaaaaaaaaaaaaaaaaaaaaaaaaaaaaaaaaaaaaaaaaaaaaaaaaaaaaaaaaaaaaaaaaaaaaa

SEQ ID NO: 23778 - RNA, 4191 nt, Artificial Sequence
  SARS-CoV-2/Wuhan/WIV05/2019__EPI_ISL_402128 spike protein mRNA gc (1-1273)(K986P_V987P_N501Y_D614G)
aggagagggcgcuuggcuugcaaggacccugagcugcggcauugaagcacacccaacccaacucgacugaagucagccucacugaaccggaucugagaaucuucucucucugggcuugccagggcucuccgaaccuagcuagcauccucuucaauuccaacuagaaagcuuaccauguucguguuccuggugcugcugccccuggugagcagccagugcgugaaccugaccacccggacccagcugccaccagccuacaccaacagcuucacccggggcgucuacuaccccgacaagguguuccggagcagcguccugcacagcacccaggaccuguuccugcccuucuucagcaacgugaccugguuccacgccauccacgugagcggcaccaacggcaccaagcgguucgacaaccccgugcugcccuucaacgacggcguguacuucgccagcaccgagaagagcaacaucauccggggcuggaucuucggcaccacccuggacagcaagacccagagccugcugaucgugaauaacgccaccaacguggugaucaaggugugcgaguuccaguucugcaacgaccccuuccugggcguguacuaccacaagaacaacaagagcuggauggagagcgaguuccggguguacagcagcgccaacaacugcaccuucgaguacgugagccagcccuuccugauggaccuggagggcaagcagggcaacuucaagaaccugcgggaguucguguucaagaacaucgacggcuacuucaagaucuacagcaagcacaccccaaucaaccuggugcgggaucugccccagggcuucucagcccuggagccccugguggaccugcccaucggcaucaacaucacccgguuccagacccugcuggcccugcaccggagcuaccugaccccaggcgacagcagcagcggguggacagcaggcgcggcugcuuacuacgugggcuaccugcagccccggaccuuccugcugaaguacaacgagaacggcaccaucaccgacgccguggacugcgcccuggacccucugagcgagaccaagugcacccugaagagcuucaccguggagaagggcaucuaccagaccagcaacuuccgggugcagcccaccgagagcaucgugcgguuccccaacaucaccaaccugugccccuucggcgagguguucaacgccacccgguucgccagcguguacgccuggaaccggaagcggaucagcaacugcguggccgacuacagcgugcuguacaacagcgccagcuucagcaccuucaagugcuacggcgugagccccaccaagcugaacgaccugugcuucaccaacguguacgccgacagcuucgugauccguggcgacgaggugcggcagaucgcacccggccagacaggcaagaucgccgacuacaacuacaagcugcccgacgacuucaccggcugcgugaucgccuggaacagcaacaaccucgacagcaaggugggcggcaacuacaacuaccuguaccggcuguuccggaagagcaaccugaagcccuucgagcgggacaucagcaccgagaucuaccaagccggcuccaccccuugcaacggcguggagggcuucaacugcuacuucccucugcagagcuacggcuuccagcccaccuacggcgugggcuaccagcccuaccgggugguggugcugagcuucgagcugcugcacgccccagccaccguguguggccccaagaagagcaccaaccuggugaagaacaagugcgugaacuucaacuucaacggccuuaccggcaccggcgugcugaccgagagcaacaagaaauuccugcccuuucagcaguucggccgggacaucgccgacaccaccgacgcugugcgggauccccagacccuggagauccuggacaucaccccuugcagcuucggcggcgugagcgugaucaccccaggcaccaacaccagcaaccagguggccgugcuguaccagggcgugaacugcaccgaggugcccguggccauccacgccgaccagcugacacccaccuggcgggucuacagcaccggcagcaacguguuccagacccgggccgguugccugaucggcgccgagcacgugaacaacagcuacgagugcgacauccccaucggcgccggcaucugugccagcuaccagacccagaccaauucaccccggagggcaaggagcguggccagccagagcaucaucgccuacaccaugagccugggcgccgagaacagcguggccuacagcaacaacagcaucgccauccccaccaacuucaccaucagcgugaccaccgagauucugcccgugagcaugaccaagaccagcguggacugcaccauguacaucugcggcgacagcaccgagugcagcaaccugcugcugcaguacggcagcuucugcacccagcugaaccgggcccugaccggcaucgccguggagcaggacaagaacacccaggagguguucgcccaggugaagcagaucuacaagaccccucccaucaaggacuucggcggcuucaacuucagccagauccugcccgaccccagcaagcccagcaagcggagcuucaucgaggaccugcuguucaacaaggugacccuagccgacgccggcuucaucaagcaguacggcgacugccucggcgacauagccgcccgggaccugaucugcgcccagaaguucaacggccugaccgugcugccuccccugcugaccgacgagaugaucgcccaguacaccagcgcccuguuagccggaaccaucaccagcggcuggacuuucggcgcuggagccgcucugcagauccccuucgccaugcagauggccuaccgguucaacggcaucggcgugacccagaacgugcuguacgagaaccagaagcugaucgccaaccaguucaacagcgccaucggcaagauccaggacagccugagcagcaccgcuagcgcccugggcaagcugcaggacguggugaaccagaacgcccaggcccugaacacccuggugaagcagcugagcagcaacuucggcgccaucagcagcgugcugaacgacauccugagccggcuggacccucccgaggccgaggugcagaucgaccggcugaucacuggccggcugcagagccugcagaccuacgugacccagcagcugauccgggccgccgagauucgggccagcgccaaccuggccgccaccaagaugagcgagugcgugcugggccagagcaagcggguggacuucugcggcaagggcuaccaccugaugagcuuuccccagagcgcaccccacggagugguguuccugcacgugaccuacgugcccgcccaggagaagaacuucaccaccgccccagccaucugccacgacggcaaggcccacuuuccccgggagggcguguucgugagcaacggcacccacugguucgugacccagcggaacuucuacgagccccagaucaucaccaccgacaacaccuucgugagcggcaacugcgacguggugaucggcaucgugaacaacaccguguacgauccccugcagcccgagcuggacagcuucaaggaggagcuggacaaguacuucaagaaucacaccagccccgacguggaccugggcgacaucagcggcaucaacgccagcguggugaacauccagaaggagaucgaucggcugaacgagguggccaagaaccugaacgagagccugaucgaccugcaggagcugggcaaguacgagcaguacaucaaguggcccugguacaucuggcugggcuucaucgccggccugaucgccaucgugauggugaccaucaugcugugcugcaugaccagcugcugcagcugccugaagggcuguugcagcugcggcagcugcugcaaguucgacgaggacgacagcgagcccgugcugaagggcgugaagcugcacuacaccugaggacuagucccuguucccagagcccacuuuuuuuucuuuuuuugaaauaaaauagccugucuuucagaucucaaaggcucuuuucagagccaccaaaaaaaaaaaaaaaaaaaaaaaaaaaaaaaaaaaaaaaaaaaaaaaaaaaaaaaaaaaaaaaaaaaaaaaaaaaaaaaaaaaaaaaaaaaaaaaaaaaaa

SEQ ID NO: 23779 - RNA, 4185 nt, Artificial Sequence
  SARS-CoV-2/Wuhan/WIV05/2019__EPI_ISL_402128 spike protein mRNA gc (1-1273)(K986P_V987P_H69del_V70del_D614G)
aggagagggcgcuuggcuugcaaggacccugagcugcggcauugaagcacacccaacccaacucgacugaagucagccucacugaaccggaucugagaaucuucucucucugggcuugccagggcucuccgaaccuagcuagcauccucuucaauuccaacuagaaagcuuaccauguucguguuccuggugcugcugccccuggugagcagccagugcgugaaccugaccacccggacccagcugccaccagccuacaccaacagcuucacccggggcgucuacuaccccgacaagguguuccggagcagcguccugcacagcacccaggaccuguuccugcccuucuucagcaacgugaccugguuccacgccaucagcggcaccaacggcaccaagcgguucgacaaccccgugcugcccuucaacgacggcguguacuucgccagcaccgagaagagcaacaucauccggggcuggaucuucggcaccacccuggacagcaagacccagagccugcugaucgugaauaacgccaccaacguggugaucaaggugugcgaguuccaguucugcaacgaccccuuccugggcguguacuaccacaagaacaacaagagcuggauggagagcgaguuccggguguacagcagcgccaacaacugcaccuucgaguacgugagccagcccuuccugauggaccuggagggcaagcagggcaacuucaagaaccugcgggaguucguguucaagaacaucgacggcuacuucaagaucuacagcaagcacaccccaaucaaccuggugcgggaucugccccagggcuucucagcccuggagccccugguggaccugcccaucggcaucaacaucacccgguuccagacccugcuggcccugcaccggagcuaccugaccccaggcgacagcagcagcggguggacagcaggcgcggcugcuuacuacgugggcuaccugcagccccggaccuuccugcugaaguacaacgagaacggcaccaucaccgacgccguggacugcgcccuggacccucugagcgagaccaagugcacccugaagagcuucaccguggagaagggcaucuaccagaccagcaacuuccgggugcagcccaccgagagcaucgugcgguuccccaacaucaccaaccugugccccuucggcgagguguucaacgccacccgguucgccagcguguacgccuggaaccggaagcggaucagcaacugcguggccgacuacagcgugcuguacaacagcgccagcuucagcaccuucaagugcuacggcgugagccccaccaagcugaacgaccugugcuucaccaacguguacgccgacagcuucgugauccguggcgacgaggugcggcagaucgcacccggccagacaggcaagaucgccgacuacaacuacaagcugcccgacgacuucaccggcugcgugaucgccuggaacagcaacaaccucgacagcaaggugggcggcaacuacaacuaccuguaccggcuguuccggaagagcaaccugaagcccuucgagcgggacaucagcaccgagaucuaccaagccggcuccaccccuugcaacggcguggagggcuucaacugcuacuucccucugcagagcuacggcuuccagcccaccaacggcgugggcuaccagcccuaccgggugguggugcugagcuucgagcugcugcacgccccagccaccguguguggccccaagaagagcaccaaccuggugaagaacaagugcgugaacuucaacuucaacggccuuaccggcaccggcgugcugaccgagagcaacaagaaauuccugcccuuucagcaguucggccgggacaucgccgacaccaccgacgcugugcgggauccccagacccuggagauccuggacaucaccccuugcagcuucggcggcgugagcgugaucaccccaggcaccaacaccagcaaccagguggccgugcuguaccagggcgugaacugcaccgaggugcccguggccauccacgccgaccagcugacacccaccuggcgggucuacagcaccggcagcaacguguuccagacccgggccgguugccugaucggcgccgagcacgugaacaacagcuacgagugcgacauccccaucggcgccggcaucugugccagcuaccagacccagaccaauucaccccggagggcaaggagcguggccagccagagcaucaucgccuacaccaugagccugggcgccgagaacagcguggccuacagcaacaacagcaucgccauccccaccaacuucaccaucagcgugaccaccgagauucugcccgugagcaugaccaagaccagcguggacugcaccauguacaucugcggcgacagcaccgagugcagcaaccugcugcugcaguacggcagcuucugcacccagcugaaccgggcccugaccggcaucgccguggagcaggacaagaacacccaggagguguucgcccaggugaagcagaucuacaagaccccucccaucaaggacuucggcggcuucaacuucagccagauccugcccgaccccagcaagcccagcaagcggagcuucaucgaggaccugcuguucaacaaggugacccuagccgacgccggcuucaucaagcaguacggcgacugccucggcgacauagccgcccgggaccugaucugcgcccagaaguucaacggccugaccgugcugccuccccugcugaccgacgagaugaucgcccaguacaccagcgcccuguuagccggaaccaucaccagcggcuggacuuucggcgcuggagccgcucugcagauccccuucgccaugcagauggccuaccgguucaacggcaucggcgugacccagaacgugcuguacgagaaccagaagcugaucgccaaccaguucaacagcgccaucggcaagauccaggacagccugagcagcaccgcuagcgcccugggcaagcugcaggacguggugaaccagaacgcccaggcccugaacacccuggugaagcagcugagcagcaacuucggcgccaucagcagcgugcugaacgacauccugagccggcuggacccucccgaggccgaggugcagaucgaccggcugaucacuggccggcugcagagccugcagaccuacgugacccagcagcugauccgggccgccgagauucgggccagcgccaaccuggccgccaccaagaugagcgagugcgugcugggccagagcaagcggguggacuucugcggcaagggcuaccaccugaugagcuuuccccagagcgcaccccacggagugguguuccugcacgugaccuacgugcccgcccaggagaagaacuucaccaccgccccagccaucugccacgacggcaaggcccacuuuccccgggagggcguguucgugagcaacggcacccacugguucgugacccagcggaacuucuacgagccccagaucaucaccaccgacaacaccuucgugagcggcaacugcgacguggugaucggcaucgugaacaacaccguguacgauccccugcagcccgagcuggacagcuucaaggaggagcuggacaaguacuucaagaaucacaccagccccgacguggaccugggcgacaucagcggcaucaacgccagcguggugaacauccagaaggagaucgaucggcugaacgagguggccaagaaccugaacgagagccugaucgaccugcaggagcugggcaaguacgagcaguacaucaaguggcccugguacaucuggcugggcuucaucgccggccugaucgccaucgugauggugaccaucaugcugugcugcaugaccagcugcugcagcugccugaagggcuguugcagcugcggcagcugcugcaaguucgacgaggacgacagcgagcccgugcugaagggcgugaagcugcacuacaccugaggacuagucccuguucccagagcccacuuuuuuuucuuuuuuugaaauaaaauagccugucuuucagaucucaaaggcucuuuucagagccaccaaaaaaaaaaaaaaaaaaaaaaaaaaaaaaaaaaaaaaaaaaaaaaaaaaaaaaaaaaaaaaaaaaaaaaaaaaaaaaaaaaaaaaaaaaaaaaaaaaaaa

SEQ ID NO: 23780 - RNA, 4191 nt, Artificial Sequence
  SARS-CoV-2/Wuhan/WIV05/2019__EPI_ISL_402128 spike protein mRNA gc (1-1273)(K986P_V987P_Y453F_D614G)
aggagagggcgcuuggcuugcaaggacccugagcugcggcauugaagcacacccaacccaacucgacugaagucagccucacugaaccggaucugagaaucuucucucucugggcuugccagggcucuccgaaccuagcuagcauccucuucaauuccaacuagaaagcuuaccauguucguguuccuggugcugcugccccuggugagcagccagugcgugaaccugaccacccggacccagcugccaccagccuacaccaacagcuucacccggggcgucuacuaccccgacaagguguuccggagcagcguccugcacagcacccaggaccuguuccugcccuucuucagcaacgugaccugguuccacgccauccacgugagcggcaccaacggcaccaagcgguucgacaaccccgugcugcccuucaacgacggcguguacuucgccagcaccgagaagagcaacaucauccggggcuggaucuucggcaccacccuggacagcaagacccagagccugcugaucgugaauaacgccaccaacguggugaucaaggugugcgaguuccaguucugcaacgaccccuuccugggcguguacuaccacaagaacaacaagagcuggauggagagcgaguuccggguguacagcagcgccaacaacugcaccuucgaguacgugagccagcccuuccugauggaccuggagggcaagcagggcaacuucaagaaccugcgggaguucguguucaagaacaucgacggcuacuucaagaucuacagcaagcacaccccaaucaaccuggugcgggaucugccccagggcuucucagcccuggagccccugguggaccugcccaucggcaucaacaucacccgguuccagacccugcuggcccugcaccggagcuaccugaccccaggcgacagcagcagcggguggacagcaggcgcggcugcuuacuacgugggcuaccugcagccccggaccuuccugcugaaguacaacgagaacggcaccaucaccgacgccguggacugcgcccuggacccucugagcgagaccaagugcacccugaagagcuucaccguggagaagggcaucuaccagaccagcaacuuccgggugcagcccaccgagagcaucgugcgguuccccaacaucaccaaccugugccccuucggcgagguguucaacgccacccgguucgccagcguguacgccuggaaccggaagcggaucagcaacugcguggccgacuacagcgugcuguacaacagcgccagcuucagcaccuucaagugcuacggcgugagccccaccaagcugaacgaccugugcuucaccaacguguacgccgacagcuucgugauccguggcgacgaggugcggcagaucgcacccggccagacaggcaagaucgccgacuacaacuacaagcugcccgacgacuucaccggcugcgugaucgccuggaacagcaacaaccucgacagcaaggugggcggcaacuacaacuaccuguuccggcuguuccggaagagcaaccugaagcccuucgagcgggacaucagcaccgagaucuaccaagccggcuccaccccuugcaacggcguggagggcuucaacugcuacuucccucugcagagcuacggcuuccagcccaccaacggcgugggcuaccagcccuaccgggugguggugcugagcuucgagcugcugcacgccccagccaccguguguggccccaagaagagcaccaaccuggugaagaacaagugcgugaacuucaacuucaacggccuuaccggcaccggcgugcugaccgagagcaacaagaaauuccugcccuuucagcaguucggccgggacaucgccgacaccaccgacgcugugcgggauccccagacccuggagauccuggacaucaccccuugcagcuucggcggcgugagcgugaucaccccaggcaccaacaccagcaaccagguggccgugcuguaccagggcgugaacugcaccgaggugcccguggccauccacgccgaccagcugacacccaccuggcgggucuacagcaccggcagcaacguguuccagacccgggccgguugccugaucggcgccgagcacgugaacaacagcuacgagugcgacauccccaucggcgccggcaucugugccagcuaccagacccagaccaauucaccccggagggcaaggagcguggccagccagagcaucaucgccuacaccaugagccugggcgccgagaacagcguggccuacagcaacaacagcaucgccauccccaccaacuucaccaucagcgugaccaccgagauucugcccgugagcaugaccaagaccagcguggacugcaccauguacaucugcggcgacagcaccgagugcagcaaccugcugcugcaguacggcagcuucugcacccagcugaaccgggcccugaccggcaucgccguggagcaggacaagaacacccaggagguguucgcccaggugaagcagaucuacaagaccccucccaucaaggacuucggcggcuucaacuucagccagauccugcccgaccccagcaagcccagcaagcggagcuucaucgaggaccugcuguucaacaaggugacccuagccgacgccggcuucaucaagcaguacggcgacugccucggcgacauagccgcccgggaccugaucugcgcccagaaguucaacggccugaccgugcugccuccccugcugaccgacgagaugaucgcccaguacaccagcgcccuguuagccggaaccaucaccagcggcuggacuuucggcgcuggagccgcucugcagauccccuucgccaugcagauggccuaccgguucaacggcaucggcgugacccagaacgugcuguacgagaaccagaagcugaucgccaaccaguucaacagcgccaucggcaagauccaggacagccugagcagcaccgcuagcgcccugggcaagcugcaggacguggugaaccagaacgcccaggcccugaacacccuggugaagcagcugagcagcaacuucggcgccaucagcagcgugcugaacgacauccugagccggcuggacccucccgaggccgaggugcagaucgaccggcugaucacuggccggcugcagagccugcagaccuacgugacccagcagcugauccgggccgccgagauucgggccagcgccaaccuggccgccaccaagaugagcgagugcgugcugggccagagcaagcggguggacuucugcggcaagggcuaccaccugaugagcuuuccccagagcgcaccccacggagugguguuccugcacgugaccuacgugcccgcccaggagaagaacuucaccaccgccccagccaucugccacgacggcaaggcccacuuuccccgggagggcguguucgugagcaacggcacccacugguucgugacccagcggaacuucuacgagccccagaucaucaccaccgacaacaccuucgugagcggcaacugcgacguggugaucggcaucgugaacaacaccguguacgauccccugcagcccgagcuggacagcuucaaggaggagcuggacaaguacuucaagaaucacaccagccccgacguggaccugggcgacaucagcggcaucaacgccagcguggugaacauccagaaggagaucgaucggcugaacgagguggccaagaaccugaacgagagccugaucgaccugcaggagcugggcaaguacgagcaguacaucaaguggcccugguacaucuggcugggcuucaucgccggccugaucgccaucgugauggugaccaucaugcugugcugcaugaccagcugcugcagcugccugaagggcuguugcagcugcggcagcugcugcaaguucgacgaggacgacagcgagcccgugcugaagggcgugaagcugcacuacaccugaggacuagucccuguucccagagcccacuuuuuuuucuuuuuuugaaauaaaauagccugucuuucagaucucaaaggcucuuuucagagccaccaaaaaaaaaaaaaaaaaaaaaaaaaaaaaaaaaaaaaaaaaaaaaaaaaaaaaaaaaaaaaaaaaaaaaaaaaaaaaaaaaaaaaaaaaaaaaaaaaaaaa

SEQ ID NO: 23781 - RNA, 4191 nt, Artificial Sequence
  SARS-CoV-2/Wuhan/WIV05/2019__EPI_ISL_402128 spike protein mRNA gc (1-1273)(K986P_V987P_D614G_I692V)
aggagagggcgcuuggcuugcaaggacccugagcugcggcauugaagcacacccaacccaacucgacugaagucagccucacugaaccggaucugagaaucuucucucucugggcuugccagggcucuccgaaccuagcuagcauccucuucaauuccaacuagaaagcuuaccauguucguguuccuggugcugcugccccuggugagcagccagugcgugaaccugaccacccggacccagcugccaccagccuacaccaacagcuucacccggggcgucuacuaccccgacaagguguuccggagcagcguccugcacagcacccaggaccuguuccugcccuucuucagcaacgugaccugguuccacgccauccacgugagcggcaccaacggcaccaagcgguucgacaaccccgugcugcccuucaacgacggcguguacuucgccagcaccgagaagagcaacaucauccggggcuggaucuucggcaccacccuggacagcaagacccagagccugcugaucgugaauaacgccaccaacguggugaucaaggugugcgaguuccaguucugcaacgaccccuuccugggcguguacuaccacaagaacaacaagagcuggauggagagcgaguuccggguguacagcagcgccaacaacugcaccuucgaguacgugagccagcccuuccugauggaccuggagggcaagcagggcaacuucaagaaccugcgggaguucguguucaagaacaucgacggcuacuucaagaucuacagcaagcacaccccaaucaaccuggugcgggaucugccccagggcuucucagcccuggagccccugguggaccugcccaucggcaucaacaucacccgguuccagacccugcuggcccugcaccggagcuaccugaccccaggcgacagcagcagcggguggacagcaggcgcggcugcuuacuacgugggcuaccugcagccccggaccuuccugcugaaguacaacgagaacggcaccaucaccgacgccguggacugcgcccuggacccucugagcgagaccaagugcacccugaagagcuucaccguggagaagggcaucuaccagaccagcaacuuccgggugcagcccaccgagagcaucgugcgguuccccaacaucaccaaccugugccccuucggcgagguguucaacgccacccgguucgccagcguguacgccuggaaccggaagcggaucagcaacugcguggccgacuacagcgugcuguacaacagcgccagcuucagcaccuucaagugcuacggcgugagccccaccaagcugaacgaccugugcuucaccaacguguacgccgacagcuucgugauccguggcgacgaggugcggcagaucgcacccggccagacaggcaagaucgccgacuacaacuacaagcugcccgacgacuucaccggcugcgugaucgccuggaacagcaacaaccucgacagcaaggugggcggcaacuacaacuaccuguaccggcuguuccggaagagcaaccugaagcccuucgagcgggacaucagcaccgagaucuaccaagccggcuccaccccuugcaacggcguggagggcuucaacugcuacuucccucugcagagcuacggcuuccagcccaccaacggcgugggcuaccagcccuaccgggugguggugcugagcuucgagcugcugcacgccccagccaccguguguggccccaagaagagcaccaaccuggugaagaacaagugcgugaacuucaacuucaacggccuuaccggcaccggcgugcugaccgagagcaacaagaaauuccugcccuuucagcaguucggccgggacaucgccgacaccaccgacgcugugcgggauccccagacccuggagauccuggacaucaccccuugcagcuucggcggcgugagcgugaucaccccaggcaccaacaccagcaaccagguggccgugcuguaccagggcgugaacugcaccgaggugcccguggccauccacgccgaccagcugacacccaccuggcgggucuacagcaccggcagcaacguguuccagacccgggccgguugccugaucggcgccgagcacgugaacaacagcuacgagugcgacauccccaucggcgccggcaucugugccagcuaccagacccagaccaauucaccccggagggcaaggagcguggccagccagagcgugaucgccuacaccaugagccugggcgccgagaacagcguggccuacagcaacaacagcaucgccauccccaccaacuucaccaucagcgugaccaccgagauucugcccgugagcaugaccaagaccagcguggacugcaccauguacaucugcggcgacagcaccgagugcagcaaccugcugcugcaguacggcagcuucugcacccagcugaaccgggcccugaccggcaucgccguggagcaggacaagaacacccaggagguguucgcccaggugaagcagaucuacaagaccccucccaucaaggacuucggcggcuucaacuucagccagauccugcccgaccccagcaagcccagcaagcggagcuucaucgaggaccugcuguucaacaaggugacccuagccgacgccggcuucaucaagcaguacggcgacugccucggcgacauagccgcccgggaccugaucugcgcccagaaguucaacggccugaccgugcugccuccccugcugaccgacgagaugaucgcccaguacaccagcgcccuguuagccggaaccaucaccagcggcuggacuuucggcgcuggagccgcucugcagauccccuucgccaugcagauggccuaccgguucaacggcaucggcgugacccagaacgugcuguacgagaaccagaagcugaucgccaaccaguucaacagcgccaucggcaagauccaggacagccugagcagcaccgcuagcgcccugggcaagcugcaggacguggugaaccagaacgcccaggcccugaacacccuggugaagcagcugagcagcaacuucggcgccaucagcagcgugcugaacgacauccugagccggcuggacccucccgaggccgaggugcagaucgaccggcugaucacuggccggcugcagagccugcagaccuacgugacccagcagcugauccgggccgccgagauucgggccagcgccaaccuggccgccaccaagaugagcgagugcgugcugggccagagcaagcggguggacuucugcggcaagggcuaccaccugaugagcuuuccccagagcgcaccccacggagugguguuccugcacgugaccuacgugcccgcccaggagaagaacuucaccaccgccccagccaucugccacgacggcaaggcccacuuuccccgggagggcguguucgugagcaacggcacccacugguucgugacccagcggaacuucuacgagccccagaucaucaccaccgacaacaccuucgugagcggcaacugcgacguggugaucggcaucgugaacaacaccguguacgauccccugcagcccgagcuggacagcuucaaggaggagcuggacaaguacuucaagaaucacaccagccccgacguggaccugggcgacaucagcggcaucaacgccagcguggugaacauccagaaggagaucgaucggcugaacgagguggccaagaaccugaacgagagccugaucgaccugcaggagcugggcaaguacgagcaguacaucaaguggcccugguacaucuggcugggcuucaucgccggccugaucgccaucgugauggugaccaucaugcugugcugcaugaccagcugcugcagcugccugaagggcuguugcagcugcggcagcugcugcaaguucgacgaggacgacagcgagcccgugcugaagggcgugaagcugcacuacaccugaggacuagucccuguucccagagcccacuuuuuuuucuuuuuuugaaauaaaauagccugucuuucagaucucaaaggcucuuuucagagccaccaaaaaaaaaaaaaaaaaaaaaaaaaaaaaaaaaaaaaaaaaaaaaaaaaaaaaaaaaaaaaaaaaaaaaaaaaaaaaaaaaaaaaaaaaaaaaaaaaaaaa

SEQ ID NO: 23782 - RNA, 4191 nt, Artificial Sequence
  SARS-CoV-2/Wuhan/WIV05/2019__EPI_ISL_402128 spike protein mRNA gc (1-1273)(K986P_V987P_D614G_M1229I)
aggagagggcgcuuggcuugcaaggacccugagcugcggcauugaagcacacccaacccaacucgacugaagucagccucacugaaccggaucugagaaucuucucucucugggcuugccagggcucuccgaaccuagcuagcauccucuucaauuccaacuagaaagcuuaccauguucguguuccuggugcugcugccccuggugagcagccagugcgugaaccugaccacccggacccagcugccaccagccuacaccaacagcuucacccggggcgucuacuaccccgacaagguguuccggagcagcguccugcacagcacccaggaccuguuccugcccuucuucagcaacgugaccugguuccacgccauccacgugagcggcaccaacggcaccaagcgguucgacaaccccgugcugcccuucaacgacggcguguacuucgccagcaccgagaagagcaacaucauccggggcuggaucuucggcaccacccuggacagcaagacccagagccugcugaucgugaauaacgccaccaacguggugaucaaggugugcgaguuccaguucugcaacgaccccuuccugggcguguacuaccacaagaacaacaagagcuggauggagagcgaguuccggguguacagcagcgccaacaacugcaccuucgaguacgugagccagcccuuccugauggaccuggagggcaagcagggcaacuucaagaaccugcgggaguucguguucaagaacaucgacggcuacuucaagaucuacagcaagcacaccccaaucaaccuggugcgggaucugccccagggcuucucagcccuggagccccugguggaccugcccaucggcaucaacaucacccgguuccagacccugcuggcccugcaccggagcuaccugaccccaggcgacagcagcagcggguggacagcaggcgcggcugcuuacuacgugggcuaccugcagccccggaccuuccugcugaaguacaacgagaacggcaccaucaccgacgccguggacugcgcccuggacccucugagcgagaccaagugcacccugaagagcuucaccguggagaagggcaucuaccagaccagcaacuuccgggugcagcccaccgagagcaucgugcgguuccccaacaucaccaaccugugccccuucggcgagguguucaacgccacccgguucgccagcguguacgccuggaaccggaagcggaucagcaacugcguggccgacuacagcgugcuguacaacagcgccagcuucagcaccuucaagugcuacggcgugagccccaccaagcugaacgaccugugcuucaccaacguguacgccgacagcuucgugauccguggcgacgaggugcggcagaucgcacccggccagacaggcaagaucgccgacuacaacuacaagcugcccgacgacuucaccggcugcgugaucgccuggaacagcaacaaccucgacagcaaggugggcggcaacuacaacuaccuguaccggcuguuccggaagagcaaccugaagcccuucgagcgggacaucagcaccgagaucuaccaagccggcuccaccccuugcaacggcguggagggcuucaacugcuacuucccucugcagagcuacggcuuccagcccaccaacggcgugggcuaccagcccuaccgggugguggugcugagcuucgagcugcugcacgccccagccaccguguguggccccaagaagagcaccaaccuggugaagaacaagugcgugaacuucaacuucaacggccuuaccggcaccggcgugcugaccgagagcaacaagaaauuccugcccuuucagcaguucggccgggacaucgccgacaccaccgacgcugugcgggauccccagacccuggagauccuggacaucaccccuugcagcuucggcggcgugagcgugaucaccccaggcaccaacaccagcaaccagguggccgugcuguaccagggcgugaacugcaccgaggugcccguggccauccacgccgaccagcugacacccaccuggcgggucuacagcaccggcagcaacguguuccagacccgggccgguugccugaucggcgccgagcacgugaacaacagcuacgagugcgacauccccaucggcgccggcaucugugccagcuaccagacccagaccaauucaccccggagggcaaggagcguggccagccagagcaucaucgccuacaccaugagccugggcgccgagaacagcguggccuacagcaacaacagcaucgccauccccaccaacuucaccaucagcgugaccaccgagauucugcccgugagcaugaccaagaccagcguggacugcaccauguacaucugcggcgacagcaccgagugcagcaaccugcugcugcaguacggcagcuucugcacccagcugaaccgggcccugaccggcaucgccguggagcaggacaagaacacccaggagguguucgcccaggugaagcagaucuacaagaccccucccaucaaggacuucggcggcuucaacuucagccagauccugcccgaccccagcaagcccagcaagcggagcuucaucgaggaccugcuguucaacaaggugacccuagccgacgccggcuucaucaagcaguacggcgacugccucggcgacauagccgcccgggaccugaucugcgcccagaaguucaacggccugaccgugcugccuccccugcugaccgacgagaugaucgcccaguacaccagcgcccuguuagccggaaccaucaccagcggcuggacuuucggcgcuggagccgcucugcagauccccuucgccaugcagauggccuaccgguucaacggcaucggcgugacccagaacgugcuguacgagaaccagaagcugaucgccaaccaguucaacagcgccaucggcaagauccaggacagccugagcagcaccgcuagcgcccugggcaagcugcaggacguggugaaccagaacgcccaggcccugaacacccuggugaagcagcugagcagcaacuucggcgccaucagcagcgugcugaacgacauccugagccggcuggacccucccgaggccgaggugcagaucgaccggcugaucacuggccggcugcagagccugcagaccuacgugacccagcagcugauccgggccgccgagauucgggccagcgccaaccuggccgccaccaagaugagcgagugcgugcugggccagagcaagcggguggacuucugcggcaagggcuaccaccugaugagcuuuccccagagcgcaccccacggagugguguuccugcacgugaccuacgugcccgcccaggagaagaacuucaccaccgccccagccaucugccacgacggcaaggcccacuuuccccgggagggcguguucgugagcaacggcacccacugguucgugacccagcggaacuucuacgagccccagaucaucaccaccgacaacaccuucgugagcggcaacugcgacguggugaucggcaucgugaacaacaccguguacgauccccugcagcccgagcuggacagcuucaaggaggagcuggacaaguacuucaagaaucacaccagccccgacguggaccugggcgacaucagcggcaucaacgccagcguggugaacauccagaaggagaucgaucggcugaacgagguggccaagaaccugaacgagagccugaucgaccugcaggagcugggcaaguacgagcaguacaucaaguggcccugguacaucuggcugggcuucaucgccggccugaucgccaucgugaucgugaccaucaugcugugcugcaugaccagcugcugcagcugccugaagggcuguugcagcugcggcagcugcugcaaguucgacgaggacgacagcgagcccgugcugaagggcgugaagcugcacuacaccugaggacuagucccuguucccagagcccacuuuuuuuucuuuuuuugaaauaaaauagccugucuuucagaucucaaaggcucuuuucagagccaccaaaaaaaaaaaaaaaaaaaaaaaaaaaaaaaaaaaaaaaaaaaaaaaaaaaaaaaaaaaaaaaaaaaaaaaaaaaaaaaaaaaaaaaaaaaaaaaaaaaaa

SEQ ID NO: 23783 - RNA, 4185 nt, Artificial Sequence
  SARS-CoV-2/Wuhan/WIV05/2019__EPI_ISL_402128 spike protein mRNA gc (1-1273)(K986P_V987P_H69del_V70del_A222V_Y453F_S477N_D614G_I692V)
aggagagggcgcuuggcuugcaaggacccugagcugcggcauugaagcacacccaacccaacucgacugaagucagccucacugaaccggaucugagaaucuucucucucugggcuugccagggcucuccgaaccuagcuagcauccucuucaauuccaacuagaaagcuuaccauguucguguuccuggugcugcugccccuggugagcagccagugcgugaaccugaccacccggacccagcugccaccagccuacaccaacagcuucacccggggcgucuacuaccccgacaagguguuccggagcagcguccugcacagcacccaggaccuguuccugcccuucuucagcaacgugaccugguuccacgccaucagcggcaccaacggcaccaagcgguucgacaaccccgugcugcccuucaacgacggcguguacuucgccagcaccgagaagagcaacaucauccggggcuggaucuucggcaccacccuggacagcaagacccagagccugcugaucgugaauaacgccaccaacguggugaucaaggugugcgaguuccaguucugcaacgaccccuuccugggcguguacuaccacaagaacaacaagagcuggauggagagcgaguuccggguguacagcagcgccaacaacugcaccuucgaguacgugagccagcccuuccugauggaccuggagggcaagcagggcaacuucaagaaccugcgggaguucguguucaagaacaucgacggcuacuucaagaucuacagcaagcacaccccaaucaaccuggugcgggaucugccccagggcuucucagugcuggagccccugguggaccugcccaucggcaucaacaucacccgguuccagacccugcuggcccugcaccggagcuaccugaccccaggcgacagcagcagcggguggacagcaggcgcggcugcuuacuacgugggcuaccugcagccccggaccuuccugcugaaguacaacgagaacggcaccaucaccgacgccguggacugcgcccuggacccucugagcgagaccaagugcacccugaagagcuucaccguggagaagggcaucuaccagaccagcaacuuccgggugcagcccaccgagagcaucgugcgguuccccaacaucaccaaccugugccccuucggcgagguguucaacgccacccgguucgccagcguguacgccuggaaccggaagcggaucagcaacugcguggccgacuacagcgugcuguacaacagcgccagcuucagcaccuucaagugcuacggcgugagccccaccaagcugaacgaccugugcuucaccaacguguacgccgacagcuucgugauccguggcgacgaggugcggcagaucgcacccggccagacaggcaagaucgccgacuacaacuacaagcugcccgacgacuucaccggcugcgugaucgccuggaacagcaacaaccucgacagcaaggugggcggcaacuacaacuaccuguuccggcuguuccggaagagcaaccugaagcccuucgagcgggacaucagcaccgagaucuaccaagccggcaacaccccuugcaacggcguggagggcuucaacugcuacuucccucugcagagcuacggcuuccagcccaccaacggcgugggcuaccagcccuaccgggugguggugcugagcuucgagcugcugcacgccccagccaccguguguggccccaagaagagcaccaaccuggugaagaacaagugcgugaacuucaacuucaacggccuuaccggcaccggcgugcugaccgagagcaacaagaaauuccugcccuuucagcaguucggccgggacaucgccgacaccaccgacgcugugcgggauccccagacccuggagauccuggacaucaccccuugcagcuucggcggcgugagcgugaucaccccaggcaccaacaccagcaaccagguggccgugcuguaccagggcgugaacugcaccgaggugcccguggccauccacgccgaccagcugacacccaccuggcgggucuacagcaccggcagcaacguguuccagacccgggccgguugccugaucggcgccgagcacgugaacaacagcuacgagugcgacauccccaucggcgccggcaucugugccagcuaccagacccagaccaauucaccccggagggcaaggagcguggccagccagagcgugaucgccuacaccaugagccugggcgccgagaacagcguggccuacagcaacaacagcaucgccauccccaccaacuucaccaucagcgugaccaccgagauucugcccgugagcaugaccaagaccagcguggacugcaccauguacaucugcggcgacagcaccgagugcagcaaccugcugcugcaguacggcagcuucugcacccagcugaaccgggcccugaccggcaucgccguggagcaggacaagaacacccaggagguguucgcccaggugaagcagaucuacaagaccccucccaucaaggacuucggcggcuucaacuucagccagauccugcccgaccccagcaagcccagcaagcggagcuucaucgaggaccugcuguucaacaaggugacccuagccgacgccggcuucaucaagcaguacggcgacugccucggcgacauagccgcccgggaccugaucugcgcccagaaguucaacggccugaccgugcugccuccccugcugaccgacgagaugaucgcccaguacaccagcgcccuguuagccggaaccaucaccagcggcuggacuuucggcgcuggagccgcucugcagauccccuucgccaugcagauggccuaccgguucaacggcaucggcgugacccagaacgugcuguacgagaaccagaagcugaucgccaaccaguucaacagcgccaucggcaagauccaggacagccugagcagcaccgcuagcgcccugggcaagcugcaggacguggugaaccagaacgcccaggcccugaacacccuggugaagcagcugagcagcaacuucggcgccaucagcagcgugcugaacgacauccugagccggcuggacccucccgaggccgaggugcagaucgaccggcugaucacuggccggcugcagagccugcagaccuacgugacccagcagcugauccgggccgccgagauucgggccagcgccaaccuggccgccaccaagaugagcgagugcgugcugggccagagcaagcggguggacuucugcggcaagggcuaccaccugaugagcuuuccccagagcgcaccccacggagugguguuccugcacgugaccuacgugcccgcccaggagaagaacuucaccaccgccccagccaucugccacgacggcaaggcccacuuuccccgggagggcguguucgugagcaacggcacccacugguucgugacccagcggaacuucuacgagccccagaucaucaccaccgacaacaccuucgugagcggcaacugcgacguggugaucggcaucgugaacaacaccguguacgauccccugcagcccgagcuggacagcuucaaggaggagcuggacaaguacuucaagaaucacaccagccccgacguggaccugggcgacaucagcggcaucaacgccagcguggugaacauccagaaggagaucgaucggcugaacgagguggccaagaaccugaacgagagccugaucgaccugcaggagcugggcaaguacgagcaguacaucaaguggcccugguacaucuggcugggcuucaucgccggccugaucgccaucgugauggugaccaucaugcugugcugcaugaccagcugcugcagcugccugaagggcuguugcagcugcggcagcugcugcaaguucgacgaggacgacagcgagcccgugcugaagggcgugaagcugcacuacaccugaggacuagucccuguucccagagcccacuuuuuuuucuuuuuuugaaauaaaauagccugucuuucagaucucaaaggcucuuuucagagccaccaaaaaaaaaaaaaaaaaaaaaaaaaaaaaaaaaaaaaaaaaaaaaaaaaaaaaaaaaaaaaaaaaaaaaaaaaaaaaaaaaaaaaaaaaaaaaaaaaaaaa

SEQ ID NO: 23784 - RNA, 4185 nt, Artificial Sequence
  SARS-CoV-2/Wuhan/WIV05/2019__EPI_ISL_402128 spike protein mRNA gc (1-1273)(K986P_V987P_H69del_V70del_Y453F_D614G_I692V_M1229I)
aggagagggcgcuuggcuugcaaggacccugagcugcggcauugaagcacacccaacccaacucgacugaagucagccucacugaaccggaucugagaaucuucucucucugggcuugccagggcucuccgaaccuagcuagcauccucuucaauuccaacuagaaagcuuaccauguucguguuccuggugcugcugccccuggugagcagccagugcgugaaccugaccacccggacccagcugccaccagccuacaccaacagcuucacccggggcgucuacuaccccgacaagguguuccggagcagcguccugcacagcacccaggaccuguuccugcccuucuucagcaacgugaccugguuccacgccaucagcggcaccaacggcaccaagcgguucgacaaccccgugcugcccuucaacgacggcguguacuucgccagcaccgagaagagcaacaucauccggggcuggaucuucggcaccacccuggacagcaagacccagagccugcugaucgugaauaacgccaccaacguggugaucaaggugugcgaguuccaguucugcaacgaccccuuccugggcguguacuaccacaagaacaacaagagcuggauggagagcgaguuccggguguacagcagcgccaacaacugcaccuucgaguacgugagccagcccuuccugauggaccuggagggcaagcagggcaacuucaagaaccugcgggaguucguguucaagaacaucgacggcuacuucaagaucuacagcaagcacaccccaaucaaccuggugcgggaucugccccagggcuucucagcccuggagccccugguggaccugcccaucggcaucaacaucacccgguuccagacccugcuggcccugcaccggagcuaccugaccccaggcgacagcagcagcggguggacagcaggcgcggcugcuuacuacgugggcuaccugcagccccggaccuuccugcugaaguacaacgagaacggcaccaucaccgacgccguggacugcgcccuggacccucugagcgagaccaagugcacccugaagagcuucaccguggagaagggcaucuaccagaccagcaacuuccgggugcagcccaccgagagcaucgugcgguuccccaacaucaccaaccugugccccuucggcgagguguucaacgccacccgguucgccagcguguacgccuggaaccggaagcggaucagcaacugcguggccgacuacagcgugcuguacaacagcgccagcuucagcaccuucaagugcuacggcgugagccccaccaagcugaacgaccugugcuucaccaacguguacgccgacagcuucgugauccguggcgacgaggugcggcagaucgcacccggccagacaggcaagaucgccgacuacaacuacaagcugcccgacgacuucaccggcugcgugaucgccuggaacagcaacaaccucgacagcaaggugggcggcaacuacaacuaccuguuccggcuguuccggaagagcaaccugaagcccuucgagcgggacaucagcaccgagaucuaccaagccggcuccaccccuugcaacggcguggagggcuucaacugcuacuucccucugcagagcuacggcuuccagcccaccaacggcgugggcuaccagcccuaccgggugguggugcugagcuucgagcugcugcacgccccagccaccguguguggccccaagaagagcaccaaccuggugaagaacaagugcgugaacuucaacuucaacggccuuaccggcaccggcgugcugaccgagagcaacaagaaauuccugcccuuucagcaguucggccgggacaucgccgacaccaccgacgcugugcgggauccccagacccuggagauccuggacaucaccccuugcagcuucggcggcgugagcgugaucaccccaggcaccaacaccagcaaccagguggccgugcuguaccagggcgugaacugcaccgaggugcccguggccauccacgccgaccagcugacacccaccuggcgggucuacagcaccggcagcaacguguuccagacccgggccgguugccugaucggcgccgagcacgugaacaacagcuacgagugcgacauccccaucggcgccggcaucugugccagcuaccagacccagaccaauucaccccggagggcaaggagcguggccagccagagcgugaucgccuacaccaugagccugggcgccgagaacagcguggccuacagcaacaacagcaucgccauccccaccaacuucaccaucagcgugaccaccgagauucugcccgugagcaugaccaagaccagcguggacugcaccauguacaucugcggcgacagcaccgagugcagcaaccugcugcugcaguacggcagcuucugcacccagcugaaccgggcccugaccggcaucgccguggagcaggacaagaacacccaggagguguucgcccaggugaagcagaucuacaagaccccucccaucaaggacuucggcggcuucaacuucagccagauccugcccgaccccagcaagcccagcaagcggagcuucaucgaggaccugcuguucaacaaggugacccuagccgacgccggcuucaucaagcaguacggcgacugccucggcgacauagccgcccgggaccugaucugcgcccagaaguucaacggccugaccgugcugccuccccugcugaccgacgagaugaucgcccaguacaccagcgcccuguuagccggaaccaucaccagcggcuggacuuucggcgcuggagccgcucugcagauccccuucgccaugcagauggccuaccgguucaacggcaucggcgugacccagaacgugcuguacgagaaccagaagcugaucgccaaccaguucaacagcgccaucggcaagauccaggacagccugagcagcaccgcuagcgcccugggcaagcugcaggacguggugaaccagaacgcccaggcccugaacacccuggugaagcagcugagcagcaacuucggcgccaucagcagcgugcugaacgacauccugagccggcuggacccucccgaggccgaggugcagaucgaccggcugaucacuggccggcugcagagccugcagaccuacgugacccagcagcugauccgggccgccgagauucgggccagcgccaaccuggccgccaccaagaugagcgagugcgugcugggccagagcaagcggguggacuucugcggcaagggcuaccaccugaugagcuuuccccagagcgcaccccacggagugguguuccugcacgugaccuacgugcccgcccaggagaagaacuucaccaccgccccagccaucugccacgacggcaaggcccacuuuccccgggagggcguguucgugagcaacggcacccacugguucgugacccagcggaacuucuacgagccccagaucaucaccaccgacaacaccuucgugagcggcaacugcgacguggugaucggcaucgugaacaacaccguguacgauccccugcagcccgagcuggacagcuucaaggaggagcuggacaaguacuucaagaaucacaccagccccgacguggaccugggcgacaucagcggcaucaacgccagcguggugaacauccagaaggagaucgaucggcugaacgagguggccaagaaccugaacgagagccugaucgaccugcaggagcugggcaaguacgagcaguacaucaaguggcccugguacaucuggcugggcuucaucgccggccugaucgccaucgugaucgugaccaucaugcugugcugcaugaccagcugcugcagcugccugaagggcuguugcagcugcggcagcugcugcaaguucgacgaggacgacagcgagcccgugcugaagggcgugaagcugcacuacaccugaggacuagucccuguucccagagcccacuuuuuuuucuuuuuuugaaauaaaauagccugucuuucagaucucaaaggcucuuuucagagccaccaaaaaaaaaaaaaaaaaaaaaaaaaaaaaaaaaaaaaaaaaaaaaaaaaaaaaaaaaaaaaaaaaaaaaaaaaaaaaaaaaaaaaaaaaaaaaaaaaaaaa

SEQ ID NO: 23785 - RNA, 4182 nt, Artificial Sequence
  SARS-CoV-2/Wuhan/WIV05/2019__EPI_ISL_402128 spike protein mRNA gc (1-1273)(K986P_V987P_K986P_V987P_H69del_V70del_Y144del_N501Y_A570 D_D614G_P681H_T716I_S982A_D1118H)
aggagagggcgcuuggcuugcaaggacccugagcugcggcauugaagcacacccaacccaacucgacugaagucagccucacugaaccggaucugagaaucuucucucucugggcuugccagggcucuccgaaccuagcuagcauccucuucaauuccaacuagaaagcuuaccauguucguguuccuggugcugcugccccuggugagcagccagugcgugaaccugaccacccggacccagcugccaccagccuacaccaacagcuucacccggggcgucuacuaccccgacaagguguuccggagcagcguccugcacagcacccaggaccuguuccugcccuucuucagcaacgugaccugguuccacgccaucagcggcaccaacggcaccaagcgguucgacaaccccgugcugcccuucaacgacggcguguacuucgccagcaccgagaagagcaacaucauccggggcuggaucuucggcaccacccuggacagcaagacccagagccugcugaucgugaauaacgccaccaacguggugaucaaggugugcgaguuccaguucugcaacgaccccuuccugggcguguaccacaagaacaacaagagcuggauggagagcgaguuccggguguacagcagcgccaacaacugcaccuucgaguacgugagccagcccuuccugauggaccuggagggcaagcagggcaacuucaagaaccugcgggaguucguguucaagaacaucgacggcuacuucaagaucuacagcaagcacaccccaaucaaccuggugcgggaucugccccagggcuucucagcccuggagccccugguggaccugcccaucggcaucaacaucacccgguuccagacccugcuggcccugcaccggagcuaccugaccccaggcgacagcagcagcggguggacagcaggcgcggcugcuuacuacgugggcuaccugcagccccggaccuuccugcugaaguacaacgagaacggcaccaucaccgacgccguggacugcgcccuggacccucugagcgagaccaagugcacccugaagagcuucaccguggagaagggcaucuaccagaccagcaacuuccgggugcagcccaccgagagcaucgugcgguuccccaacaucaccaaccugugccccuucggcgagguguucaacgccacccgguucgccagcguguacgccuggaaccggaagcggaucagcaacugcguggccgacuacagcgugcuguacaacagcgccagcuucagcaccuucaagugcuacggcgugagccccaccaagcugaacgaccugugcuucaccaacguguacgccgacagcuucgugauccguggcgacgaggugcggcagaucgcacccggccagacaggcaagaucgccgacuacaacuacaagcugcccgacgacuucaccggcugcgugaucgccuggaacagcaacaaccucgacagcaaggugggcggcaacuacaacuaccuguaccggcuguuccggaagagcaaccugaagcccuucgagcgggacaucagcaccgagaucuaccaagccggcuccaccccuugcaacggcguggagggcuucaacugcuacuucccucugcagagcuacggcuuccagcccaccuacggcgugggcuaccagcccuaccgggugguggugcugagcuucgagcugcugcacgccccagccaccguguguggccccaagaagagcaccaaccuggugaagaacaagugcgugaacuucaacuucaacggccuuaccggcaccggcgugcugaccgagagcaacaagaaauuccugcccuuucagcaguucggccgggacaucgacgacaccaccgacgcugugcgggauccccagacccuggagauccuggacaucaccccuugcagcuucggcggcgugagcgugaucaccccaggcaccaacaccagcaaccagguggccgugcuguaccagggcgugaacugcaccgaggugcccguggccauccacgccgaccagcugacacccaccuggcgggucuacagcaccggcagcaacguguuccagacccgggccgguugccugaucggcgccgagcacgugaacaacagcuacgagugcgacauccccaucggcgccggcaucugugccagcuaccagacccagaccaauucacaccggagggcaaggagcguggccagccagagcaucaucgccuacaccaugagccugggcgccgagaacagcguggccuacagcaacaacagcaucgccauccccaucaacuucaccaucagcgugaccaccgagauucugcccgugagcaugaccaagaccagcguggacugcaccauguacaucugcggcgacagcaccgagugcagcaaccugcugcugcaguacggcagcuucugcacccagcugaaccgggcccugaccggcaucgccguggagcaggacaagaacacccaggagguguucgcccaggugaagcagaucuacaagaccccucccaucaaggacuucggcggcuucaacuucagccagauccugcccgaccccagcaagcccagcaagcggagcuucaucgaggaccugcuguucaacaaggugacccuagccgacgccggcuucaucaagcaguacggcgacugccucggcgacauagccgcccgggaccugaucugcgcccagaaguucaacggccugaccgugcugccuccccugcugaccgacgagaugaucgcccaguacaccagcgcccuguuagccggaaccaucaccagcggcuggacuuucggcgcuggagccgcucugcagauccccuucgccaugcagauggccuaccgguucaacggcaucggcgugacccagaacgugcuguacgagaaccagaagcugaucgccaaccaguucaacagcgccaucggcaagauccaggacagccugagcagcaccgcuagcgcccugggcaagcugcaggacguggugaaccagaacgcccaggcccugaacacccuggugaagcagcugagcagcaacuucggcgccaucagcagcgugcugaacgacauccuggcccggcuggacccucccgaggccgaggugcagaucgaccggcugaucacuggccggcugcagagccugcagaccuacgugacccagcagcugauccgggccgccgagauucgggccagcgccaaccuggccgccaccaagaugagcgagugcgugcugggccagagcaagcggguggacuucugcggcaagggcuaccaccugaugagcuuuccccagagcgcaccccacggagugguguuccugcacgugaccuacgugcccgcccaggagaagaacuucaccaccgccccagccaucugccacgacggcaaggcccacuuuccccgggagggcguguucgugagcaacggcacccacugguucgugacccagcggaacuucuacgagccccagaucaucaccacccacaacaccuucgugagcggcaacugcgacguggugaucggcaucgugaacaacaccguguacgauccccugcagcccgagcuggacagcuucaaggaggagcuggacaaguacuucaagaaucacaccagccccgacguggaccugggcgacaucagcggcaucaacgccagcguggugaacauccagaaggagaucgaucggcugaacgagguggccaagaaccugaacgagagccugaucgaccugcaggagcugggcaaguacgagcaguacaucaaguggcccugguacaucuggcugggcuucaucgccggccugaucgccaucgugauggugaccaucaugcugugcugcaugaccagcugcugcagcugccugaagggcuguugcagcugcggcagcugcugcaaguucgacgaggacgacagcgagcccgugcugaagggcgugaagcugcacuacaccugaggacuagucccuguucccagagcccacuuuuuuuucuuuuuuugaaauaaaauagccugucuuucagaucucaaaggcucuuuucagagccaccaaaaaaaaaaaaaaaaaaaaaaaaaaaaaaaaaaaaaaaaaaaaaaaaaaaaaaaaaaaaaaaaaaaaaaaaaaaaaaaaaaaaaaaaaaaaaaaaaaaaa

SEQ ID NO: 23786 - RNA, 4191 nt, Artificial Sequence
  SARS-CoV-2/Wuhan/WIV05/2019__EPI_ISL_402128 spike protein mRNA gc (1-1273)(K986P_V987P_K986P_V987P_K417N_E484K_N501Y_D614G)
aggagagggcgcuuggcuugcaaggacccugagcugcggcauugaagcacacccaacccaacucgacugaagucagccucacugaaccggaucugagaaucuucucucucugggcuugccagggcucuccgaaccuagcuagcauccucuucaauuccaacuagaaagcuuaccauguucguguuccuggugcugcugccccuggugagcagccagugcgugaaccugaccacccggacccagcugccaccagccuacaccaacagcuucacccggggcgucuacuaccccgacaagguguuccggagcagcguccugcacagcacccaggaccuguuccugcccuucuucagcaacgugaccugguuccacgccauccacgugagcggcaccaacggcaccaagcgguucgacaaccccgugcugcccuucaacgacggcguguacuucgccagcaccgagaagagcaacaucauccggggcuggaucuucggcaccacccuggacagcaagacccagagccugcugaucgugaauaacgccaccaacguggugaucaaggugugcgaguuccaguucugcaacgaccccuuccugggcguguacuaccacaagaacaacaagagcuggauggagagcgaguuccggguguacagcagcgccaacaacugcaccuucgaguacgugagccagcccuuccugauggaccuggagggcaagcagggcaacuucaagaaccugcgggaguucguguucaagaacaucgacggcuacuucaagaucuacagcaagcacaccccaaucaaccuggugcgggaucugccccagggcuucucagcccuggagccccugguggaccugcccaucggcaucaacaucacccgguuccagacccugcuggcccugcaccggagcuaccugaccccaggcgacagcagcagcggguggacagcaggcgcggcugcuuacuacgugggcuaccugcagccccggaccuuccugcugaaguacaacgagaacggcaccaucaccgacgccguggacugcgcccuggacccucugagcgagaccaagugcacccugaagagcuucaccguggagaagggcaucuaccagaccagcaacuuccgggugcagcccaccgagagcaucgugcgguuccccaacaucaccaaccugugccccuucggcgagguguucaacgccacccgguucgccagcguguacgccuggaaccggaagcggaucagcaacugcguggccgacuacagcgugcuguacaacagcgccagcuucagcaccuucaagugcuacggcgugagccccaccaagcugaacgaccugugcuucaccaacguguacgccgacagcuucgugauccguggcgacgaggugcggcagaucgcacccggccagacaggcaacaucgccgacuacaacuacaagcugcccgacgacuucaccggcugcgugaucgccuggaacagcaacaaccucgacagcaaggugggcggcaacuacaacuaccuguaccggcuguuccggaagagcaaccugaagcccuucgagcgggacaucagcaccgagaucuaccaagccggcuccaccccuugcaacggcgugaagggcuucaacugcuacuucccucugcagagcuacggcuuccagcccaccuacggcgugggcuaccagcccuaccgggugguggugcugagcuucgagcugcugcacgccccagccaccguguguggccccaagaagagcaccaaccuggugaagaacaagugcgugaacuucaacuucaacggccuuaccggcaccggcgugcugaccgagagcaacaagaaauuccugcccuuucagcaguucggccgggacaucgccgacaccaccgacgcugugcgggauccccagacccuggagauccuggacaucaccccuugcagcuucggcggcgugagcgugaucaccccaggcaccaacaccagcaaccagguggccgugcuguaccagggcgugaacugcaccgaggugcccguggccauccacgccgaccagcugacacccaccuggcgggucuacagcaccggcagcaacguguuccagacccgggccgguugccugaucggcgccgagcacgugaacaacagcuacgagugcgacauccccaucggcgccggcaucugugccagcuaccagacccagaccaauucaccccggagggcaaggagcguggccagccagagcaucaucgccuacaccaugagccugggcgccgagaacagcguggccuacagcaacaacagcaucgccauccccaccaacuucaccaucagcgugaccaccgagauucugcccgugagcaugaccaagaccagcguggacugcaccauguacaucugcggcgacagcaccgagugcagcaaccugcugcugcaguacggcagcuucugcacccagcugaaccgggcccugaccggcaucgccguggagcaggacaagaacacccaggagguguucgcccaggugaagcagaucuacaagaccccucccaucaaggacuucggcggcuucaacuucagccagauccugcccgaccccagcaagcccagcaagcggagcuucaucgaggaccugcuguucaacaaggugacccuagccgacgccggcuucaucaagcaguacggcgacugccucggcgacauagccgcccgggaccugaucugcgcccagaaguucaacggccugaccgugcugccuccccugcugaccgacgagaugaucgcccaguacaccagcgcccuguuagccggaaccaucaccagcggcuggacuuucggcgcuggagccgcucugcagauccccuucgccaugcagauggccuaccgguucaacggcaucggcgugacccagaacgugcuguacgagaaccagaagcugaucgccaaccaguucaacagcgccaucggcaagauccaggacagccugagcagcaccgcuagcgcccugggcaagcugcaggacguggugaaccagaacgcccaggcccugaacacccuggugaagcagcugagcagcaacuucggcgccaucagcagcgugcugaacgacauccugagccggcuggacccucccgaggccgaggugcagaucgaccggcugaucacuggccggcugcagagccugcagaccuacgugacccagcagcugauccgggccgccgagauucgggccagcgccaaccuggccgccaccaagaugagcgagugcgugcugggccagagcaagcggguggacuucugcggcaagggcuaccaccugaugagcuuuccccagagcgcaccccacggagugguguuccugcacgugaccuacgugcccgcccaggagaagaacuucaccaccgccccagccaucugccacgacggcaaggcccacuuuccccgggagggcguguucgugagcaacggcacccacugguucgugacccagcggaacuucuacgagccccagaucaucaccaccgacaacaccuucgugagcggcaacugcgacguggugaucggcaucgugaacaacaccguguacgauccccugcagcccgagcuggacagcuucaaggaggagcuggacaaguacuucaagaaucacaccagccccgacguggaccugggcgacaucagcggcaucaacgccagcguggugaacauccagaaggagaucgaucggcugaacgagguggccaagaaccugaacgagagccugaucgaccugcaggagcugggcaaguacgagcaguacaucaaguggcccugguacaucuggcugggcuucaucgccggccugaucgccaucgugauggugaccaucaugcugugcugcaugaccagcugcugcagcugccugaagggcuguugcagcugcggcagcugcugcaaguucgacgaggacgacagcgagcccgugcugaagggcgugaagcugcacuacaccugaggacuagucccuguucccagagcccacuuuuuuuucuuuuuuugaaauaaaauagccugucuuucagaucucaaaggcucuuuucagagccaccaaaaaaaaaaaaaaaaaaaaaaaaaaaaaaaaaaaaaaaaaaaaaaaaaaaaaaaaaaaaaaaaaaaaaaaaaaaaaaaaaaaaaaaaaaaaaaaaaaaaa

SEQ ID NO: 23787 - RNA, 4182 nt, Artificial Sequence
  SARS-CoV-2/Wuhan/WIV05/2019__EPI_ISL_402128 spike protein mRNA gc (1-1273)(K986P_V987P_K986P_V987P_L18F_D80A_D215G_L242del_A243del_ L244del_R246I_K417N_E484K_N501Y_D614G_A701V)
aggagagggcgcuuggcuugcaaggacccugagcugcggcauugaagcacacccaacccaacucgacugaagucagccucacugaaccggaucugagaaucuucucucucugggcuugccagggcucuccgaaccuagcuagcauccucuucaauuccaacuagaaagcuuaccauguucguguuccuggugcugcugccccuggugagcagccagugcgugaacuucaccacccggacccagcugccaccagccuacaccaacagcuucacccggggcgucuacuaccccgacaagguguuccggagcagcguccugcacagcacccaggaccuguuccugcccuucuucagcaacgugaccugguuccacgccauccacgugagcggcaccaacggcaccaagcgguucgccaaccccgugcugcccuucaacgacggcguguacuucgccagcaccgagaagagcaacaucauccggggcuggaucuucggcaccacccuggacagcaagacccagagccugcugaucgugaauaacgccaccaacguggugaucaaggugugcgaguuccaguucugcaacgaccccuuccugggcguguacuaccacaagaacaacaagagcuggauggagagcgaguuccggguguacagcagcgccaacaacugcaccuucgaguacgugagccagcccuuccugauggaccuggagggcaagcagggcaacuucaagaaccugcgggaguucguguucaagaacaucgacggcuacuucaagaucuacagcaagcacaccccaaucaaccuggugcggggccugccccagggcuucucagcccuggagccccugguggaccugcccaucggcaucaacaucacccgguuccagacccugcacaucagcuaccugaccccaggcgacagcagcagcggguggacagcaggcgcggcugcuuacuacgugggcuaccugcagccccggaccuuccugcugaaguacaacgagaacggcaccaucaccgacgccguggacugcgcccuggacccucugagcgagaccaagugcacccugaagagcuucaccguggagaagggcaucuaccagaccagcaacuuccgggugcagcccaccgagagcaucgugcgguuccccaacaucaccaaccugugccccuucggcgagguguucaacgccacccgguucgccagcguguacgccuggaaccggaagcggaucagcaacugcguggccgacuacagcgugcuguacaacagcgccagcuucagcaccuucaagugcuacggcgugagccccaccaagcugaacgaccugugcuucaccaacguguacgccgacagcuucgugauccguggcgacgaggugcggcagaucgcacccggccagacaggcaacaucgccgacuacaacuacaagcugcccgacgacuucaccggcugcgugaucgccuggaacagcaacaaccucgacagcaaggugggcggcaacuacaacuaccuguaccggcuguuccggaagagcaaccugaagcccuucgagcgggacaucagcaccgagaucuaccaagccggcuccaccccuugcaacggcgugaagggcuucaacugcuacuucccucugcagagcuacggcuuccagcccaccuacggcgugggcuaccagcccuaccgggugguggugcugagcuucgagcugcugcacgccccagccaccguguguggccccaagaagagcaccaaccuggugaagaacaagugcgugaacuucaacuucaacggccuuaccggcaccggcgugcugaccgagagcaacaagaaauuccugcccuuucagcaguucggccgggacaucgccgacaccaccgacgcugugcgggauccccagacccuggagauccuggacaucaccccuugcagcuucggcggcgugagcgugaucaccccaggcaccaacaccagcaaccagguggccgugcuguaccagggcgugaacugcaccgaggugcccguggccauccacgccgaccagcugacacccaccuggcgggucuacagcaccggcagcaacguguuccagacccgggccgguugccugaucggcgccgagcacgugaacaacagcuacgagugcgacauccccaucggcgccggcaucugugccagcuaccagacccagaccaauucaccccggagggcaaggagcguggccagccagagcaucaucgccuacaccaugagccugggcguggagaacagcguggccuacagcaacaacagcaucgccauccccaccaacuucaccaucagcgugaccaccgagauucugcccgugagcaugaccaagaccagcguggacugcaccauguacaucugcggcgacagcaccgagugcagcaaccugcugcugcaguacggcagcuucugcacccagcugaaccgggcccugaccggcaucgccguggagcaggacaagaacacccaggagguguucgcccaggugaagcagaucuacaagaccccucccaucaaggacuucggcggcuucaacuucagccagauccugcccgaccccagcaagcccagcaagcggagcuucaucgaggaccugcuguucaacaaggugacccuagccgacgccggcuucaucaagcaguacggcgacugccucggcgacauagccgcccgggaccugaucugcgcccagaaguucaacggccugaccgugcugccuccccugcugaccgacgagaugaucgcccaguacaccagcgcccuguuagccggaaccaucaccagcggcuggacuuucggcgcuggagccgcucugcagauccccuucgccaugcagauggccuaccgguucaacggcaucggcgugacccagaacgugcuguacgagaaccagaagcugaucgccaaccaguucaacagcgccaucggcaagauccaggacagccugagcagcaccgcuagcgcccugggcaagcugcaggacguggugaaccagaacgcccaggcccugaacacccuggugaagcagcugagcagcaacuucggcgccaucagcagcgugcugaacgacauccugagccggcuggacccucccgaggccgaggugcagaucgaccggcugaucacuggccggcugcagagccugcagaccuacgugacccagcagcugauccgggccgccgagauucgggccagcgccaaccuggccgccaccaagaugagcgagugcgugcugggccagagcaagcggguggacuucugcggcaagggcuaccaccugaugagcuuuccccagagcgcaccccacggagugguguuccugcacgugaccuacgugcccgcccaggagaagaacuucaccaccgccccagccaucugccacgacggcaaggcccacuuuccccgggagggcguguucgugagcaacggcacccacugguucgugacccagcggaacuucuacgagccccagaucaucaccaccgacaacaccuucgugagcggcaacugcgacguggugaucggcaucgugaacaacaccguguacgauccccugcagcccgagcuggacagcuucaaggaggagcuggacaaguacuucaagaaucacaccagccccgacguggaccugggcgacaucagcggcaucaacgccagcguggugaacauccagaaggagaucgaucggcugaacgagguggccaagaaccugaacgagagccugaucgaccugcaggagcugggcaaguacgagcaguacaucaaguggcccugguacaucuggcugggcuucaucgccggccugaucgccaucgugauggugaccaucaugcugugcugcaugaccagcugcugcagcugccugaagggcuguugcagcugcggcagcugcugcaaguucgacgaggacgacagcgagcccgugcugaagggcgugaagcugcacuacaccugaggacuagucccuguucccagagcccacuuuuuuuucuuuuuuugaaauaaaauagccugucuuucagaucucaaaggcucuuuucagagccaccaaaaaaaaaaaaaaaaaaaaaaaaaaaaaaaaaaaaaaaaaaaaaaaaaaaaaaaaaaaaaaaaaaaaaaaaaaaaaaaaaaaaaaaaaaaaaaaaaaaaa

SEQ ID NO: 23788 - RNA, 4191 nt, Artificial Sequence
  SARS-CoV-2/Wuhan/WIV05/2019__EPI_ISL_402128 spike protein mRNA gc (1-1273)(K986P_V987P_K986P_V987P_E484K_D614G)
aggagagggcgcuuggcuugcaaggacccugagcugcggcauugaagcacacccaacccaacucgacugaagucagccucacugaaccggaucugagaaucuucucucucugggcuugccagggcucuccgaaccuagcuagcauccucuucaauuccaacuagaaagcuuaccauguucguguuccuggugcugcugccccuggugagcagccagugcgugaaccugaccacccggacccagcugccaccagccuacaccaacagcuucacccggggcgucuacuaccccgacaagguguuccggagcagcguccugcacagcacccaggaccuguuccugcccuucuucagcaacgugaccugguuccacgccauccacgugagcggcaccaacggcaccaagcgguucgacaaccccgugcugcccuucaacgacggcguguacuucgccagcaccgagaagagcaacaucauccggggcuggaucuucggcaccacccuggacagcaagacccagagccugcugaucgugaauaacgccaccaacguggugaucaaggugugcgaguuccaguucugcaacgaccccuuccugggcguguacuaccacaagaacaacaagagcuggauggagagcgaguuccggguguacagcagcgccaacaacugcaccuucgaguacgugagccagcccuuccugauggaccuggagggcaagcagggcaacuucaagaaccugcgggaguucguguucaagaacaucgacggcuacuucaagaucuacagcaagcacaccccaaucaaccuggugcgggaucugccccagggcuucucagcccuggagccccugguggaccugcccaucggcaucaacaucacccgguuccagacccugcuggcccugcaccggagcuaccugaccccaggcgacagcagcagcggguggacagcaggcgcggcugcuuacuacgugggcuaccugcagccccggaccuuccugcugaaguacaacgagaacggcaccaucaccgacgccguggacugcgcccuggacccucugagcgagaccaagugcacccugaagagcuucaccguggagaagggcaucuaccagaccagcaacuuccgggugcagcccaccgagagcaucgugcgguuccccaacaucaccaaccugugccccuucggcgagguguucaacgccacccgguucgccagcguguacgccuggaaccggaagcggaucagcaacugcguggccgacuacagcgugcuguacaacagcgccagcuucagcaccuucaagugcuacggcgugagccccaccaagcugaacgaccugugcuucaccaacguguacgccgacagcuucgugauccguggcgacgaggugcggcagaucgcacccggccagacaggcaagaucgccgacuacaacuacaagcugcccgacgacuucaccggcugcgugaucgccuggaacagcaacaaccucgacagcaaggugggcggcaacuacaacuaccuguaccggcuguuccggaagagcaaccugaagcccuucgagcgggacaucagcaccgagaucuaccaagccggcuccaccccuugcaacggcgugaagggcuucaacugcuacuucccucugcagagcuacggcuuccagcccaccaacggcgugggcuaccagcccuaccgggugguggugcugagcuucgagcugcugcacgccccagccaccguguguggccccaagaagagcaccaaccuggugaagaacaagugcgugaacuucaacuucaacggccuuaccggcaccggcgugcugaccgagagcaacaagaaauuccugcccuuucagcaguucggccgggacaucgccgacaccaccgacgcugugcgggauccccagacccuggagauccuggacaucaccccuugcagcuucggcggcgugagcgugaucaccccaggcaccaacaccagcaaccagguggccgugcuguaccagggcgugaacugcaccgaggugcccguggccauccacgccgaccagcugacacccaccuggcgggucuacagcaccggcagcaacguguuccagacccgggccgguugccugaucggcgccgagcacgugaacaacagcuacgagugcgacauccccaucggcgccggcaucugugccagcuaccagacccagaccaauucaccccggagggcaaggagcguggccagccagagcaucaucgccuacaccaugagccugggcgccgagaacagcguggccuacagcaacaacagcaucgccauccccaccaacuucaccaucagcgugaccaccgagauucugcccgugagcaugaccaagaccagcguggacugcaccauguacaucugcggcgacagcaccgagugcagcaaccugcugcugcaguacggcagcuucugcacccagcugaaccgggcccugaccggcaucgccguggagcaggacaagaacacccaggagguguucgcccaggugaagcagaucuacaagaccccucccaucaaggacuucggcggcuucaacuucagccagauccugcccgaccccagcaagcccagcaagcggagcuucaucgaggaccugcuguucaacaaggugacccuagccgacgccggcuucaucaagcaguacggcgacugccucggcgacauagccgcccgggaccugaucugcgcccagaaguucaacggccugaccgugcugccuccccugcugaccgacgagaugaucgcccaguacaccagcgcccuguuagccggaaccaucaccagcggcuggacuuucggcgcuggagccgcucugcagauccccuucgccaugcagauggccuaccgguucaacggcaucggcgugacccagaacgugcuguacgagaaccagaagcugaucgccaaccaguucaacagcgccaucggcaagauccaggacagccugagcagcaccgcuagcgcccugggcaagcugcaggacguggugaaccagaacgcccaggcccugaacacccuggugaagcagcugagcagcaacuucggcgccaucagcagcgugcugaacgacauccugagccggcuggacccucccgaggccgaggugcagaucgaccggcugaucacuggccggcugcagagccugcagaccuacgugacccagcagcugauccgggccgccgagauucgggccagcgccaaccuggccgccaccaagaugagcgagugcgugcugggccagagcaagcggguggacuucugcggcaagggcuaccaccugaugagcuuuccccagagcgcaccccacggagugguguuccugcacgugaccuacgugcccgcccaggagaagaacuucaccaccgccccagccaucugccacgacggcaaggcccacuuuccccgggagggcguguucgugagcaacggcacccacugguucgugacccagcggaacuucuacgagccccagaucaucaccaccgacaacaccuucgugagcggcaacugcgacguggugaucggcaucgugaacaacaccguguacgauccccugcagcccgagcuggacagcuucaaggaggagcuggacaaguacuucaagaaucacaccagccccgacguggaccugggcgacaucagcggcaucaacgccagcguggugaacauccagaaggagaucgaucggcugaacgagguggccaagaaccugaacgagagccugaucgaccugcaggagcugggcaaguacgagcaguacaucaaguggcccugguacaucuggcugggcuucaucgccggccugaucgccaucgugauggugaccaucaugcugugcugcaugaccagcugcugcagcugccugaagggcuguugcagcugcggcagcugcugcaaguucgacgaggacgacagcgagcccgugcugaagggcgugaagcugcacuacaccugaggacuagucccuguucccagagcccacuuuuuuuucuuuuuuugaaauaaaauagccugucuuucagaucucaaaggcucuuuucagagccaccaaaaaaaaaaaaaaaaaaaaaaaaaaaaaaaaaaaaaaaaaaaaaaaaaaaaaaaaaaaaaaaaaaaaaaaaaaaaaaaaaaaaaaaaaaaaaaaaaaaaa

SEQ ID NO: 23789 - RNA, 4191 nt, Artificial Sequence
  SARS-CoV-2/Wuhan/WIV05/2019__EPI_ISL_402128 spike protein mRNA gc (1-1273)(K986P_V987P_K986P_V987P_L18F_T20N_P26S_D138Y_R190S_K417T _E484K_N501Y_D614G_H655Y_T1027I)
aggagagggcgcuuggcuugcaaggacccugagcugcggcauugaagcacacccaacccaacucgacugaagucagccucacugaaccggaucugagaaucuucucucucugggcuugccagggcucuccgaaccuagcuagcauccucuucaauuccaacuagaaagcuuaccauguucguguuccuggugcugcugccccuggugagcagccagugcgugaacuucaccaaccggacccagcugccaagcgccuacaccaacagcuucacccggggcgucuacuaccccgacaagguguuccggagcagcguccugcacagcacccaggaccuguuccugcccuucuucagcaacgugaccugguuccacgccauccacgugagcggcaccaacggcaccaagcgguucgacaaccccgugcugcccuucaacgacggcguguacuucgccagcaccgagaagagcaacaucauccggggcuggaucuucggcaccacccuggacagcaagacccagagccugcugaucgugaauaacgccaccaacguggugaucaaggugugcgaguuccaguucugcaacuaccccuuccugggcguguacuaccacaagaacaacaagagcuggauggagagcgaguuccggguguacagcagcgccaacaacugcaccuucgaguacgugagccagcccuuccugauggaccuggagggcaagcagggcaacuucaagaaccugagcgaguucguguucaagaacaucgacggcuacuucaagaucuacagcaagcacaccccaaucaaccuggugcgggaucugccccagggcuucucagcccuggagccccugguggaccugcccaucggcaucaacaucacccgguuccagacccugcuggcccugcaccggagcuaccugaccccaggcgacagcagcagcggguggacagcaggcgcggcugcuuacuacgugggcuaccugcagccccggaccuuccugcugaaguacaacgagaacggcaccaucaccgacgccguggacugcgcccuggacccucugagcgagaccaagugcacccugaagagcuucaccguggagaagggcaucuaccagaccagcaacuuccgggugcagcccaccgagagcaucgugcgguuccccaacaucaccaaccugugccccuucggcgagguguucaacgccacccgguucgccagcguguacgccuggaaccggaagcggaucagcaacugcguggccgacuacagcgugcuguacaacagcgccagcuucagcaccuucaagugcuacggcgugagccccaccaagcugaacgaccugugcuucaccaacguguacgccgacagcuucgugauccguggcgacgaggugcggcagaucgcacccggccagacaggcaccaucgccgacuacaacuacaagcugcccgacgacuucaccggcugcgugaucgccuggaacagcaacaaccucgacagcaaggugggcggcaacuacaacuaccuguaccggcuguuccggaagagcaaccugaagcccuucgagcgggacaucagcaccgagaucuaccaagccggcuccaccccuugcaacggcgugaagggcuucaacugcuacuucccucugcagagcuacggcuuccagcccaccuacggcgugggcuaccagcccuaccgggugguggugcugagcuucgagcugcugcacgccccagccaccguguguggccccaagaagagcaccaaccuggugaagaacaagugcgugaacuucaacuucaacggccuuaccggcaccggcgugcugaccgagagcaacaagaaauuccugcccuuucagcaguucggccgggacaucgccgacaccaccgacgcugugcgggauccccagacccuggagauccuggacaucaccccuugcagcuucggcggcgugagcgugaucaccccaggcaccaacaccagcaaccagguggccgugcuguaccagggcgugaacugcaccgaggugcccguggccauccacgccgaccagcugacacccaccuggcgggucuacagcaccggcagcaacguguuccagacccgggccgguugccugaucggcgccgaguacgugaacaacagcuacgagugcgacauccccaucggcgccggcaucugugccagcuaccagacccagaccaauucaccccggagggcaaggagcguggccagccagagcaucaucgccuacaccaugagccugggcgccgagaacagcguggccuacagcaacaacagcaucgccauccccaccaacuucaccaucagcgugaccaccgagauucugcccgugagcaugaccaagaccagcguggacugcaccauguacaucugcggcgacagcaccgagugcagcaaccugcugcugcaguacggcagcuucugcacccagcugaaccgggcccugaccggcaucgccguggagcaggacaagaacacccaggagguguucgcccaggugaagcagaucuacaagaccccucccaucaaggacuucggcggcuucaacuucagccagauccugcccgaccccagcaagcccagcaagcggagcuucaucgaggaccugcuguucaacaaggugacccuagccgacgccggcuucaucaagcaguacggcgacugccucggcgacauagccgcccgggaccugaucugcgcccagaaguucaacggccugaccgugcugccuccccugcugaccgacgagaugaucgcccaguacaccagcgcccuguuagccggaaccaucaccagcggcuggacuuucggcgcuggagccgcucugcagauccccuucgccaugcagauggccuaccgguucaacggcaucggcgugacccagaacgugcuguacgagaaccagaagcugaucgccaaccaguucaacagcgccaucggcaagauccaggacagccugagcagcaccgcuagcgcccugggcaagcugcaggacguggugaaccagaacgcccaggcccugaacacccuggugaagcagcugagcagcaacuucggcgccaucagcagcgugcugaacgacauccugagccggcuggacccucccgaggccgaggugcagaucgaccggcugaucacuggccggcugcagagccugcagaccuacgugacccagcagcugauccgggccgccgagauucgggccagcgccaaccuggccgccaucaagaugagcgagugcgugcugggccagagcaagcggguggacuucugcggcaagggcuaccaccugaugagcuuuccccagagcgcaccccacggagugguguuccugcacgugaccuacgugcccgcccaggagaagaacuucaccaccgccccagccaucugccacgacggcaaggcccacuuuccccgggagggcguguucgugagcaacggcacccacugguucgugacccagcggaacuucuacgagccccagaucaucaccaccgacaacaccuucgugagcggcaacugcgacguggugaucggcaucgugaacaacaccguguacgauccccugcagcccgagcuggacagcuucaaggaggagcuggacaaguacuucaagaaucacaccagccccgacguggaccugggcgacaucagcggcaucaacgccagcguggugaacauccagaaggagaucgaucggcugaacgagguggccaagaaccugaacgagagccugaucgaccugcaggagcugggcaaguacgagcaguacaucaaguggcccugguacaucuggcugggcuucaucgccggccugaucgccaucgugauggugaccaucaugcugugcugcaugaccagcugcugcagcugccugaagggcuguugcagcugcggcagcugcugcaaguucgacgaggacgacagcgagcccgugcugaagggcgugaagcugcacuacaccugaggacuagucccuguucccagagcccacuuuuuuuucuuuuuuugaaauaaaauagccugucuuucagaucucaaaggcucuuuucagagccaccaaaaaaaaaaaaaaaaaaaaaaaaaaaaaaaaaaaaaaaaaaaaaaaaaaaaaaaaaaaaaaaaaaaaaaaaaaaaaaaaaaaaaaaaaaaaaaaaaaaaa

SEQ ID NO: 23790 - RNA, 4191 nt, Artificial Sequence
  SARS-CoV-2/Wuhan/WIV05/2019__EPI_ISL_402128 spike protein mRNA gc (1-1273)(K986P_V987P_K986P_V987P_S13I_W152C_L452R_D614G)
aggagagggcgcuuggcuugcaaggacccugagcugcggcauugaagcacacccaacccaacucgacugaagucagccucacugaaccggaucugagaaucuucucucucugggcuugccagggcucuccgaaccuagcuagcauccucuucaauuccaacuagaaagcuuaccauguucguguuccuggugcugcugccccuggugagcauccagugcgugaaccugaccacccggacccagcugccaccagccuacaccaacagcuucacccggggcgucuacuaccccgacaagguguuccggagcagcguccugcacagcacccaggaccuguuccugcccuucuucagcaacgugaccugguuccacgccauccacgugagcggcaccaacggcaccaagcgguucgacaaccccgugcugcccuucaacgacggcguguacuucgccagcaccgagaagagcaacaucauccggggcuggaucuucggcaccacccuggacagcaagacccagagccugcugaucgugaauaacgccaccaacguggugaucaaggugugcgaguuccaguucugcaacgaccccuuccugggcguguacuaccacaagaacaacaagagcugcauggagagcgaguuccggguguacagcagcgccaacaacugcaccuucgaguacgugagccagcccuuccugauggaccuggagggcaagcagggcaacuucaagaaccugcgggaguucguguucaagaacaucgacggcuacuucaagaucuacagcaagcacaccccaaucaaccuggugcgggaucugccccagggcuucucagcccuggagccccugguggaccugcccaucggcaucaacaucacccgguuccagacccugcuggcccugcaccggagcuaccugaccccaggcgacagcagcagcggguggacagcaggcgcggcugcuuacuacgugggcuaccugcagccccggaccuuccugcugaaguacaacgagaacggcaccaucaccgacgccguggacugcgcccuggacccucugagcgagaccaagugcacccugaagagcuucaccguggagaagggcaucuaccagaccagcaacuuccgggugcagcccaccgagagcaucgugcgguuccccaacaucaccaaccugugccccuucggcgagguguucaacgccacccgguucgccagcguguacgccuggaaccggaagcggaucagcaacugcguggccgacuacagcgugcuguacaacagcgccagcuucagcaccuucaagugcuacggcgugagccccaccaagcugaacgaccugugcuucaccaacguguacgccgacagcuucgugauccguggcgacgaggugcggcagaucgcacccggccagacaggcaagaucgccgacuacaacuacaagcugcccgacgacuucaccggcugcgugaucgccuggaacagcaacaaccucgacagcaaggugggcggcaacuacaacuaccgcuaccggcuguuccggaagagcaaccugaagcccuucgagcgggacaucagcaccgagaucuaccaagccggcuccaccccuugcaacggcguggagggcuucaacugcuacuucccucugcagagcuacggcuuccagcccaccaacggcgugggcuaccagcccuaccgggugguggugcugagcuucgagcugcugcacgccccagccaccguguguggccccaagaagagcaccaaccuggugaagaacaagugcgugaacuucaacuucaacggccuuaccggcaccggcgugcugaccgagagcaacaagaaauuccugcccuuucagcaguucggccgggacaucgccgacaccaccgacgcugugcgggauccccagacccuggagauccuggacaucaccccuugcagcuucggcggcgugagcgugaucaccccaggcaccaacaccagcaaccagguggccgugcuguaccagggcgugaacugcaccgaggugcccguggccauccacgccgaccagcugacacccaccuggcgggucuacagcaccggcagcaacguguuccagacccgggccgguugccugaucggcgccgagcacgugaacaacagcuacgagugcgacauccccaucggcgccggcaucugugccagcuaccagacccagaccaauucaccccggagggcaaggagcguggccagccagagcaucaucgccuacaccaugagccugggcgccgagaacagcguggccuacagcaacaacagcaucgccauccccaccaacuucaccaucagcgugaccaccgagauucugcccgugagcaugaccaagaccagcguggacugcaccauguacaucugcggcgacagcaccgagugcagcaaccugcugcugcaguacggcagcuucugcacccagcugaaccgggcccugaccggcaucgccguggagcaggacaagaacacccaggagguguucgcccaggugaagcagaucuacaagaccccucccaucaaggacuucggcggcuucaacuucagccagauccugcccgaccccagcaagcccagcaagcggagcuucaucgaggaccugcuguucaacaaggugacccuagccgacgccggcuucaucaagcaguacggcgacugccucggcgacauagccgcccgggaccugaucugcgcccagaaguucaacggccugaccgugcugccuccccugcugaccgacgagaugaucgcccaguacaccagcgcccuguuagccggaaccaucaccagcggcuggacuuucggcgcuggagccgcucugcagauccccuucgccaugcagauggccuaccgguucaacggcaucggcgugacccagaacgugcuguacgagaaccagaagcugaucgccaaccaguucaacagcgccaucggcaagauccaggacagccugagcagcaccgcuagcgcccugggcaagcugcaggacguggugaaccagaacgcccaggcccugaacacccuggugaagcagcugagcagcaacuucggcgccaucagcagcgugcugaacgacauccugagccggcuggacccucccgaggccgaggugcagaucgaccggcugaucacuggccggcugcagagccugcagaccuacgugacccagcagcugauccgggccgccgagauucgggccagcgccaaccuggccgccaccaagaugagcgagugcgugcugggccagagcaagcggguggacuucugcggcaagggcuaccaccugaugagcuuuccccagagcgcaccccacggagugguguuccugcacgugaccuacgugcccgcccaggagaagaacuucaccaccgccccagccaucugccacgacggcaaggcccacuuuccccgggagggcguguucgugagcaacggcacccacugguucgugacccagcggaacuucuacgagccccagaucaucaccaccgacaacaccuucgugagcggcaacugcgacguggugaucggcaucgugaacaacaccguguacgauccccugcagcccgagcuggacagcuucaaggaggagcuggacaaguacuucaagaaucacaccagccccgacguggaccugggcgacaucagcggcaucaacgccagcguggugaacauccagaaggagaucgaucggcugaacgagguggccaagaaccugaacgagagccugaucgaccugcaggagcugggcaaguacgagcaguacaucaaguggcccugguacaucuggcugggcuucaucgccggccugaucgccaucgugauggugaccaucaugcugugcugcaugaccagcugcugcagcugccugaagggcuguugcagcugcggcagcugcugcaaguucgacgaggacgacagcgagcccgugcugaagggcgugaagcugcacuacaccugaggacuagucccuguucccagagcccacuuuuuuuucuuuuuuugaaauaaaauagccugucuuucagaucucaaaggcucuuuucagagccaccaaaaaaaaaaaaaaaaaaaaaaaaaaaaaaaaaaaaaaaaaaaaaaaaaaaaaaaaaaaaaaaaaaaaaaaaaaaaaaaaaaaaaaaaaaaaaaaaaaaaa

SEQ ID NO: 23791 - RNA, 4191 nt, Artificial Sequence
  SARS-CoV-2/Wuhan/WIV05/2019__EPI_ISL_402128 spike protein mRNA gc (1-1273)(K986P_V987P)
aggagagggcgcuuggcuugcaaggacccugagcugcggcauugaagcacacccaacccaacucgacugaagucagccucacugaaccggaucugagaaucuucucucucugggcuugccagggcucuccgaaccuagcuagcauccucuucaauuccaacuagaaagcuuaccauguucguguuccuggugcugcugccccuggugagcagccagugcgugaaccugaccacccggacccagcugcccccugccuacaccaacagcuucacccggggcguguacuaccccgacaagguguuccggagcagcgugcugcacagcacccaggaccuguuccugcccuucuucagcaacgugaccugguuccacgccauccacgugagcggcaccaacggcaccaagcgguucgacaacccagugcugcccuucaacgacggcguguacuucgccagcaccgagaagucaaacaucauccggggcuggaucuucggcaccacccuggacagcaagacacagagccugcugaucgugaacaacgccaccaacguggugaucaaggugugcgaguuucaguucugcaacgaccccuuccugggcguguacuaccacaagaacaacaagagcuggauggagagcgaguuccgggucuacagcagcgcuaacaauugcaccuucgaguacgugagccagcccuuccugauggaccucgagggcaagcagggcaacuucaagaaccugcgggaguucguguucaagaacaucgauggcuacuucaagaucuacagcaagcacacccccaucaaccuggugcgggaccugccccagggauucagcgcccuggagccucugguggaccugcccaucggcaucaacaucaccagguuccagacccugcuggcccugcaccggagcuaccugacccccggcgacagcagcagcggcuggaccgccggcgccgccgcauacuacgugggcuaccugcagccacggaccuuccugcugaaguacaacgagaacggcaccaucaccgacgccguggacugcgcccuggacccccugagcgagaccaagugcacccuaaagagcuucaccguggagaagggcaucuaccagaccagcaacuuccgggugcagcccacugagagcaucgugcgguuccccaacauuaccaaccugugucccuucggcgagguguucaacgccacccgguucgccagcguguacgccuggaaccggaagcggaucagcaacugcguggccgacuacagcgugcuguacaacagcgccagcuucagcaccuucaagugcuacggcgugagcccuaccaagcugaacgaccugugcuucaccaacguguacgcugacagcuucgugauccggggcgacgaggugcggcagaucgcccccggccagaccggcaagaucgccgacuacaacuacaagcugcccgacgacuucaccggcugcgugaucgccuggaacagcaacaaccuggacagcaaggugggcggcaacuacaacuaccuguaccggcuguuccguaagagcaaccugaagccauucgagcgggacaucagcaccgagaucuaccaggccggcagcacccccugcaacgguguggagggcuuuaacugcuacuucccccugcagagcuacggcuuccagcccaccaacggcgugggcuaccagcccuaccgggugguggugcugagcuucgagcugcugcacgcccccgccaccgugugcggcccuaaaaagagcaccaaccuggugaagaacaagugcgugaacuucaauuucaacggccugaccggcaccggcgugcugaccgagagcaacaagaaguuccugcccuuccagcaguucggccgggauaucgccgacaccaccgacgcagugcgggacccccagacccuggagauccuggacaucaccccaugcagcuucggcggcgugagcgucaucacccccggcacaaacaccagcaaccagguggccgugcuguaccaggacgugaacugcaccgaggugcccguggccauccacgccgaccagcugacccccaccuggcggguguacagcaccggaagcaacguguuccagacccgggccggcugccugaucggcgccgagcacgugaacaacuccuacgagugcgacauccccaucggcgcuggcaucugcgccagcuaccagacccagaccaacagcccccggcgggcccggagcguggccagccagagcaucaucgccuacaccaugagcuuaggcgccgagaacagcguggccuacagcaacaacagcaucgcgaucccuaccaacuucaccaucagcgugaccaccgagauacugcccgugagcaugaccaagaccagcguggacuguaccauguacaucugcggcgacagcaccgagugcagcaaccugcugcugcaguacggcagcuucugcacccagcugaaccgggcccugaccggcaucgccguggagcaggacaagaacacccaagagguguucgcccaggugaagcagaucuacaagacucccccaaucaaggacuucggcggcuucaacuucagccagauccugcccgaccccagcaagcccagcaagcggagcuucaucgaggaccugcuguucaacaaggugacccuggccgacgccggcuucaucaagcaguacggcgauugccugggcgacaucgccgcucgggaccugaucugcgcccagaaguucaacgggcugaccgugcugcccccucugcugaccgacgagaugaucgcccaguacaccagcgcccugcuugccggcaccaucaccagcggcuggaccuucggcgccggcgcagcccugcagauccccuucgccaugcagauggccuaccgguucaacggcaucggcgugacccagaacgugcuguacgagaaccagaagcugaucgccaaccaguucaacagcgccaucggcaagauccaggacagccugagcagcaccgccagcgcccugggcaagcugcaggacguggugaaccagaacgcucaggcccugaacacccuggugaagcagcugagcagcaacuucggcgccaucagcucagugcugaaugacauccugagcaggcuggaucccccagaggccgaggugcagaucgaccggcugaucaccggccggcugcagagccugcagaccuacgugacccagcagcugauccgggccgccgagauccgggccagcgccaaccuggcagccaccaagaugagcgagugcgugcugggccagagcaagcggguggacuuuugcggcaagggcuaccaccugaugagcuucccccagagcgcuccccacggcgugguguuccuccacgugacauacguccccgcccaggagaagaacuucaccaccgcccccgccauuugccacgacggcaaggcccacuucccccgggagggcguguucgugagcaacggaacccacugguucgugacccagcggaacuucuacgagccucagaucaucaccaccgacaacaccuucgugagcggcaacugcgacguggugaucggcaucgugaacaacaccguguacgacccccugcagcccgagcuggacagcuucaaggaggagcuggacaaguacuucaagaaccacaccagcccagacguggaccugggcgacaucagcggcaucaacgccagcguggugaacauccagaaggagaucgaccggcugaacgagguggccaagaaccugaacgagagccugaucgaccugcaggagcugggcaaguacgagcaguacaucaaguggcccugguacaucuggcugggcuucaucgccggccugaucgccaucgugauggugaccaucaugcugugcugcaugaccagcugcuguagcugccugaagggcugcugcagcugcggcagcugcugcaaguucgacgaggacgacagcgagcccgugcugaagggcgugaagcugcacuacaccugaggacuagucccuguucccagagcccacuuuuuuuucuuuuuuugaaauaaaauagccugucuuucagaucucaaaggcucuuuucagagccaccaaaaaaaaaaaaaaaaaaaaaaaaaaaaaaaaaaaaaaaaaaaaaaaaaaaaaaaaaaaaaaaaaaaaaaaaaaaaaaaaaaaaaaaaaaaaaaaaaaaaa

SEQ ID NO: 23792 - RNA, 4191 nt, Artificial Sequence
  SARS-CoV-2/Wuhan/WIV05/2019__EPI_ISL_402128 spike protein mRNA gc (1-1273)(K986P_V987P_ D614G)
aggagagggcgcuuggcuugcaaggacccugagcugcggcauugaagcacacccaacccaacucgacugaagucagccucacugaaccggaucugagaaucuucucucucugggcuugccagggcucuccgaaccuagcuagcauccucuucaauuccaacuagaaagcuuaccauguucguguuccuggugcugcugccccuggugagcagccagugcgugaaccugaccacccggacccagcugcccccugccuacaccaacagcuucacccggggcguguacuaccccgacaagguguuccggagcagcgugcugcacagcacccaggaccuguuccugcccuucuucagcaacgugaccugguuccacgccauccacgugagcggcaccaacggcaccaagcgguucgacaacccagugcugcccuucaacgacggcguguacuucgccagcaccgagaagucaaacaucauccggggcuggaucuucggcaccacccuggacagcaagacacagagccugcugaucgugaacaacgccaccaacguggugaucaaggugugcgaguuucaguucugcaacgaccccuuccugggcguguacuaccacaagaacaacaagagcuggauggagagcgaguuccgggucuacagcagcgcuaacaauugcaccuucgaguacgugagccagcccuuccugauggaccucgagggcaagcagggcaacuucaagaaccugcgggaguucguguucaagaacaucgauggcuacuucaagaucuacagcaagcacacccccaucaaccuggugcgggaccugccccagggauucagcgcccuggagccucugguggaccugcccaucggcaucaacaucaccagguuccagacccugcuggcccugcaccggagcuaccugacccccggcgacagcagcagcggcuggaccgccggcgccgccgcauacuacgugggcuaccugcagccacggaccuuccugcugaaguacaacgagaacggcaccaucaccgacgccguggacugcgcccuggacccccugagcgagaccaagugcacccuaaagagcuucaccguggagaagggcaucuaccagaccagcaacuuccgggugcagcccacugagagcaucgugcgguuccccaacauuaccaaccugugucccuucggcgagguguucaacgccacccgguucgccagcguguacgccuggaaccggaagcggaucagcaacugcguggccgacuacagcgugcuguacaacagcgccagcuucagcaccuucaagugcuacggcgugagcccuaccaagcugaacgaccugugcuucaccaacguguacgcugacagcuucgugauccggggcgacgaggugcggcagaucgcccccggccagaccggcaagaucgccgacuacaacuacaagcugcccgacgacuucaccggcugcgugaucgccuggaacagcaacaaccuggacagcaaggugggcggcaacuacaacuaccuguaccggcuguuccguaagagcaaccugaagccauucgagcgggacaucagcaccgagaucuaccaggccggcagcacccccugcaacgguguggagggcuuuaacugcuacuucccccugcagagcuacggcuuccagcccaccaacggcgugggcuaccagcccuaccgggugguggugcugagcuucgagcugcugcacgcccccgccaccgugugcggcccuaaaaagagcaccaaccuggugaagaacaagugcgugaacuucaauuucaacggccugaccggcaccggcgugcugaccgagagcaacaagaaguuccugcccuuccagcaguucggccgggauaucgccgacaccaccgacgcagugcgggacccccagacccuggagauccuggacaucaccccaugcagcuucggcggcgugagcgucaucacccccggcacaaacaccagcaaccagguggccgugcuguaccagggagugaacugcaccgaggugcccguggccauccacgccgaccagcugacccccaccuggcggguguacagcaccggcagcaacguguuccagacccgggccggcugccugaucggcgccgagcacgugaacaacuccuacgagugcgacauccccaucggcgcuggcaucugcgccagcuaccagacccagaccaacagcccccggcgggcccggagcguggccagccagagcaucaucgccuacaccaugagcuuaggcgccgagaacagcguggccuacagcaacaacagcaucgcgaucccuaccaacuucaccaucagcgugaccaccgagauacugcccgugagcaugaccaagaccagcguggacuguaccauguacaucugcggcgacagcaccgagugcagcaaccugcugcugcaguacggcagcuucugcacccagcugaaccgggcccugaccggcaucgccguggagcaggacaagaacacccaagagguguucgcccaggugaagcagaucuacaagacucccccaaucaaggacuucggcggcuucaacuucagccagauccugcccgaccccagcaagcccagcaagcggagcuucaucgaggaccugcuguucaacaaggugacccuggccgacgccggcuucaucaagcaguacggcgacugccugggggauaucgccgcucgggaccugaucugcgcccagaaguucaacggccugaccgugcugcccccucugcugaccgacgagaugaucgcccaguacaccagcgcccugcuugccggcaccaucaccagcggcuggaccuucggcgccggcgcagcccugcagauccccuucgccaugcagauggccuaccgguucaacggcaucggcgugacccagaacgugcuguacgagaaccagaagcugaucgccaaccaguucaacagcgccaucggcaagauccaggacagccugagcagcaccgccagcgcccugggcaagcugcaggacguggugaaccagaacgcucaggcccugaacacccuggugaagcagcugagcagcaacuucggcgccaucagcucagugcugaaugacauccugagcaggcuggaucccccagaggccgaggugcagaucgaccggcugaucaccggccggcugcagagccugcagaccuacgugacccagcagcugauccgggccgccgagauccgggccagcgccaaccuggcagccaccaagaugagcgagugcgugcugggccagagcaagcggguggacuuuugcggcaagggcuaccaccugaugagcuucccccagagcgcuccccacggcgugguguuccuccacgugacauacguccccgcccaggagaagaacuucaccaccgcccccgccauuugccacgacggcaaggcccacuucccccgggagggaguguucgugagcaacggcacccacugguucgugacccagcggaacuucuacgagccucagaucaucaccaccgacaacaccuucgugagcggcaacugcgacguggugaucggcaucgugaacaacaccguguacgacccccugcagcccgagcuggacagcuucaaggaggagcuggacaaguacuucaagaaccacaccagcccagacguggaccugggcgacaucagcggcaucaacgccagcguggugaacauccagaaggagaucgaccggcugaacgagguggccaagaaccugaacgagagccugaucgaccugcaggagcugggcaaguacgagcaguacaucaaguggcccugguacaucuggcugggcuucaucgccggccugaucgccaucgugauggugaccaucaugcugugcugcaugaccagcugcuguagcugccugaagggcugcugcagcugcggcagcugcugcaaguucgacgaggacgacagcgagcccgugcugaagggcgugaagcugcacuacaccugaggacuagucccuguucccagagcccacuuuuuuuucuuuuuuugaaauaaaauagccugucuuucagaucucaaaggcucuuuucagagccaccaaaaaaaaaaaaaaaaaaaaaaaaaaaaaaaaaaaaaaaaaaaaaaaaaaaaaaaaaaaaaaaaaaaaaaaaaaaaaaaaaaaaaaaaaaaaaaaaaaaaa

SEQ ID NO: 23793 - RNA, 4191 nt, Artificial Sequence
  SARS-CoV-2/Wuhan/WIV05/2019__EPI_ISL_402128 spike protein mRNA gc (1-1273)(K986P_V987P_A222V_D614G)
aggagagggcgcuuggcuugcaaggacccugagcugcggcauugaagcacacccaacccaacucgacugaagucagccucacugaaccggaucugagaaucuucucucucugggcuugccagggcucuccgaaccuagcuagcauccucuucaauuccaacuagaaagcuuaccauguucguguuccuggugcugcugccccuggugagcagccagugcgugaaccugaccacccggacccagcugcccccugccuacaccaacagcuucacccggggcguguacuaccccgacaagguguuccggagcagcgugcugcacagcacccaggaccuguuccugcccuucuucagcaacgugaccugguuccacgccauccacgugagcggcaccaacggcaccaagcgguucgacaacccagugcugcccuucaacgacggcguguacuucgccagcaccgagaagucaaacaucauccggggcuggaucuucggcaccacccuggacagcaagacacagagccugcugaucgugaacaacgccaccaacguggugaucaaggugugcgaguuucaguucugcaacgaccccuuccugggcguguacuaccacaagaacaacaagagcuggauggagagcgaguuccgggucuacagcagcgcuaacaauugcaccuucgaguacgugagccagcccuuccugauggaccucgagggcaagcagggcaacuucaagaaccugcgggaguucguguucaagaacaucgauggcuacuucaagaucuacagcaagcacacccccaucaaccuggugcgggaccugccccagggauucagcgugcuggagccucugguggaccugcccaucggcaucaacaucaccagguuccagacccugcuggcccugcaccggagcuaccugacccccggcgacagcagcagcggcuggaccgccggcgccgccgccuacuacgugggcuaccugcagccacggaccuuccugcugaaguacaacgagaacggcaccaucaccgacgcaguggacugcgcccuggacccccugagcgagaccaagugcacccuaaagagcuucaccguggagaagggcaucuaccagaccagcaacuuccgggugcagcccacugagagcaucgugcgguuccccaacauuaccaaccugugucccuucggcgagguguucaacgccacccgguucgccagcguguacgccuggaaccggaagcggaucagcaacugcguggccgacuacagcgugcuguacaacagcgccagcuucagcaccuucaagugcuacggcgugagcccuaccaagcugaacgaccugugcuucaccaacguguacgccgacagcuucgugauccggggcgacgaggugcggcagaucgcucccggccagaccggcaagaucgccgacuacaacuacaagcugcccgacgacuucaccggcugcgugaucgccuggaacagcaacaaccuggacagcaaggugggcggcaacuacaacuaccuguaccggcuguuccguaagagcaaccugaagccauucgagcgggacaucagcaccgagaucuaccaggccggcagcacccccugcaacgguguggagggcuuuaacugcuacuucccccugcagagcuacggcuuccagcccaccaacggcgugggcuaccagcccuaccgggugguggugcugagcuucgagcugcugcacgcccccgccaccgugugcggcccuaaaaagagcaccaaccuggugaagaacaagugcgugaacuucaauuucaacggccugaccggcaccggcgugcugaccgagagcaacaagaaguuccugcccuuccagcaguucggccgggauaucgccgacaccaccgacgccgugcgggacccccagacccuggagauccuggacaucaccccaugcagcuucggcggcgucagcgugaucacccccggcacaaacaccagcaaccagguggcagugcuguaccagggagugaacugcaccgaggugcccguggccauccacgccgaccagcugacccccaccuggcggguguacagcaccggcagcaacguguuccagacccgggccggcugccugaucggcgccgagcacgugaacaacuccuacgagugcgacauccccaucggcgccggcaucugcgcuagcuaccagacccagaccaacagcccccggcgggcccggagcguggccagccagagcaucaucgccuacaccaugagcuuaggcgccgagaacagcguggccuacagcaacaacagcaucgccaucccuaccaacuucaccaucagcgugaccaccgagauacugcccgugagcaugaccaagaccagcguggacuguaccauguacaucugcggcgacagcaccgagugcagcaaccugcugcugcaguacggcagcuucugcacccagcugaaccgggcgcugaccggcaucgccguggagcaggacaagaacacccaagagguguucgcccaggugaagcagaucuacaagacucccccaaucaaggacuucggcggcuucaacuucagccagauccugcccgaccccagcaagcccagcaagcggagcuucaucgaggaccugcuguucaacaaggugacccuggccgacgccggcuucaucaagcaguacggcgacugccugggggauaucgccgcccgggaccugaucugcgcucagaaguucaacggccugaccgugcugcccccucugcugaccgacgagaugaucgcccaguacaccagcgcccugcuugccggcaccaucaccagcggcuggaccuucggcgccggcgccgcacugcagauccccuucgccaugcagauggccuaccgguucaacggcaucggcgugacccagaacgugcuguacgagaaccagaagcugaucgccaaccaguucaacagcgccaucggcaagauccaggacagccugagcagcaccgccagcgcccugggcaagcugcaggacguggugaaccagaacgcccaggcucugaacacccuggugaagcagcugagcagcaacuucggcgccaucagcucagugcugaaugacauccugagcaggcuggaucccccagaggccgaggugcagaucgaccggcugaucaccggccggcugcagagccugcagaccuacgugacccagcagcugauccgggccgccgagauccgggccagcgccaaccuggccgcaaccaagaugagcgagugcgugcugggccagagcaagcggguggacuuuugcggcaagggcuaccaccugaugagcuucccccagagcgcuccccacggcgugguguuccuccacgucacauacgugcccgcccaggagaagaacuucaccaccgcccccgccauuugccacgacggcaaggcccacuucccccgggagggaguguucgugagcaacggcacccacugguucgugacccagcggaacuucuacgagccucagaucaucaccaccgacaacaccuucgugagcggcaacugcgacguggugaucggcaucgugaacaacaccguguacgacccccugcagcccgagcuggacagcuucaaggaggagcuggacaaguacuucaagaaccacaccagcccagacguggaccugggcgacaucagcggcaucaacgccagcguggugaacauccagaaggagaucgaccggcugaacgagguggccaagaaccugaacgagagccugaucgaccugcaggagcugggcaaguacgagcaguacaucaaguggcccugguacaucuggcugggcuucaucgccggccugaucgccaucgugauggugaccaucaugcugugcugcaugaccagcugcuguagcugccugaagggcugcugcagcugcggcagcugcugcaaguucgacgaggacgacagcgagcccgugcugaagggcgugaagcugcacuacaccugaggacuagucccuguucccagagcccacuuuuuuuucuuuuuuugaaauaaaauagccugucuuucagaucucaaaggcucuuuucagagccaccaaaaaaaaaaaaaaaaaaaaaaaaaaaaaaaaaaaaaaaaaaaaaaaaaaaaaaaaaaaaaaaaaaaaaaaaaaaaaaaaaaaaaaaaaaaaaaaaaaaaa

SEQ ID NO: 23794 - RNA, 4191 nt, Artificial Sequence
  SARS-CoV-2/Wuhan/WIV05/2019__EPI_ISL_402128 spike protein mRNA gc (1-1273)(K986P_V987P_N439K_D614G)
aggagagggcgcuuggcuugcaaggacccugagcugcggcauugaagcacacccaacccaacucgacugaagucagccucacugaaccggaucugagaaucuucucucucugggcuugccagggcucuccgaaccuagcuagcauccucuucaauuccaacuagaaagcuuaccauguucguguuccuggugcugcugccccuggugagcagccagugcgugaaccugaccacccggacccagcugcccccugccuacaccaacagcuucacccggggcguguacuaccccgacaagguguuccggagcagcgugcugcacagcacccaggaccuguuccugcccuucuucagcaacgugaccugguuccacgccauccacgugagcggcaccaacggcaccaagcgguucgacaacccagugcugcccuucaacgacggcguguacuucgccagcaccgagaagucaaacaucauccggggcuggaucuucggcaccacccuggacagcaagacacagagccugcugaucgugaacaacgccaccaacguggugaucaaggugugcgaguuucaguucugcaacgaccccuuccugggcguguacuaccacaagaacaacaagagcuggauggagagcgaguuccgggucuacagcagcgcuaacaauugcaccuucgaguacgugagccagcccuuccugauggaccucgagggcaagcagggcaacuucaagaaccugcgggaguucguguucaagaacaucgauggcuacuucaagaucuacagcaagcacacccccaucaaccuggugcgggaccugccccagggauucagcgcccuggagccucugguggaccugcccaucggcaucaacaucaccagguuccagacccugcuggcccugcaccggagcuaccugacccccggcgacagcagcagcggcuggaccgccggcgccgccgcauacuacgugggcuaccugcagccacggaccuuccugcugaaguacaacgagaacggcaccaucaccgacgccguggacugcgcccuggacccccugagcgagaccaagugcacccuaaagagcuucaccguggagaagggcaucuaccagaccagcaacuuccgggugcagcccacugagagcaucgugcgguuccccaacauuaccaaccugugucccuucggcgagguguucaacgccacccgguucgccagcguguacgccuggaaccggaagcggaucagcaacugcguggccgacuacagcgugcuguacaacagcgccagcuucagcaccuucaagugcuacggcgugagcccuaccaagcugaacgaccugugcuucaccaacguguacgcugacagcuucgugauccggggcgacgaggugcggcagaucgcccccggccagaccggcaagaucgccgacuacaacuacaagcugcccgacgacuucaccggcugcgugaucgccuggaacagcaagaaccuggacagcaaggugggcggcaacuacaacuaccuguaccggcuguuccguaagagcaaccugaagccauucgagcgggacaucagcaccgagaucuaccaggccggcagcacccccugcaacgguguggagggcuuuaacugcuacuucccccugcagagcuacggcuuccagcccaccaacggcgugggcuaccagcccuaccgggugguggugcugagcuucgagcugcugcacgcccccgccaccgugugcggcccuaaaaagagcaccaaccuggugaagaacaagugcgugaacuucaacuucaauggccugaccggcaccggcgugcugaccgagagcaacaagaaguuccugcccuuccagcaguucggccgggauaucgccgacaccaccgacgcagugcgggacccccagacccuggagauccuggacaucaccccaugcagcuucggcggcgugagcgucaucacccccggcacaaacaccagcaaccagguggccgugcuguaccagggagugaacugcaccgaggugcccguggccauccacgccgaccagcugacccccaccuggcggguguacagcaccggcagcaacguguuccagacccgggccggcugccugaucggcgccgagcacgugaacaacuccuacgagugcgacauccccaucggcgcuggcaucugcgccagcuaccagacccagaccaacagcccccggcgggcccggagcguggccagccagagcaucaucgccuacaccaugagcuuaggcgccgagaacagcguggccuacagcaacaacagcaucgcgaucccuaccaacuucaccaucagcgugaccaccgagauacugcccgugagcaugaccaagaccagcguggacuguaccauguacaucugcggcgacagcaccgagugcagcaaccugcugcugcaguacggcagcuucugcacccagcugaaccgggcccugaccggcaucgccguggagcaggacaagaacacccaagagguguucgcccaggugaagcagaucuacaagacucccccaaucaaggacuucggcggcuucaacuucagccagauccugcccgaccccagcaagcccagcaagcggagcuucaucgaggaccugcuguucaacaaggugacccuggccgacgccggcuucaucaagcaguacggcgacugccugggggauaucgccgcucgggaccugaucugcgcccagaaguucaacggccugaccgugcugcccccucugcugaccgacgagaugaucgcccaguacaccagcgcccugcuugccggcaccaucaccagcggcuggaccuucggcgccggcgcagcccugcagauccccuucgccaugcagauggccuaccgguucaacggcaucggcgugacccagaacgugcuguacgagaaccagaagcugaucgccaaccaguucaacagcgccaucggcaagauccaggacagccugagcagcaccgccagcgcccugggcaagcugcaggacguggugaaccagaacgcucaggcccugaacacccuggugaagcagcugagcagcaacuucggcgccaucagcucagugcugaacgacauccugagcaggcuggaucccccagaggccgaggugcagaucgaccggcugaucaccggccggcugcagagccugcagaccuacgugacccagcagcugauccgggccgccgagauccgggccagcgccaaucuggcagccaccaagaugagcgagugcgugcugggccagagcaagcggguggacuuuugcggcaagggcuaccaccugaugagcuucccccagagcgcuccccacggcgugguguuccuccacgugacauacguccccgcccaggagaagaacuucaccaccgcccccgccauuugccacgacggcaaggcccacuucccccgggagggaguguucgugagcaacggcacccacugguucgugacccagcggaacuucuacgagccucagaucaucaccaccgacaacaccuucgugagcggcaacugcgacguggugaucggcaucgugaacaacaccguguacgacccccugcagcccgagcuggacagcuucaaggaggagcuggacaaguacuucaagaaccacaccagcccagacguggaccugggcgacaucagcggcaucaacgccagcguggugaacauccagaaggagaucgaccggcugaacgagguggccaagaaccugaacgagagccugaucgaccugcaggagcugggcaaguacgagcaguacaucaaguggcccugguacaucuggcugggcuucaucgccggccugaucgccaucgugauggugaccaucaugcugugcugcaugaccagcugcuguagcugccugaagggcugcugcagcugcggcagcugcugcaaguucgacgaggacgacagcgagcccgugcugaagggcgugaagcugcacuacaccugaggacuagucccuguucccagagcccacuuuuuuuucuuuuuuugaaauaaaauagccugucuuucagaucucaaaggcucuuuucagagccaccaaaaaaaaaaaaaaaaaaaaaaaaaaaaaaaaaaaaaaaaaaaaaaaaaaaaaaaaaaaaaaaaaaaaaaaaaaaaaaaaaaaaaaaaaaaaaaaaaaaaa

SEQ ID NO: 23795 - RNA, 4191 nt, Artificial Sequence
  SARS-CoV-2/Wuhan/WIV05/2019__EPI_ISL_402128 spike protein mRNA gc (1-1273)(K986P_V987P_S477N_D614G)
aggagagggcgcuuggcuugcaaggacccugagcugcggcauugaagcacacccaacccaacucgacugaagucagccucacugaaccggaucugagaaucuucucucucugggcuugccagggcucuccgaaccuagcuagcauccucuucaauuccaacuagaaagcuuaccauguucguguuccuggugcugcugccccuggugagcagccagugcgugaaccugaccacccggacccagcugcccccugccuacaccaacagcuucacccggggcguguacuaccccgacaagguguuccggagcagcgugcugcacagcacccaggaccuguuccugcccuucuucagcaacgugaccugguuccacgccauccacgugagcggcaccaacggcaccaagcgguucgacaacccagugcugcccuucaacgacggcguguacuucgccagcaccgagaagucaaacaucauccggggcuggaucuucggcaccacccuggacagcaagacacagagccugcugaucgugaacaacgccaccaacguggugaucaaggugugcgaguuucaguucugcaacgaccccuuccugggcguguacuaccacaagaacaacaagagcuggauggagagcgaguuccgggucuacagcagcgcuaacaauugcaccuucgaguacgugagccagcccuuccugauggaccucgagggcaagcagggcaacuucaagaaccugcgggaguucguguucaagaacaucgauggcuacuucaagaucuacagcaagcacacccccaucaaccuggugcgggaccugccccagggauucagcgcccuggagccucugguggaccugcccaucggcaucaacaucaccagguuccagacccugcuggcccugcaccggagcuaccugacccccggcgacagcagcagcggcuggaccgccggcgccgccgcauacuacgugggcuaccugcagccacggaccuuccugcugaaguacaacgagaacggcaccaucaccgacgccguggacugcgcccuggacccccugagcgagaccaagugcacccuaaagagcuucaccguggagaagggcaucuaccagaccagcaacuuccgggugcagcccacugagagcaucgugcgguuccccaacauuaccaaccugugucccuucggcgagguguucaacgccacccgguucgccagcguguacgccuggaaccggaagcggaucagcaacugcguggccgacuacagcgugcuguacaacagcgccagcuucagcaccuucaagugcuacggcgugagcccuaccaagcugaacgaccugugcuucaccaacguguacgcugacagcuucgugauccggggcgacgaggugcggcagaucgcccccggccagaccggcaagaucgccgacuacaacuacaagcugcccgacgacuucaccggcugcgugaucgccuggaacagcaacaaccuggacagcaaggugggcggcaacuacaacuaccuguaccggcuguuccguaagagcaaccugaagccauucgagcgggacaucagcaccgagaucuaccaggccggcaacacccccugcaacgguguggagggcuuuaacugcuacuucccccugcagagcuacggcuuccagcccaccaacggcgugggcuaccagcccuaccgggugguggugcugagcuucgagcugcugcacgcccccgccaccgugugcggcccuaaaaagagcaccaaccuggugaagaacaagugcgugaauuucaacuucaacggccugaccggcaccggcgugcugaccgagagcaacaagaaguuccugcccuuccagcaguucggccgggauaucgccgacaccaccgacgcagugcgggacccccagacccuggagauccuggacaucaccccaugcagcuucggcggcgugagcgucaucacccccggcacaaacaccagcaaccagguggccgugcuguaccagggagugaacugcaccgaggugcccguggccauccacgccgaccagcugacccccaccuggcggguguacagcaccggcagcaacguguuccagacccgggccggcugccugaucggcgccgagcacgugaacaacagcuacgagugcgacauccccaucggcgcuggcaucugcgccuccuaccagacccagaccaacagcccccggcgggcccggagcguggccagccagagcaucaucgccuacaccaugagcuuaggcgccgagaacagcguggccuacagcaacaacagcaucgcgaucccuaccaacuucaccaucagcgugaccaccgagauacugcccgugagcaugaccaagaccagcguggacuguaccauguacaucugcggcgacagcaccgagugcagcaaccugcugcugcaguacggcagcuucugcacccagcugaaccgggcccugaccggcaucgccguggagcaggacaagaacacccaagagguguucgcccaggugaagcagaucuacaagacucccccaaucaaggacuucggcggcuucaacuucagccagauccugcccgaccccagcaagcccagcaagcggagcuucaucgaggaccugcuguucaacaaggugacccuggccgacgccggcuucaucaagcaguacggcgacugccugggggauaucgccgcucgggaccugaucugcgcccagaaguucaacggccugaccgugcugcccccucugcugaccgacgagaugaucgcccaguacaccagcgcccugcuugccggcaccaucaccagcggcuggaccuucggcgccggcgcagcccugcagauccccuucgccaugcagauggccuaccgguucaacggcaucggcgugacccagaacgugcuguacgagaaccagaagcugaucgccaaccaguucaacagcgccaucggcaagauccaggacagccugagcagcaccgccagcgcccugggcaagcugcaggacguggugaaccagaacgcucaggcccugaacacccuggugaagcagcugagcagcaauuucggcgccaucagcagcgugcugaacgacauccugucaaggcuggaucccccagaggccgaggugcagaucgaccggcugaucaccggccggcugcagagccugcagaccuacgugacccagcagcugauccgggccgccgagauccgggccagcgccaaccuggcagccaccaagaugagcgagugcgugcugggccagagcaagcggguggacuuuugcggcaagggcuaccaccugaugagcuucccccagagcgcuccccacggcgugguguuccuccacgugacauacguccccgcccaggagaagaacuucaccaccgcccccgccauuugccacgacggcaaggcccacuucccccgggagggaguguucgugagcaacggcacccacugguucgugacccagcggaacuucuacgagccucagaucaucaccaccgacaacaccuucgugagcggcaacugcgacguggugaucggcaucgugaacaacaccguguacgacccccugcagcccgagcuggacagcuucaaggaggagcuggacaaguacuucaagaaccacaccagcccagacguggaccugggcgacaucagcggcaucaacgccagcguggugaacauccagaaggagaucgaccggcugaacgagguggccaagaaccugaacgagagccugaucgaccugcaggagcugggcaaguacgagcaguacaucaaguggcccugguacaucuggcugggcuucaucgccggccugaucgccaucgugauggugaccaucaugcugugcugcaugaccagcugcuguagcugccugaagggcugcugcagcugcggcagcugcugcaaguucgacgaggacgacagcgagcccgugcugaagggcgugaagcugcacuacaccugaggacuagucccuguucccagagcccacuuuuuuuucuuuuuuugaaauaaaauagccugucuuucagaucucaaaggcucuuuucagagccaccaaaaaaaaaaaaaaaaaaaaaaaaaaaaaaaaaaaaaaaaaaaaaaaaaaaaaaaaaaaaaaaaaaaaaaaaaaaaaaaaaaaaaaaaaaaaaaaaaaaaa

SEQ ID NO: 23796 - RNA, 4191 nt, Artificial Sequence
  SARS-CoV-2/Wuhan/WIV05/2019__EPI_ISL_402128 spike protein mRNA gc (1-1273)(K986P_V987P_N501Y_D614G)
aggagagggcgcuuggcuugcaaggacccugagcugcggcauugaagcacacccaacccaacucgacugaagucagccucacugaaccggaucugagaaucuucucucucugggcuugccagggcucuccgaaccuagcuagcauccucuucaauuccaacuagaaagcuuaccauguucguguuccuggugcugcugccccuggugagcagccagugcgugaaccugaccacccggacccagcugcccccugccuacaccaacagcuucacccggggcguguacuaccccgacaagguguuccggagcagcgugcugcacagcacccaggaccuguuccugcccuucuucagcaacgugaccugguuccacgccauccacgugagcggcaccaacggcaccaagcgguucgacaacccagugcugcccuucaacgacggcguguacuucgccagcaccgagaagucaaacaucauccggggcuggaucuucggcaccacccuggacagcaagacacagagccugcugaucgugaacaacgccaccaacguggugaucaaggugugcgaguuucaguucugcaacgaccccuuccugggcguguacuaccacaagaacaacaagagcuggauggagagcgaguuccgggucuacagcagcgcuaacaauugcaccuucgaguacgugagccagcccuuccugauggaccucgagggcaagcagggcaacuucaagaaccugcgggaguucguguucaagaacaucgauggcuacuucaagaucuacagcaagcacacccccaucaaccuggugcgggaccugccccagggauucagcgcccuggagccucugguggaccugcccaucggcaucaacaucaccagguuccagacccugcuggcccugcaccggagcuaccugacccccggcgacagcagcagcggcuggaccgccggcgccgccgcauacuacgugggcuaccugcagccacggaccuuccugcugaaguacaacgagaacggcaccaucaccgacgccguggacugcgcccuggacccccugagcgagaccaagugcacccuaaagagcuucaccguggagaagggcaucuaccagaccagcaacuuccgggugcagcccacugagagcaucgugcgguuccccaacauuaccaaccugugucccuucggcgagguguucaacgccacccgguucgccagcguguacgccuggaaccggaagcggaucagcaacugcguggccgacuacagcgugcuguacaacagcgccagcuucagcaccuucaagugcuacggcgugagcccuaccaagcugaacgaccugugcuucaccaacguguacgcugacagcuucgugauccggggcgacgaggugcggcagaucgcccccggccagaccggcaagaucgccgacuacaacuacaagcugcccgacgacuucaccggcugcgugaucgccuggaacagcaacaaccuggacagcaaggugggcggcaacuacaacuaccuguaccggcuguuccguaagagcaaccugaagccauucgagcgggacaucagcaccgagaucuaccaggccggcagcacccccugcaacgguguggagggcuuuaacugcuacuucccccugcagagcuacggcuuccagcccaccuacggcgugggcuaccagcccuaccgggugguggugcugagcuucgagcugcugcacgcccccgccaccgugugcggcccuaaaaagagcaccaaccuggugaagaacaagugcgugaacuucaacuucaauggccugaccggcaccggcgugcugaccgagagcaacaagaaguuccugcccuuccagcaguucggccgggauaucgccgacaccaccgacgcagugcgggacccccagacccuggagauccuggacaucaccccaugcagcuucggcggcgugagcgucaucacccccggcacaaacaccagcaaccagguggccgugcuguaccagggagugaacugcaccgaggugcccguggccauccacgccgaccagcugacccccaccuggcggguguacagcaccggcagcaacguguuccagacccgggccggcugccugaucggcgccgagcacgugaacaacuccuacgagugcgacauccccaucggcgcuggcaucugcgccagcuaccagacccagaccaacagcccccggcgggcccggagcguggccagccagagcaucaucgccuacaccaugagcuuaggcgccgagaacagcguggccuacagcaacaacagcaucgcgaucccuaccaacuucaccaucagcgugaccaccgagauacugcccgugagcaugaccaagaccagcguggacuguaccauguacaucugcggcgacagcaccgagugcagcaaccugcugcugcaguacggcagcuucugcacccagcugaaccgggcccugaccggcaucgccguggagcaggacaagaacacccaagagguguucgcccaggugaagcagaucuacaagacucccccaaucaaggacuucggcggcuucaacuucagccagauccugcccgaccccagcaagcccagcaagcggagcuucaucgaggaccugcuguucaacaaggugacccuggccgacgccggcuucaucaagcaguacggcgacugccugggggauaucgccgcucgggaccugaucugcgcccagaaguucaacggccugaccgugcugcccccucugcugaccgacgagaugaucgcccaguacaccagcgcccugcuugccggcaccaucaccagcggcuggaccuucggcgccggcgcagcccugcagauccccuucgccaugcagauggccuaccgguucaacggcaucggcgugacccagaacgugcuguacgagaaccagaagcugaucgccaaccaguucaacagcgccaucggcaagauccaggacagccugagcagcaccgccagcgcccugggcaagcugcaggacguggugaaccagaacgcucaggcccugaacacccuggugaagcagcugagcagcaacuucggcgccaucagcucagugcugaacgacauccugagcaggcuggaucccccagaggccgaggugcagaucgaccggcugaucaccggccggcugcagagccugcagaccuacgugacccagcagcugauccgggccgccgagauccgggccagcgccaaucuggcagccaccaagaugagcgagugcgugcugggccagagcaagcggguggacuuuugcggcaagggcuaccaccugaugagcuucccccagagcgcuccccacggcgugguguuccuccacgugacauacguccccgcccaggagaagaacuucaccaccgcccccgccauuugccacgacggcaaggcccacuucccccgggagggaguguucgugagcaacggcacccacugguucgugacccagcggaacuucuacgagccucagaucaucaccaccgacaacaccuucgugagcggcaacugcgacguggugaucggcaucgugaacaacaccguguacgacccccugcagcccgagcuggacagcuucaaggaggagcuggacaaguacuucaagaaccacaccagcccagacguggaccugggcgacaucagcggcaucaacgccagcguggugaacauccagaaggagaucgaccggcugaacgagguggccaagaaccugaacgagagccugaucgaccugcaggagcugggcaaguacgagcaguacaucaaguggcccugguacaucuggcugggcuucaucgccggccugaucgccaucgugauggugaccaucaugcugugcugcaugaccagcugcuguagcugccugaagggcugcugcagcugcggcagcugcugcaaguucgacgaggacgacagcgagcccgugcugaagggcgugaagcugcacuacaccugaggacuagucccuguucccagagcccacuuuuuuuucuuuuuuugaaauaaaauagccugucuuucagaucucaaaggcucuuuucagagccaccaaaaaaaaaaaaaaaaaaaaaaaaaaaaaaaaaaaaaaaaaaaaaaaaaaaaaaaaaaaaaaaaaaaaaaaaaaaaaaaaaaaaaaaaaaaaaaaaaaaaa

SEQ ID NO: 23797 - RNA, 4185 nt, Artificial Sequence
  SARS-CoV-2/Wuhan/WIV05/2019__EPI_ISL_402128 spike protein mRNA gc (1-1273)(K986P_V987P_H69del_V70del_D614G)
aggagagggcgcuuggcuugcaaggacccugagcugcggcauugaagcacacccaacccaacucgacugaagucagccucacugaaccggaucugagaaucuucucucucugggcuugccagggcucuccgaaccuagcuagcauccucuucaauuccaacuagaaagcuuaccauguucguguuccuggugcugcugccccuggugagcagccagugcgugaaccugaccacccggacccagcugcccccugccuacaccaacagcuucacccggggcguguacuaccccgacaagguguuccggagcagcgugcugcacagcacccaggaccuguuccugcccuucuucagcaacgugaccugguuccacgccaucagcggcaccaacggcaccaagcgguucgacaacccagugcugcccuucaacgacggcguguacuucgccagcaccgagaagucaaacaucauccggggcuggaucuucggcaccacccuggacagcaagacacagagccugcugaucgugaacaacgccaccaacguggugaucaaggugugcgaguuucaguucugcaacgaccccuuccugggcguguacuaccacaagaacaacaagagcuggauggagagcgaguuccggguguacagcagcgcuaacaauugcaccuucgaguacgucagccagcccuuccugauggaccucgagggcaagcagggcaacuucaagaaccugcgggaguucguguucaagaacaucgauggcuacuucaagaucuacagcaagcacacccccaucaaccuggugcgggaccugccccagggauucagcgcccuggagccucugguggaccugcccaucggcaucaacaucaccagguuccagacccugcuggcccugcaccggagcuaccugacccccggcgacagcagcagcggcuggaccgccggcgccgccgcauacuacgugggcuaccugcagccacggaccuuccugcugaaguacaacgagaacggcaccaucaccgacgccguggacugcgcccuggacccccugagcgagaccaagugcacccuaaagagcuucaccguggagaagggcaucuaccagaccagcaacuuccgggugcagcccacugagagcaucgugcgguuccccaacauuaccaaccugugucccuucggcgagguguucaacgccacccgguucgccagcguguacgccuggaaccggaagcggaucagcaacugcguggccgacuacagcgugcuguacaacagcgccagcuucagcaccuucaagugcuacggcgugagcccuaccaagcugaacgaccugugcuucaccaacguguacgcugacagcuucgugauccggggcgacgaggugcggcagaucgcccccggccagaccggcaagaucgccgacuacaacuacaagcugcccgacgacuucaccggcugcgugaucgccuggaacagcaacaaccuggacagcaaggugggcggcaacuacaacuaccuguaccggcuguuccguaagagcaaccugaagccauucgagcgggacaucagcaccgagaucuaccaggccggcagcacccccugcaacgguguggagggcuuuaacugcuacuucccccugcagagcuacggcuuccagcccaccaacggcgugggcuaccagcccuaccgggugguggugcugagcuucgagcugcugcacgcccccgccaccgugugcggcccuaaaaagagcaccaaccuggugaagaacaagugcgugaacuucaauuucaacggccugaccggcaccggcgugcugaccgagagcaacaagaaguuccugcccuuccagcaguucggccgggauaucgccgacaccaccgacgcagugcgggacccccagacccuggagauccuggacaucaccccaugcagcuucggcggcgugagcgugaucacccccggcacaaacaccagcaaccaggucgccgugcuguaccagggagugaacugcaccgaggugcccguggccauccacgccgaccagcugacccccaccuggcggguguacagcaccggcagcaacguguuccagacccgggccggcugccugaucggcgccgagcacgugaacaacuccuacgagugcgacauccccaucggcgcuggcaucugcgccagcuaccagacccagaccaacagcccccggcgggcccggagcguggccagccagagcaucaucgccuacaccaugagcuuaggcgccgagaacagcguggccuacagcaacaacagcaucgcgaucccuaccaacuucaccaucagcgugaccaccgagauacugcccgugagcaugaccaagaccagcguggacuguaccauguacaucugcggcgacagcaccgagugcagcaaccugcugcugcaguacggcagcuucugcacccagcugaaccgggcccugaccggcaucgccguggagcaggacaagaacacccaagagguguucgcccaggugaagcagaucuacaagacucccccaaucaaggacuucggcggcuucaacuucagccagauccugcccgaccccagcaagcccagcaagcggagcuucaucgaggaccugcuguucaacaaggugacccuggccgacgccggcuucaucaagcaguacggcgacugccugggggauaucgccgcucgggaccugaucugcgcccagaaguucaacggccugaccgugcugcccccucugcugaccgacgagaugaucgcccaguacaccagcgcccugcuugccggcaccaucaccagcggcuggaccuucggcgccggcgcagcccugcagauccccuucgccaugcagauggccuaccgguucaacggcaucggcgugacccagaacgugcuguacgagaaccagaagcugaucgccaaccaguucaacagcgccaucggcaagauccaggacagccugagcagcaccgccagcgcccugggcaagcugcaggacguggugaaccagaacgcucaggcccugaacacccuggugaagcagcugagcagcaacuucggcgccaucagcucagugcugaaugacauccugagcaggcuggaucccccagaggccgaggugcagaucgaccggcugaucaccggccggcugcagagccugcagaccuacgugacccagcagcugauccgggccgccgagauccgggccagcgccaaccuggcagccaccaagaugagcgagugcgugcugggccagagcaagcggguggacuuuugcggcaagggcuaccaccugaugagcuucccccagagcgcuccccacggcgugguguuccuccacgugacauacgugcccgcccaggagaagaacuucaccaccgcccccgccauuugccacgacggcaaggcccacuucccccgggagggagucuucgugagcaacggcacccacugguucgugacccagcggaacuucuacgagccucagaucaucaccaccgacaacaccuucgugagcggcaacugcgacguggugaucggcaucgugaacaacaccguguacgacccccugcagcccgagcuggacagcuucaaggaggagcuggacaaguacuucaagaaccacaccagcccagacguggaccugggcgacaucagcggcaucaacgccagcguggugaacauccagaaggagaucgaccggcugaacgagguggccaagaaccugaacgagagccugaucgaccugcaggagcugggcaaguacgagcaguacaucaaguggcccugguacaucuggcugggcuucaucgccggccugaucgccaucgugauggugaccaucaugcugugcugcaugaccagcugcuguagcugccugaagggcugcugcagcugcggcagcugcugcaaguucgacgaggacgacagcgagcccgugcugaagggcgugaagcugcacuacaccugaggacuagucccuguucccagagcccacuuuuuuuucuuuuuuugaaauaaaauagccugucuuucagaucucaaaggcucuuuucagagccaccaaaaaaaaaaaaaaaaaaaaaaaaaaaaaaaaaaaaaaaaaaaaaaaaaaaaaaaaaaaaaaaaaaaaaaaaaaaaaaaaaaaaaaaaaaaaaaaaaaaaa

SEQ ID NO: 23798 - RNA, 4191 nt, Artificial Sequence
  SARS-CoV-2/Wuhan/WIV05/2019__EPI_ISL_402128 spike protein mRNA gc (1-1273)(K986P_V987P_Y453F_D614G)
aggagagggcgcuuggcuugcaaggacccugagcugcggcauugaagcacacccaacccaacucgacugaagucagccucacugaaccggaucugagaaucuucucucucugggcuugccagggcucuccgaaccuagcuagcauccucuucaauuccaacuagaaagcuuaccauguucguguuccuggugcugcugccccuggugagcagccagugcgugaaccugaccacccggacccagcugcccccugccuacaccaacagcuucacccggggcguguacuaccccgacaagguguuccggagcagcgugcugcacagcacccaggaccuguuccugcccuucuucagcaacgugaccugguuccacgccauccacgugagcggcaccaacggcaccaagcgguucgacaacccagugcugcccuucaacgacggcguguacuucgccagcaccgagaagucaaacaucauccggggcuggaucuucggcaccacccuggacagcaagacacagagccugcugaucgugaacaacgccaccaacguggugaucaaggugugcgaguuucaguucugcaacgaccccuuccugggcguguacuaccacaagaacaacaagagcuggauggagagcgaguuccgggucuacagcagcgcuaacaauugcaccuucgaguacgugagccagcccuuccugauggaccucgagggcaagcagggcaacuucaagaaccugcgggaguucguguucaagaacaucgauggcuacuucaagaucuacagcaagcacacccccaucaaccuggugcgggaccugccccagggauucagcgcccuggagccucugguggaccugcccaucggcaucaacaucaccagguuccagacccugcuggcccugcaccggagcuaccugacccccggcgacagcagcagcggcuggaccgccggcgccgccgcauacuacgugggcuaccugcagccacggaccuuccugcugaaguacaacgagaacggcaccaucaccgacgccguggacugcgcccuggacccccugagcgagaccaagugcacccuaaagagcuucaccguggagaagggcaucuaccagaccagcaacuuccgggugcagcccacugagagcaucgugcgguuccccaacauuaccaaccugugucccuucggcgagguguucaacgccacccgguucgccagcguguacgccuggaaccggaagcggaucagcaacugcguggccgacuacagcgugcuguacaacagcgccagcuucagcaccuucaagugcuacggcgugagcccuaccaagcugaacgaccugugcuucaccaacguguacgcugacagcuucgugauccggggcgacgaggugcggcagaucgcccccggccagaccggcaagaucgccgacuacaacuacaagcugcccgacgacuucaccggcugcgugaucgccuggaacagcaacaaccuggacagcaaggugggcggcaacuacaacuaccuguuccggcuguuccguaagagcaaccugaagccauuugagcgggacaucagcaccgagaucuaccaggccggcagcacccccugcaacgguguggagggcuucaacugcuacuucccccugcagagcuacggcuuccagcccaccaacggcgugggcuaccagcccuaccgggugguggugcugagcuucgagcugcugcacgcccccgccaccgugugcggcccuaaaaagagcaccaaccuggugaagaacaagugcgugaacuucaauuucaacggccugaccggcaccggcgugcugaccgagagcaacaagaaguuccugcccuuccagcaguucggccgggauaucgccgacaccaccgacgcagugcgggacccccagacccuggagauccuggacaucaccccaugcagcuucggcggcgugagcgucaucacccccggcacaaacaccagcaaccagguggccgugcuguaccagggagugaacugcaccgaggugcccguggccauccacgccgaccagcugacccccaccuggcggguguacagcaccggcagcaacguguuccagacccgggccggcugccugaucggcgccgagcacgugaacaacuccuacgagugcgacauccccaucggcgcuggcaucugcgccagcuaccagacccagaccaacagcccccggcgggcccggagcguggccagccagagcaucaucgccuacaccaugagcuuaggcgccgagaacagcguggccuacagcaacaacagcaucgcgaucccuaccaacuucaccaucagcgugaccaccgagauacugcccgugagcaugaccaagaccagcguggacuguaccauguacaucugcggcgacagcaccgagugcagcaaccugcugcugcaguacggcagcuucugcacccagcugaaccgggcccugaccggcaucgccguggagcaggacaagaacacccaagagguguucgcccaggugaagcagaucuacaagacucccccaaucaaggacuucggcggcuucaacuucagccagauccugcccgaccccagcaagcccagcaagcggagcuucaucgaggaccugcuguucaacaaggugacccuggccgacgccggcuucaucaagcaguacggcgacugccugggggauaucgccgcucgggaccugaucugcgcccagaaguucaacggccugaccgugcugcccccucugcugaccgacgagaugaucgcccaguacaccagcgcccugcuugccggcaccaucaccagcggcuggaccuucggcgccggcgcagcccugcagauccccuucgccaugcagauggccuaccgguucaacggcaucggcgugacccagaacgugcuguacgagaaccagaagcugaucgccaaccaguucaacagcgccaucggcaagauccaggacagccugagcagcaccgccagcgcccugggcaagcugcaggacguggugaaccagaacgcucaggcccugaacacccuggugaagcagcugagcagcaacuuuggcgccaucagcucagugcugaaugacauccugagcaggcuggaucccccagaggccgaggugcagaucgaccggcugaucaccggccggcugcagagccugcagaccuacgugacccagcagcugauccgggccgccgagauccgggccagcgccaaccuggcagccaccaagaugagcgagugcgugcugggccagagcaagcggguggacuucugcggcaagggcuaccaccugaugagcuucccccagagcgcuccccacggcgugguguuccuccacgugacauacguccccgcccaggagaagaacuucaccaccgcccccgccauuugccacgacggcaaggcccacuucccccgggagggaguguucgugagcaacggcacccacugguucgugacccagcggaacuucuacgagccucagaucaucaccaccgacaacaccuucgugagcggcaacugcgacguggugaucggcaucgugaacaacaccguguacgacccccugcagcccgagcuggacagcuucaaggaggagcuggacaaguacuucaagaaccacaccagcccagacguggaccugggcgacaucagcggcaucaacgccagcguggugaacauccagaaggagaucgaccggcugaacgagguggccaagaaccugaacgagagccugaucgaccugcaggagcugggcaaguacgagcaguacaucaaguggcccugguacaucuggcugggcuucaucgccggccugaucgccaucgugauggugaccaucaugcugugcugcaugaccagcugcuguagcugccugaagggcugcugcagcugcggcagcugcugcaaguucgacgaggacgacagcgagcccgugcugaagggcgugaagcugcacuacaccugaggacuagucccuguucccagagcccacuuuuuuuucuuuuuuugaaauaaaauagccugucuuucagaucucaaaggcucuuuucagagccaccaaaaaaaaaaaaaaaaaaaaaaaaaaaaaaaaaaaaaaaaaaaaaaaaaaaaaaaaaaaaaaaaaaaaaaaaaaaaaaaaaaaaaaaaaaaaaaaaaaaaa

SEQ ID NO: 23799 - RNA, 4191 nt, Artificial Sequence
  SARS-CoV-2/Wuhan/WIV05/2019__EPI_ISL_402128 spike protein mRNA gc (1-1273)(K986P_V987P_D614G_I692V)
aggagagggcgcuuggcuugcaaggacccugagcugcggcauugaagcacacccaacccaacucgacugaagucagccucacugaaccggaucugagaaucuucucucucugggcuugccagggcucuccgaaccuagcuagcauccucuucaauuccaacuagaaagcuuaccauguucguguuccuggugcugcugccccuggugagcagccagugcgugaaccugaccacccggacccagcugcccccugccuacaccaacagcuucacccggggcguguacuaccccgacaagguguuccggagcagcgugcugcacagcacccaggaccuguuccugcccuucuucagcaacgugaccugguuccacgccauccacgugagcggcaccaacggcaccaagcgguucgacaacccagugcugcccuucaacgacggcguguacuucgccagcaccgagaagucaaacaucauccggggcuggaucuucggcaccacccuggacagcaagacacagagccugcugaucgugaacaacgccaccaacguggugaucaaggugugcgaguuucaguucugcaacgaccccuuccugggcguguacuaccacaagaacaacaagagcuggauggagagcgaguuccgggucuacagcagcgcuaacaauugcaccuucgaguacgugagccagcccuuccugauggaccucgagggcaagcagggcaacuucaagaaccugcgggaguucguguucaagaacaucgauggcuacuucaagaucuacagcaagcacacccccaucaaccuggugcgggaccugccccagggauucagcgcccuggagccucugguggaccugcccaucggcaucaacaucaccagguuccagacccugcuggcccugcaccggagcuaccugacccccggcgacagcagcagcggcuggaccgccggcgccgccgcauacuacgugggcuaccugcagccacggaccuuccugcugaaguacaacgagaacggcaccaucaccgacgccguggacugcgcccuggacccccugagcgagaccaagugcacccuaaagagcuucaccguggagaagggcaucuaccagaccagcaacuuccgggugcagcccacugagagcaucgugcgguuccccaacauuaccaaccugugucccuucggcgagguguucaacgccacccgguucgccagcguguacgccuggaaccggaagcggaucagcaacugcguggccgacuacagcgugcuguacaacagcgccagcuucagcaccuucaagugcuacggcgugagcccuaccaagcugaacgaccugugcuucaccaacguguacgcugacagcuucgugauccggggcgacgaggugcggcagaucgcccccggccagaccggcaagaucgccgacuacaacuacaagcugcccgacgacuucaccggcugcgugaucgccuggaacagcaacaaccuggacagcaaggugggcggcaacuacaacuaccuguaccggcuguuccguaagagcaaccugaagccauucgagcgggacaucagcaccgagaucuaccaggccggcagcacccccugcaacgguguggagggcuuuaacugcuacuucccccugcagagcuacggcuuccagcccaccaacggcgugggcuaccagcccuaccgggugguggugcugagcuucgagcugcugcacgcccccgccaccgugugcggcccuaaaaagagcaccaaccuggugaagaacaagugcgugaacuucaauuucaacggccugaccggcaccggcgugcugaccgagagcaacaagaaguuccugcccuuccagcaguucggccgggauaucgccgacaccaccgacgcagugcgggacccccagacccuggagauccuggacaucaccccaugcagcuucggcggcgugagcgucaucacccccggcacaaacaccagcaaccagguggccgugcuguaccagggagugaacugcaccgaggugcccguggccauccacgccgaccagcugacccccaccuggcggguguacagcaccggcagcaacguguuccagacccgggccggcugccugaucggcgccgagcacgugaacaacuccuacgagugcgacauccccaucggcgcuggcaucugcgccagcuaccagacccagaccaacagcccccggcgggcccggagcguggccagccagagcgugaucgccuacaccaugagcuuaggcgccgagaacagcguggccuacagcaacaacagcaucgcgaucccuaccaacuucaccaucagcgugaccaccgagauccugcccgugagcaugaccaagaccagcguggacuguaccauguacauaugcggcgacagcaccgagugcagcaaccugcugcugcaguacggcagcuucugcacccagcugaaccgggcccugaccggcaucgccguggagcaggacaagaacacccaagagguguucgcccaggugaagcagaucuacaagacucccccaaucaaggacuucggcggcuucaacuucagccagauccugcccgaccccagcaagcccagcaagcggagcuucaucgaggaccugcuguucaacaaggugacccuggccgacgccggcuucaucaagcaguacggcgacugccugggggauaucgccgcucgggaccugaucugcgcccagaaguucaacggccugaccgugcugcccccucugcugaccgacgagaugaucgcccaguacaccagcgcccugcuugccggcaccaucaccagcggcuggaccuucggcgccggcgcagcccugcagauccccuucgccaugcagauggccuaccgguucaacggcaucggcgugacccagaacgugcuguacgagaaccagaagcugaucgccaaccaguucaacagcgccaucggcaagauccaggacagccugagcagcaccgccagcgcccugggcaagcugcaggacguggugaaccagaacgcucaggcccugaacacccuggugaagcagcugagcagcaacuucggcgccaucagcucagugcugaaugacauccugagcaggcuggaucccccagaggccgaggugcagaucgaccggcugaucaccggccggcugcagagccugcagaccuacgugacccagcagcugauccgggccgccgagauccgggccagcgccaaccuggcagccaccaagaugagcgagugcgugcugggccagagcaagcggguggacuuuugcggcaagggcuaccaccugaugagcuucccccagagcgcuccccacggcgugguguuccuccacgucacauacgugcccgcccaggagaagaacuucaccaccgcccccgccaucugccacgacggcaaggcccacuucccccgggagggaguguucgugagcaacggcacccacugguucgugacccagcggaacuucuacgagccucagauuaucaccaccgacaacaccuucgugagcggcaacugcgacguggugaucggcaucgugaacaacaccguguacgacccccugcagcccgagcuggacagcuucaaggaggagcuggacaaguacuucaagaaccacaccagcccagacguggaccugggcgacaucagcggcaucaacgccagcguggugaacauccagaaggagaucgaccggcugaacgagguggccaagaaccugaacgagagccugaucgaccugcaggagcugggcaaguacgagcaguacaucaaguggcccugguacaucuggcugggcuucaucgccggccugaucgccaucgugauggugaccaucaugcugugcugcaugaccagcugcuguagcugccugaagggcugcugcagcugcggcagcugcugcaaguucgacgaggacgacagcgagcccgugcugaagggcgugaagcugcacuacaccugaggacuagucccuguucccagagcccacuuuuuuuucuuuuuuugaaauaaaauagccugucuuucagaucucaaaggcucuuuucagagccaccaaaaaaaaaaaaaaaaaaaaaaaaaaaaaaaaaaaaaaaaaaaaaaaaaaaaaaaaaaaaaaaaaaaaaaaaaaaaaaaaaaaaaaaaaaaaaaaaaaaaa

SEQ ID NO: 23800 - RNA, 4191 nt, Artificial Sequence
  SARS-CoV-2/Wuhan/WIV05/2019__EPI_ISL_402128 spike protein mRNA gc (1-1273)(K986P_V987P_D614G_M1229I)
aggagagggcgcuuggcuugcaaggacccugagcugcggcauugaagcacacccaacccaacucgacugaagucagccucacugaaccggaucugagaaucuucucucucugggcuugccagggcucuccgaaccuagcuagcauccucuucaauuccaacuagaaagcuuaccauguucguguuccuggugcugcugccccuggugagcagccagugcgugaaccugaccacccggacccagcugcccccugccuacaccaacagcuucacccggggcguguacuaccccgacaagguguuccggagcagcgugcugcacagcacccaggaccuguuccugcccuucuucagcaacgugaccugguuccacgccauccacgugagcggcaccaacggcaccaagcgguucgacaacccagugcugcccuucaacgacggcguguacuucgccagcaccgagaagucaaacaucauccggggcuggaucuucggcaccacccuggacagcaagacacagagccugcugaucgugaacaacgccaccaacguggugaucaaggugugcgaguuucaguucugcaacgaccccuuccugggcguguacuaccacaagaacaacaagagcuggauggagagcgaguuccgggucuacagcagcgcuaacaauugcaccuucgaguacgugagccagcccuuccugauggaccucgagggcaagcagggcaacuucaagaaccugcgggaguucguguucaagaacaucgauggcuacuucaagaucuacagcaagcacacccccaucaaccuggugcgggaccugccccagggauucagcgcccuggagccucugguggaccugcccaucggcaucaacaucaccagguuccagacccugcuggcccugcaccggagcuaccugacccccggcgacagcagcagcggcuggaccgccggcgccgccgcauacuacgugggcuaccugcagccacggaccuuccugcugaaguacaacgagaacggcaccaucaccgacgccguggacugcgcccuggacccccugagcgagaccaagugcacccuaaagagcuucaccguggagaagggcaucuaccagaccagcaacuuccgggugcagcccacugagagcaucgugcgguuccccaacauuaccaaccugugucccuucggcgagguguucaacgccacccgguucgccagcguguacgccuggaaccggaagcggaucagcaacugcguggccgacuacagcgugcuguacaacagcgccagcuucagcaccuucaagugcuacggcgugagcccuaccaagcugaacgaccugugcuucaccaacguguacgcugacagcuucgugauccggggcgacgaggugcggcagaucgcccccggccagaccggcaagaucgccgacuacaacuacaagcugcccgacgacuucaccggcugcgugaucgccuggaacagcaacaaccuggacagcaaggugggcggcaacuacaacuaccuguaccggcuguuccguaagagcaaccugaagccauucgagcgggacaucagcaccgagaucuaccaggccggcagcacccccugcaacgguguggagggcuuuaacugcuacuucccccugcagagcuacggcuuccagcccaccaacggcgugggcuaccagcccuaccgggugguggugcugagcuucgagcugcugcacgcccccgccaccgugugcggcccuaaaaagagcaccaaccuggugaagaacaagugcgugaacuucaauuucaacggccugaccggcaccggcgugcugaccgagagcaacaagaaguuccugcccuuccagcaguucggccgggauaucgccgacaccaccgacgcagugcgggacccccagacccuggagauccuggacaucaccccaugcagcuucggcggcgugagcgucaucacccccggcacaaacaccagcaaccagguggccgugcuguaccagggagugaacugcaccgaggugcccguggccauccacgccgaccagcugacccccaccuggcggguguacagcaccggcagcaacguguuccagacccgggccggcugccugaucggcgccgagcacgugaacaacuccuacgagugcgacauccccaucggcgcuggcaucugcgccagcuaccagacccagaccaacagcccccggcgggcccggagcguggccagccagagcaucaucgccuacaccaugagcuuaggcgccgagaacagcguggccuacagcaacaacagcaucgcgaucccuaccaacuucaccaucagcgugaccaccgagauacugcccgugagcaugaccaagaccagcguggacuguaccauguacaucugcggcgacagcaccgagugcagcaaccugcugcugcaguacggcagcuucugcacccagcugaaccgggcccugaccggcaucgccguggagcaggacaagaacacccaagagguguucgcccaggugaagcagaucuacaagacucccccaaucaaggacuucggcggcuucaacuucagccagauccugcccgaccccagcaagcccagcaagcggagcuucaucgaggaccugcuguucaacaaggugacccuggccgacgccggcuucaucaagcaguacggcgacugccugggggauaucgccgcucgggaccugaucugcgcccagaaguucaacggccugaccgugcugcccccucugcugaccgacgagaugaucgcccaguacaccagcgcccugcuugccggcaccaucaccagcggcuggaccuucggcgccggcgcagcccugcagauccccuucgccaugcagauggccuaccgguucaacggcaucggcgugacccagaacgugcuguacgagaaccagaagcugaucgccaaccaguucaacagcgccaucggcaagauccaggacagccugagcagcaccgccagcgcccugggcaagcugcaggacguggugaaccagaacgcucaggcccugaacacccuggugaagcagcugagcagcaacuucggcgccaucagcucagugcugaaugacauccugagcaggcuggaucccccagaggccgaggugcagaucgaccggcugaucaccggccggcugcagagccugcagaccuacgugacccagcagcugauccgggccgccgagauccgggccagcgccaaccuggcagccaccaagaugagcgagugcgugcugggccagagcaagcggguggacuuuugcggcaagggcuaccaccugaugagcuucccccagagcgcuccccacggcgugguguuccuccacgugacauacguccccgcccaggagaagaacuucaccaccgcccccgccauuugccacgacggcaaggcccacuucccccgggagggaguguucgugagcaacggcacccacugguucgugacccagcggaacuucuacgagccucagaucaucaccaccgacaacaccuucgugagcggcaacugcgacguggugaucggcaucgugaacaacaccguguacgacccccugcagcccgagcuggacagcuucaaggaggagcuggacaaguacuucaagaaccacaccagcccagacguggaccugggcgacaucagcggcaucaacgccagcguggugaacauccagaaggagaucgaccggcugaacgagguggccaagaaccugaacgagagccugaucgaccugcaggagcugggcaaguacgagcaguacaucaaguggcccugguacaucuggcugggcuucaucgccggccugaucgccaucgugaucgugaccaucaugcugugcugcaugaccagcugcuguagcugccugaagggcugcugcagcugcggcagcugcugcaaguucgacgaggacgacagcgagcccgugcugaagggcgugaagcugcacuacaccugaggacuagucccuguucccagagcccacuuuuuuuucuuuuuuugaaauaaaauagccugucuuucagaucucaaaggcucuuuucagagccaccaaaaaaaaaaaaaaaaaaaaaaaaaaaaaaaaaaaaaaaaaaaaaaaaaaaaaaaaaaaaaaaaaaaaaaaaaaaaaaaaaaaaaaaaaaaaaaaaaaaaa

SEQ ID NO: 23801 - RNA, 4185 nt, Artificial Sequence
  SARS-CoV-2/Wuhan/WIV05/2019__EPI_ISL_402128 spike protein mRNA gc (1-1273)(K986P_V987P_H69del_V70del_A222V_Y453F_S477N_D614G_I692V)
aggagagggcgcuuggcuugcaaggacccugagcugcggcauugaagcacacccaacccaacucgacugaagucagccucacugaaccggaucugagaaucuucucucucugggcuugccagggcucuccgaaccuagcuagcauccucuucaauuccaacuagaaagcuuaccauguucguguuccuggugcugcugccccuggugagcagccagugcgugaaccugaccacccggacccagcugcccccugccuacaccaacagcuucacccggggcguguacuaccccgacaagguguuccggagcagcgugcugcacagcacccaggaccuguuccugcccuucuucagcaacgugaccugguuccacgccaucagcggcaccaacggcaccaagcgguucgacaacccagugcugcccuucaacgacggcguguacuucgccagcaccgagaagucaaacaucauccggggcuggaucuucggcaccacccuggacagcaagacacagagccugcugaucgugaacaacgccaccaacguggugaucaaggugugcgaguuucaguucugcaacgaccccuuccugggcguguacuaccacaagaacaacaagagcuggauggagagcgaguuccggguguacagcagcgcuaacaauugcaccuucgaguacgucagccagcccuuccugauggaccucgagggcaagcagggcaacuucaagaaccugcgggaguucguguucaagaacaucgauggcuacuucaagaucuacagcaagcacacccccaucaaccuggugcgggaccugccccagggauucagcgugcuggagccucugguggaccugcccaucggcaucaacaucaccagguuccagacccugcuggcccugcaccggagcuaccugacccccggcgacagcagcagcggcuggaccgccggcgccgccgccuacuacgugggcuaccugcagccacggaccuuccugcugaaguacaacgagaacggcaccaucaccgacgcaguggacugcgcccuggacccccugagcgagaccaagugcacccuaaagagcuucaccguggagaagggcaucuaccagaccagcaacuuccgggugcagcccacugagagcaucgugcgguuccccaacauuaccaaccugugucccuucggcgagguguucaacgccacccgguucgccagcguguacgccuggaaccggaagcggaucagcaacugcguggccgacuacagcgugcuguacaacagcgccagcuucagcaccuucaagugcuacggcgugagcccuaccaagcugaacgaccugugcuucaccaacguguacgccgacagcuucgugauccggggcgacgaggugcggcagaucgcucccggccagaccggcaagaucgccgacuacaacuacaagcugcccgacgacuucaccggcugcgugaucgccuggaacagcaacaaccuggacagcaaggugggcggcaacuacaacuaccuguuccggcuguuccguaagagcaaccugaagccauuugagcgggacaucagcaccgagaucuaccaggccggcaacacccccugcaacgguguggagggcuucaacugcuacuucccccugcagagcuacggcuuccagcccaccaacggcgugggcuaccagcccuaccgggugguggugcugagcuucgagcugcugcacgcccccgccaccgugugcggcccuaaaaagagcaccaaccuggugaagaacaagugcgugaauuucaacuucaacggccugaccggcaccggcgugcugaccgagagcaacaagaaguuccugcccuuccagcaguucggccgggauaucgccgacaccaccgacgccgugcgggacccccagacccuggagauccuggacaucaccccaugcagcuucggcggcgugagcgucaucacccccggcacaaacaccagcaaccagguggcagugcuguaccagggagugaacugcaccgaggugcccguggccauccacgccgaccagcugacccccaccuggcggguguacagcaccggcagcaacguguuccagacccgggccggcugccugaucggcgccgagcacgugaacaacagcuacgagugcgacauccccaucggcgccggcaucugcgcuuccuaccagacccagaccaacagcccccggcgggcccggagcguggccagccagagcgugaucgccuacaccaugagcuuaggcgccgagaacagcguggccuacagcaacaacagcaucgccaucccuaccaacuucaccaucagcgugaccaccgagauccugcccgugagcaugaccaagaccagcguggacuguaccauguacauaugcggcgacagcaccgagugcagcaaccugcugcugcaguacggcagcuucugcacccagcugaaccgggcgcugaccggcaucgccguggagcaggacaagaacacccaagagguguucgcccaggugaagcagaucuacaagacucccccaaucaaggacuucggcggcuucaacuucagccagauccugcccgaccccagcaagcccagcaagcggagcuucaucgaggaccugcuguucaacaaggugacccuggccgacgccggcuucaucaagcaguacggcgacugccugggggauaucgccgcccgggaccugaucugcgcucagaaguucaacggccugaccgugcugcccccucugcugaccgacgagaugaucgcccaguacaccagcgcccugcuugccggcaccaucaccagcggcuggaccuucggcgccggcgccgcacugcagauccccuucgccaugcagauggccuaccgguucaacggcaucggcgugacccagaacgugcuguacgagaaccagaagcugaucgccaaccaguucaacagcgccaucggcaagauccaggacagccugagcagcaccgccagcgcccugggcaagcugcaggacguggugaaccagaacgcccaggcucugaacacccuggugaagcagcugagcagcaauuuuggcgccaucagcagcgugcugaacgacauccugucaaggcuggaucccccagaggccgaggugcagaucgaccggcugaucaccggccggcugcagagccugcagaccuacgugacccagcagcugauccgggccgccgagauccgggccagcgccaaccuggccgcaaccaagaugagcgagugcgugcugggccagagcaagcggguggacuucugcggcaagggcuaccaccugaugagcuucccccagagcgcuccccacggcgugguguuccuccacgucacauacgugcccgcccaggagaagaacuucaccaccgcccccgccaucugccacgacggcaaggcccacuucccccgggagggaguguucgugagcaacggcacccacugguucgugacccagcggaacuucuacgagccucagauuaucaccaccgacaacaccuucgugagcggcaacugcgacguggugaucggcaucgugaacaacaccguguacgacccccugcagcccgagcuggacagcuucaaggaggagcuggacaaguacuucaagaaccacaccagcccagacguggaccugggcgacaucagcggcaucaacgccagcguggugaacauccagaaggagaucgaccggcugaacgagguggccaagaaccugaacgagagccugaucgaccugcaggagcugggcaaguacgagcaguacaucaaguggcccugguacaucuggcugggcuucaucgccggccugaucgccaucgugauggugaccaucaugcugugcugcaugaccagcugcuguagcugccugaagggcugcugcagcugcggcagcugcugcaaguucgacgaggacgacagcgagcccgugcugaagggcgugaagcugcacuacaccugaggacuagucccuguucccagagcccacuuuuuuuucuuuuuuugaaauaaaauagccugucuuucagaucucaaaggcucuuuucagagccaccaaaaaaaaaaaaaaaaaaaaaaaaaaaaaaaaaaaaaaaaaaaaaaaaaaaaaaaaaaaaaaaaaaaaaaaaaaaaaaaaaaaaaaaaaaaaaaaaaaaaa

SEQ ID NO: 23802 - RNA, 4185 nt, Artificial Sequence
  SARS-CoV-2/Wuhan/WIV05/2019__EPI_ISL_402128 spike protein mRNA gc (1-1273)(K986P_V987P_H69del_V70del_Y453F_D614G_I692V_M1229I)
aggagagggcgcuuggcuugcaaggacccugagcugcggcauugaagcacacccaacccaacucgacugaagucagccucacugaaccggaucugagaaucuucucucucugggcuugccagggcucuccgaaccuagcuagcauccucuucaauuccaacuagaaagcuuaccauguucguguuccuggugcugcugccccuggugagcagccagugcgugaaccugaccacccggacccagcugcccccugccuacaccaacagcuucacccggggcguguacuaccccgacaagguguuccggagcagcgugcugcacagcacccaggaccuguuccugcccuucuucagcaacgugaccugguuccacgccaucagcggcaccaacggcaccaagcgguucgacaacccagugcugcccuucaacgacggcguguacuucgccagcaccgagaagucaaacaucauccggggcuggaucuucggcaccacccuggacagcaagacacagagccugcugaucgugaacaacgccaccaacguggugaucaaggugugcgaguuucaguucugcaacgaccccuuccugggcguguacuaccacaagaacaacaagagcuggauggagagcgaguuccggguguacagcagcgcuaacaauugcaccuucgaguacgucagccagcccuuccugauggaccucgagggcaagcagggcaacuucaagaaccugcgggaguucguguucaagaacaucgauggcuacuucaagaucuacagcaagcacacccccaucaaccuggugcgggaccugccccagggauucagcgcccuggagccucugguggaccugcccaucggcaucaacaucaccagguuccagacccugcuggcccugcaccggagcuaccugacccccggcgacagcagcagcggcuggaccgccggcgccgccgcauacuacgugggcuaccugcagccacggaccuuccugcugaaguacaacgagaacggcaccaucaccgacgccguggacugcgcccuggacccccugagcgagaccaagugcacccuaaagagcuucaccguggagaagggcaucuaccagaccagcaacuuccgggugcagcccacugagagcaucgugcgguuccccaacauuaccaaccugugucccuucggcgagguguucaacgccacccgguucgccagcguguacgccuggaaccggaagcggaucagcaacugcguggccgacuacagcgugcuguacaacagcgccagcuucagcaccuucaagugcuacggcgugagcccuaccaagcugaacgaccugugcuucaccaacguguacgcugacagcuucgugauccggggcgacgaggugcggcagaucgcccccggccagaccggcaagaucgccgacuacaacuacaagcugcccgacgacuucaccggcugcgugaucgccuggaacagcaacaaccuggacagcaaggugggcggcaacuacaacuaccuguuccggcuguuccguaagagcaaccugaagccauuugagcgggacaucagcaccgagaucuaccaggccggcagcacccccugcaacgguguggagggcuucaacugcuacuucccccugcagagcuacggcuuccagcccaccaacggcgugggcuaccagcccuaccgggugguggugcugagcuucgagcugcugcacgcccccgccaccgugugcggcccuaaaaagagcaccaaccuggugaagaacaagugcgugaacuucaauuucaacggccugaccggcaccggcgugcugaccgagagcaacaagaaguuccugcccuuccagcaguucggccgggauaucgccgacaccaccgacgcagugcgggacccccagacccuggagauccuggacaucaccccaugcagcuucggcggcgugagcgugaucacccccggcacaaacaccagcaaccaggucgccgugcuguaccagggagugaacugcaccgaggugcccguggccauccacgccgaccagcugacccccaccuggcggguguacagcaccggcagcaacguguuccagacccgggccggcugccugaucggcgccgagcacgugaacaacuccuacgagugcgacauccccaucggcgcuggcaucugcgccagcuaccagacccagaccaacagcccccggcgggcccggagcguggccagccagagcgugaucgccuacaccaugagcuuaggcgccgagaacagcguggccuacagcaacaacagcaucgcgaucccuaccaacuucaccaucagcgugaccaccgagauccugcccgugagcaugaccaagaccagcguggacuguaccauguacauaugcggcgacagcaccgagugcagcaaccugcugcugcaguacggcagcuucugcacccagcugaaccgggcccugaccggcaucgccguggagcaggacaagaacacccaagagguguucgcccaggugaagcagaucuacaagacucccccaaucaaggacuucggcggcuucaacuucagccagauccugcccgaccccagcaagcccagcaagcggagcuucaucgaggaccugcuguucaacaaggugacccuggccgacgccggcuucaucaagcaguacggcgacugccugggggauaucgccgcucgggaccugaucugcgcccagaaguucaacggccugaccgugcugcccccucugcugaccgacgagaugaucgcccaguacaccagcgcccugcuugccggcaccaucaccagcggcuggaccuucggcgccggcgcagcccugcagauccccuucgccaugcagauggccuaccgguucaacggcaucggcgugacccagaacgugcuguacgagaaccagaagcugaucgccaaccaguucaacagcgccaucggcaagauccaggacagccugagcagcaccgccagcgcccugggcaagcugcaggacguggugaaccagaacgcucaggcccugaacacccuggugaagcagcugagcagcaacuuuggcgccaucagcucagugcugaaugacauccugagcaggcuggaucccccagaggccgaggugcagaucgaccggcugaucaccggccggcugcagagccugcagaccuacgugacccagcagcugauccgggccgccgagauccgggccagcgccaaccuggcagccaccaagaugagcgagugcgugcugggccagagcaagcggguggacuucugcggcaagggcuaccaccugaugagcuucccccagagcgcuccccacggcgugguguuccuccacgugacauacguccccgcccaggagaagaacuucaccaccgcccccgccaucugccacgacggcaaggcccacuucccccgggagggaguguucgugagcaacggcacccacugguucgugacccagcggaacuucuacgagccucagauuaucaccaccgacaacaccuucgugagcggcaacugcgacguggugaucggcaucgugaacaacaccguguacgacccccugcagcccgagcuggacagcuucaaggaggagcuggacaaguacuucaagaaccacaccagcccagacguggaccugggcgacaucagcggcaucaacgccagcguggugaacauccagaaggagaucgaccggcugaacgagguggccaagaaccugaacgagagccugaucgaccugcaggagcugggcaaguacgagcaguacaucaaguggcccugguacaucuggcugggcuucaucgccggccugaucgccaucgugaucgugaccaucaugcugugcugcaugaccagcugcuguagcugccugaagggcugcugcagcugcggcagcugcugcaaguucgacgaggacgacagcgagcccgugcugaagggcgugaagcugcacuacaccugaggacuagucccuguucccagagcccacuuuuuuuucuuuuuuugaaauaaaauagccugucuuucagaucucaaaggcucuuuucagagccaccaaaaaaaaaaaaaaaaaaaaaaaaaaaaaaaaaaaaaaaaaaaaaaaaaaaaaaaaaaaaaaaaaaaaaaaaaaaaaaaaaaaaaaaaaaaaaaaaaaaaa

SEQ ID NO: 23803 - RNA, 4182 nt, Artificial Sequence
  SARS-CoV-2/Wuhan/WIV05/2019__EPI_ISL_402128 spike protein mRNA gc (1-1273)(K986P_V987P_K986P_V987P_H69del_V70del_Y144del_N501Y_A570 D_D614G_P681H_T716I_S982A_D1118H)
aggagagggcgcuuggcuugcaaggacccugagcugcggcauugaagcacacccaacccaacucgacugaagucagccucacugaaccggaucugagaaucuucucucucugggcuugccagggcucuccgaaccuagcuagcauccucuucaauuccaacuagaaagcuuaccauguucguguuccuggugcugcugccccuggugagcagccagugcgugaaccugaccacccggacccagcugcccccugccuacaccaacagcuucacccggggcguguacuaccccgacaagguguuccggagcagcgugcugcacagcacccaggaccuguuccugcccuucuucagcaacgugaccugguuccacgccaucagcggcaccaacggcaccaagcgguucgacaacccagugcugcccuucaacgacggcguguacuucgccagcaccgagaagucaaacaucauccggggcuggaucuucggcaccacccuggacagcaagacacagagccugcugaucgugaacaacgccaccaacguggugaucaaggugugcgaguuucaguucugcaacgaccccuuccugggcguguaccacaagaacaacaagagcuggauggagagcgaguuccggguguacagcagcgcuaacaauugcaccuucgaguacgucagccagcccuuccugauggaccucgagggcaagcagggcaacuucaagaaccugcgggaguucguguucaagaacaucgauggcuacuucaagaucuacagcaagcacacccccaucaaccuggugcgggaccugccccagggauucagcgcccuggagccucugguggaccugcccaucggcaucaacaucaccagguuccagacccugcuggcccugcaccggagcuaccugacccccggcgacagcagcagcggcuggaccgccggcgccgccgcauacuacgugggcuaccugcagccacggaccuuccugcugaaguacaacgagaacggcaccaucaccgacgccguggacugcgcccuggacccccugagcgagaccaagugcacccuaaagagcuucaccguggagaagggcaucuaccagaccagcaacuuccgggugcagcccacugagagcaucgugcgguuccccaacauuaccaaccugugucccuucggcgagguguucaacgccacccgguucgccagcguguacgccuggaaccggaagcggaucagcaacugcguggccgacuacagcgugcuguacaacagcgccagcuucagcaccuucaagugcuacggcgugagcccuaccaagcugaacgaccugugcuucaccaacguguacgcugacagcuucgugauccggggcgacgaggugcggcagaucgcccccggccagaccggcaagaucgccgacuacaacuacaagcugcccgacgacuucaccggcugcgugaucgccuggaacagcaacaaccuggacagcaaggugggcggcaacuacaacuaccuguaccggcuguuccguaagagcaaccugaagccauucgagcgggacaucagcaccgagaucuaccaggccggcagcacccccugcaacgguguggagggcuuuaacugcuacuucccccugcagagcuacggcuuccagcccaccuacggcgugggcuaccagcccuaccgggugguggugcugagcuucgagcugcugcacgcccccgccaccgugugcggcccuaaaaagagcaccaaccuggugaagaacaagugcgugaacuucaacuucaauggccugaccggcaccggcgugcugaccgagagcaacaagaaguuccugcccuuccagcaguucggccgggauaucgacgacaccaccgacgccgugcgggacccccagacccuggagauccuggacaucaccccaugcagcuucggcggcgugagcgugaucacccccggcacaaacaccagcaaccaggucgcagugcuguaccagggagugaacugcaccgaggugcccguggccauccacgccgaccagcugacccccaccuggcggguguacagcaccggcagcaacguguuccagacccgggccggcugccugaucggcgccgagcacgugaacaacuccuacgagugcgacauccccaucggcgccggcaucugcgcuagcuaccagacccagaccaacagccaccggcgggcccggagcguggccagccagagcaucaucgccuacaccaugagcuuaggcgccgagaacagcguggccuacagcaacaacagcaucgccauccccaucaacuucaccauaagcgugaccaccgagauccugccugugagcaugaccaagaccagcguggacuguaccauguacaucugcggcgacagcaccgagugcagcaaccugcugcugcaguacggcagcuucugcacccagcugaaccgggcgcugaccggcaucgccguggagcaggacaagaacacccaagagguguucgcccaggugaagcagaucuacaagaccccacccaucaaggacuucggcggcuucaacuucagccagauccugcccgaccccagcaagcccagcaagcggagcuucaucgaggaccugcuguucaacaaggugacucuggccgacgccggcuucaucaagcaguacggcgauugccugggggacaucgccgcccgggaccugaucugcgcucagaaguucaacggccugaccgugcugccuccccugcugaccgacgagaugaucgcccaguacaccagcgcccugcuugccggcaccaucaccagcggcuggaccuucggcgccggcgccgcacugcagauccccuucgccaugcagauggccuaccgguucaacggcaucggcgugacccagaacgugcuguacgagaaccagaagcugaucgccaaccaguucaacagcgccaucggcaagauccaggacagccugagcagcaccgccagcgcccugggcaagcugcaggacguggugaaccagaacgcccaggcucugaacacccuggugaagcagcugagcagcaacuucggcgccaucagcucagugcugaacgacauccuggccaggcuggacccacccgaggccgaggugcagaucgaccggcugaucaccggccggcugcagagccugcagaccuacgugacccagcagcugauccgggccgccgagauucgggccagcgccaaucuggcagccaccaagaugagcgagugcgugcugggccagagcaagcggguggacuuuugcggcaagggcuaccaccugaugagcuucccccagagcgcuccccacggcgugguguuccuccacgugaccuacgugcccgcccaggagaagaacuucacaaccgcccccgccaucugccacgacggcaaggcccacuucccccgggagggagucuucgugagcaacggcacccacugguucgugacccagcggaacuucuacgagccccagaucaucaccacccacaacaccuucgugagcggcaacugcgacguggugaucggcaucgugaacaacaccguguacgacccucugcagcccgagcuggacagcuucaaggaggagcuggacaaguacuucaagaaccacaccagccccgacguggaucugggcgacaucagcggcaucaacgccagcguggugaacauccagaaggagaucgaccggcugaacgagguggccaagaaccugaacgagagccugaucgaccugcaggagcugggcaaguacgagcaguacaucaaguggccaugguacaucuggcugggcuucaucgccggccugaucgccaucgugauggugaccaucaugcugugcugcaugaccagcugcuguagcugccugaagggcugcugcagcugcggcagcugcugcaaguucgacgaggacgacagcgagcccgugcugaagggcgugaagcugcacuacaccugaggacuagucccuguucccagagcccacuuuuuuuucuuuuuuugaaauaaaauagccugucuuucagaucucaaaggcucuuuucagagccaccaaaaaaaaaaaaaaaaaaaaaaaaaaaaaaaaaaaaaaaaaaaaaaaaaaaaaaaaaaaaaaaaaaaaaaaaaaaaaaaaaaaaaaaaaaaaaaaaaaaaa

SEQ ID NO: 23804 - RNA, 4191 nt, Artificial Sequence
  SARS-CoV-2/Wuhan/WIV05/2019__EPI_ISL_402128 spike protein mRNA gc (1-1273)(K986P_V987P_K986P_V987P_K417N_E484K_N501Y_D614G)
aggagagggcgcuuggcuugcaaggacccugagcugcggcauugaagcacacccaacccaacucgacugaagucagccucacugaaccggaucugagaaucuucucucucugggcuugccagggcucuccgaaccuagcuagcauccucuucaauuccaacuagaaagcuuaccauguucguguuccuggugcugcugccccuggugagcagccagugcgugaaccugaccacccggacccagcugcccccugccuacaccaacagcuucacccggggcguguacuaccccgacaagguguuccggagcagcgugcugcacagcacccaggaccuguuccugcccuucuucagcaacgugaccugguuccacgccauccacgugagcggcaccaacggcaccaagcgguucgacaacccagugcugcccuucaacgacggcguguacuucgccagcaccgagaagucaaacaucauccggggcuggaucuucggcaccacccuggacagcaagacacagagccugcugaucgugaacaacgccaccaacguggugaucaaggugugcgaguuucaguucugcaacgaccccuuccugggcguguacuaccacaagaacaacaagagcuggauggagagcgaguuccgggucuacagcagcgcuaacaauugcaccuucgaguacgugagccagcccuuccugauggaccucgagggcaagcagggcaacuucaagaaccugcgggaguucguguucaagaacaucgauggcuacuucaagaucuacagcaagcacacccccaucaaccuggugcgggaccugccccagggauucagcgcccuggagccucugguggaccugcccaucggcaucaacaucaccagguuccagacccugcuggcccugcaccggagcuaccugacccccggcgacagcagcagcggcuggaccgccggcgccgccgcauacuacgugggcuaccugcagccacggaccuuccugcugaaguacaacgagaacggcaccaucaccgacgccguggacugcgcccuggacccccugagcgagaccaagugcacccuaaagagcuucaccguggagaagggcaucuaccagaccagcaacuuccgggugcagcccacugagagcaucgugcgguuccccaacauuaccaaccugugucccuucggcgagguguucaacgccacccgguucgccagcguguacgccuggaaccggaagcggaucagcaacugcguggccgacuacagcgugcuguacaacagcgccagcuucagcaccuucaagugcuacggcgugagcccuaccaagcugaacgaccugugcuucaccaacguguacgcugacagcuucgugauccggggcgacgaggugcggcagaucgcccccggccagaccggcaacaucgccgacuacaacuacaagcugcccgacgacuucaccggcugcgugaucgccuggaacagcaacaaccuggacagcaaggugggcggcaacuacaacuaccuguaccggcuguuccguaagagcaaccugaagccauucgagcgggacaucagcaccgagaucuaccaggccggcagcacccccugcaacggugugaagggcuuuaacugcuacuucccccugcagagcuacggcuuccagcccaccuacggcgugggcuaccagcccuaccgggugguggugcugagcuucgagcugcugcacgcccccgccaccgugugcggcccuaaaaagagcaccaaccuggugaagaacaagugcgugaacuucaauuucaacggccugaccggcaccggcgugcugaccgagagcaacaagaaguuccugcccuuccagcaguucggccgggauaucgccgacaccaccgacgcagugcgggacccccagacccuggagauccuggacaucaccccaugcagcuucggcggcgugagcgucaucacccccggcacaaacaccagcaaccagguggccgugcuguaccagggagugaacugcaccgaggugcccguggccauccacgccgaccagcugacccccaccuggcggguguacagcaccggcagcaacguguuccagacccgggccggcugccugaucggcgccgagcacgugaacaacuccuacgagugcgacauccccaucggcgcuggcaucugcgccagcuaccagacccagaccaacagcccccggcgggcccggagcguggccagccagagcaucaucgccuacaccaugagcuuaggcgccgagaacagcguggccuacagcaacaacagcaucgcgaucccuaccaacuucaccaucagcgugaccaccgagauacugcccgugagcaugaccaagaccagcguggacuguaccauguacaucugcggcgacagcaccgagugcagcaaccugcugcugcaguacggcagcuucugcacccagcugaaccgggcccugaccggcaucgccguggagcaggacaagaacacccaagagguguucgcccaggugaagcagaucuacaagacucccccaaucaaggacuucggcggcuucaacuucagccagauccugcccgaccccagcaagcccagcaagcggagcuucaucgaggaccugcuguucaacaaggugacccuggccgacgccggcuucaucaagcaguacggcgacugccugggggauaucgccgcucgggaccugaucugcgcccagaaguucaacggccugaccgugcugcccccucugcugaccgacgagaugaucgcccaguacaccagcgcccugcuugccggcaccaucaccagcggcuggaccuucggcgccggcgcagcccugcagauccccuucgccaugcagauggccuaccgguucaacggcaucggcgugacccagaacgugcuguacgagaaccagaagcugaucgccaaccaguucaacagcgccaucggcaagauccaggacagccugagcagcaccgccagcgcccugggcaagcugcaggacguggugaaccagaacgcucaggcccugaacacccuggugaagcagcugagcagcaacuucggcgccaucagcucagugcugaaugacauccugagcaggcuggaucccccagaggccgaggugcagaucgaccggcugaucaccggccggcugcagagccugcagaccuacgugacccagcagcugauccgggccgccgagauccgggccagcgccaaccuggcagccaccaagaugagcgagugcgugcugggccagagcaagcggguggacuuuugcggcaagggcuaccaccugaugagcuucccccagagcgcuccccacggcgugguguuccuccacgugacauacguccccgcccaggagaagaacuucaccaccgcccccgccauuugccacgacggcaaggcccacuucccccgggagggaguguucgugagcaacggcacccacugguucgugacccagcggaacuucuacgagccucagaucaucaccaccgacaacaccuucgugagcggcaacugcgacguggugaucggcaucgugaacaacaccguguacgacccccugcagcccgagcuggacagcuucaaggaggagcuggacaaguacuucaagaaccacaccagcccagacguggaccugggcgacaucagcggcaucaacgccagcguggugaacauccagaaggagaucgaccggcugaacgagguggccaagaaccugaacgagagccugaucgaccugcaggagcugggcaaguacgagcaguacaucaaguggcccugguacaucuggcugggcuucaucgccggccugaucgccaucgugauggugaccaucaugcugugcugcaugaccagcugcuguagcugccugaagggcugcugcagcugcggcagcugcugcaaguucgacgaggacgacagcgagcccgugcugaagggcgugaagcugcacuacaccugaggacuagucccuguucccagagcccacuuuuuuuucuuuuuuugaaauaaaauagccugucuuucagaucucaaaggcucuuuucagagccaccaaaaaaaaaaaaaaaaaaaaaaaaaaaaaaaaaaaaaaaaaaaaaaaaaaaaaaaaaaaaaaaaaaaaaaaaaaaaaaaaaaaaaaaaaaaaaaaaaaaaa

SEQ ID NO: 23805 - RNA, 4182 nt, Artificial Sequence
  SARS-CoV-2/Wuhan/WIV05/2019__EPI_ISL_402128 spike protein mRNA gc (1-1273)(K986P_V987P_K986P_V987P_L18F_D80A_D215G_L242del_A243del_ L244del_R246I_K417N_E484K_N501Y_D614G_A701V)
aggagagggcgcuuggcuugcaaggacccugagcugcggcauugaagcacacccaacccaacucgacugaagucagccucacugaaccggaucugagaaucuucucucucugggcuugccagggcucuccgaaccuagcuagcauccucuucaauuccaacuagaaagcuuaccauguucguguuccuggugcugcugccccuggugagcagccagugcgugaacuucaccacccggacccagcugcccccugccuacaccaacagcuucacccggggcguguacuaccccgacaagguguuccggagcagcgugcugcacagcacccaggaccuguuccugcccuucuucagcaacgugaccugguuccacgccauccacgugagcggcaccaacggcaccaagcgguucgccaacccagugcugcccuucaacgacggcguguacuucgccagcaccgagaagucaaacaucauccggggcuggaucuuuggcaccacccuggacagcaagacacagagccugcugaucgugaacaacgcuaccaacguggugaucaaggugugcgaguuccaguucugcaacgaccccuuccugggcguguacuaccacaagaacaacaagagcuggauggagagcgaguuccgggucuacagcagcgccaacaauugcaccuucgaguacgugagccagcccuuccugauggaccuggagggcaagcagggcaacuucaagaaccuccgggaguucguguucaagaacaucgacggcuacuucaagaucuacagcaagcacacccccaucaaccuggugcggggacugccccagggcuucagcgcccuggagccucugguggaucugcccaucggcaucaacaucaccagguuccagacccugcacaucagcuaccugacccccggcgacagcagcagcggcuggaccgccggcgccgccgcauacuacgugggcuaccugcagccacggaccuuccugcugaaguacaacgagaacggcaccaucaccgacgccguggacugcgcccuggacccccugagcgagaccaagugcacccuuaagagcuucaccguggagaagggcaucuaccagaccagcaacuuccgggugcagcccacugagagcauugugcgguuccccaacaucaccaaccugugucccuucggcgagguguucaacgccacccgguucgccagcguguacgccuggaaccggaagcggaucagcaacugcguggccgacuacagcgugcuguacaacagcgccagcuucagcaccuucaagugcuacggcgugagcccuaccaagcugaacgaccugugcuucaccaacguguacgcugacagcuucgugauccggggcgacgaggugcggcagaucgcccccggccagaccggcaacaucgccgacuacaacuacaagcugcccgacgacuucaccggcugcgugaucgccuggaacagcaacaaccuggacagcaaggugggcggcaacuacaacuaccuguaccggcuauuccguaagagcaaccugaagccauuugagcgggacaucagcaccgagaucuaccaggccgguagcacccccugcaacggcgugaagggcuucaacugcuacuucccccugcagagcuacggcuuccagcccaccuacggcgugggcuaccagcccuaccgggugguggugcugagcuucgagcugcugcacgcccccgccaccgugugcggcccuaaaaagagcaccaaccuggugaagaacaagugcgugaacuucaauuucaacggccugaccggcaccggcgugcugaccgagagcaacaagaaguuccugcccuuccagcaguucggccgggacaucgccgacaccaccgaugcagugcgggacccccagacccuggagauccuggacaucaccccaugcagcuucggcggcgugagcgucaucacccccggaacaaacaccagcaaccagguggccgugcuguaccagggcgugaacugcaccgaggugcccguggccauccacgccgaccagcugacccccaccuggcggguguacagcaccggcagcaacguguuccagacccgggccggcugccugaucggcgccgagcacgugaacaacuccuacgagugcgacauccccaucggcgcuggcaucugcgccagcuaccagacccagaccaacagcccccggcgggcccggagcguggccagccagagcaucaucgccuacaccaugagccugggcguggagaacagcguggccuacagcaacaacagcaucgccaucccuaccaacuucaccauaagcgugaccaccgagauccugcccgugagcaugaccaagaccagcguggacuguaccauguacaucugcggcgacagcaccgagugcagcaaccuguuacugcaguacggcagcuucugcacccagcugaaccgggcgcugaccggcaucgccguggagcaggacaagaacacccaagagguguucgcccaggugaagcagaucuacaagacucccccaaucaaggacuucggcggcuucaacuucagccagauccugcccgaccccagcaagcccagcaagcggagcuucaucgaggaccugcuguucaacaaggugacccuggccgacgccggcuucaucaagcaguacggggacugccugggcgacaucgccgcccgggaccugaucugcgcucagaaguucaacggccugaccgugcugcccccucugcugaccgaugagaugaucgcccaguacaccagcgcccugcuggccggcaccaucaccagcggcuggaccuucggcgccggcgccgcacugcagauccccuucgccaugcagauggccuaccgguucaacggcaucggcgugacccagaacgugcuguacgagaaccagaagcugaucgccaaccaguucaacagcgccaucggcaagauccaggacagccugagcagcaccgccagcgcccugggcaagcugcaggacguggugaaccagaacgcccaggcucugaacacccuggugaagcagcugagcagcaacuuuggcgccaucagcucagugcugaaugacauccugagccggcuggaucccccagaggccgaggugcagaucgacaggcugaucaccggccggcugcagagccugcagaccuacgugacccagcagcugauccgggccgccgagauucgggccagcgccaaccuggccgcaaccaagaugagcgagugcgugcugggccagagcaagcggguggacuucugcggcaagggcuaccaccugaugagcuucccccagagcgcuccccacggcgugguguuccugcacgucacauacgugcccgcccaggagaagaacuucaccaccgcccccgccaucugccacgacggaaaggcccacuucccccgggagggcguguucgugagcaacggcacccacugguucgugacccagcggaacuucuacgagccucagaucaucaccaccgacaacaccuucgugagcggcaacugcgacguggugaucggcaucgugaacaacaccguguacgacccccugcagcccgagcuggacagcuucaaggaggagcucgacaaguacuucaagaaccacaccagcccagacguggaccugggcgacaucagcggcaucaacgccagcguggugaacauccagaaggagaucgaccggcugaacgagguggccaagaaccugaacgagagccugaucgaccugcaggagcugggcaaguacgagcaguacaucaaguggcccugguacaucuggcugggcuucaucgccggccugaucgccaucgugauggugaccaucaugcugugcugcaugaccagcugcuguagcugccugaagggcugcugcagcugcggcagcugcugcaaguucgacgaggacgacagcgagcccgugcugaagggcgugaagcugcacuacaccugaggacuagucccuguucccagagcccacuuuuuuuucuuuuuuugaaauaaaauagccugucuuucagaucucaaaggcucuuuucagagccaccaaaaaaaaaaaaaaaaaaaaaaaaaaaaaaaaaaaaaaaaaaaaaaaaaaaaaaaaaaaaaaaaaaaaaaaaaaaaaaaaaaaaaaaaaaaaaaaaaaaaa

SEQ ID NO: 23806 - RNA, 4191 nt, Artificial Sequence
  SARS-CoV-2/Wuhan/WIV05/2019__EPI_ISL_402128 spike protein mRNA gc (1-1273)(K986P_V987P_K986P_V987P_E484K_D614G)
aggagagggcgcuuggcuugcaaggacccugagcugcggcauugaagcacacccaacccaacucgacugaagucagccucacugaaccggaucugagaaucuucucucucugggcuugccagggcucuccgaaccuagcuagcauccucuucaauuccaacuagaaagcuuaccauguucguguuccuggugcugcugccccuggugagcagccagugcgugaaccugaccacccggacccagcugcccccugccuacaccaacagcuucacccggggcguguacuaccccgacaagguguuccggagcagcgugcugcacagcacccaggaccuguuccugcccuucuucagcaacgugaccugguuccacgccauccacgugagcggcaccaacggcaccaagcgguucgacaacccagugcugcccuucaacgacggcguguacuucgccagcaccgagaagucaaacaucauccggggcuggaucuucggcaccacccuggacagcaagacacagagccugcugaucgugaacaacgccaccaacguggugaucaaggugugcgaguuucaguucugcaacgaccccuuccugggcguguacuaccacaagaacaacaagagcuggauggagagcgaguuccgggucuacagcagcgcuaacaauugcaccuucgaguacgugagccagcccuuccugauggaccucgagggcaagcagggcaacuucaagaaccugcgggaguucguguucaagaacaucgauggcuacuucaagaucuacagcaagcacacccccaucaaccuggugcgggaccugccccagggauucagcgcccuggagccucugguggaccugcccaucggcaucaacaucaccagguuccagacccugcuggcccugcaccggagcuaccugacccccggcgacagcagcagcggcuggaccgccggcgccgccgcauacuacgugggcuaccugcagccacggaccuuccugcugaaguacaacgagaacggcaccaucaccgacgccguggacugcgcccuggacccccugagcgagaccaagugcacccuaaagagcuucaccguggagaagggcaucuaccagaccagcaacuuccgggugcagcccacugagagcaucgugcgguuccccaacauuaccaaccugugucccuucggcgagguguucaacgccacccgguucgccagcguguacgccuggaaccggaagcggaucagcaacugcguggccgacuacagcgugcuguacaacagcgccagcuucagcaccuucaagugcuacggcgugagcccuaccaagcugaacgaccugugcuucaccaacguguacgcugacagcuucgugauccggggcgacgaggugcggcagaucgcccccggccagaccggcaagaucgccgacuacaacuacaagcugcccgacgacuucaccggcugcgugaucgccuggaacagcaacaaccuggacagcaaggugggcggcaacuacaacuaccuguaccggcuguuccguaagagcaaccugaagccauucgagcgggacaucagcaccgagaucuaccaggccggcagcacccccugcaacggugugaagggcuuuaacugcuacuucccccugcagagcuacggcuuccagcccaccaacggcgugggcuaccagcccuaccgggugguggugcugagcuucgagcugcugcacgcccccgccaccgugugcggcccuaaaaagagcaccaaccuggugaagaacaagugcgugaacuucaauuucaacggccugaccggcaccggcgugcugaccgagagcaacaagaaguuccugcccuuccagcaguucggccgggauaucgccgacaccaccgacgcagugcgggacccccagacccuggagauccuggacaucaccccaugcagcuucggcggcgugagcgucaucacccccggcacaaacaccagcaaccagguggccgugcuguaccagggagugaacugcaccgaggugcccguggccauccacgccgaccagcugacccccaccuggcggguguacagcaccggcagcaacguguuccagacccgggccggcugccugaucggcgccgagcacgugaacaacuccuacgagugcgacauccccaucggcgcuggcaucugcgccagcuaccagacccagaccaacagcccccggcgggcccggagcguggccagccagagcaucaucgccuacaccaugagcuuaggcgccgagaacagcguggccuacagcaacaacagcaucgcgaucccuaccaacuucaccaucagcgugaccaccgagauacugcccgugagcaugaccaagaccagcguggacuguaccauguacaucugcggcgacagcaccgagugcagcaaccugcugcugcaguacggcagcuucugcacccagcugaaccgggcccugaccggcaucgccguggagcaggacaagaacacccaagagguguucgcccaggugaagcagaucuacaagacucccccaaucaaggacuucggcggcuucaacuucagccagauccugcccgaccccagcaagcccagcaagcggagcuucaucgaggaccugcuguucaacaaggugacccuggccgacgccggcuucaucaagcaguacggcgacugccugggggauaucgccgcucgggaccugaucugcgcccagaaguucaacggccugaccgugcugcccccucugcugaccgacgagaugaucgcccaguacaccagcgcccugcuugccggcaccaucaccagcggcuggaccuucggcgccggcgcagcccugcagauccccuucgccaugcagauggccuaccgguucaacggcaucggcgugacccagaacgugcuguacgagaaccagaagcugaucgccaaccaguucaacagcgccaucggcaagauccaggacagccugagcagcaccgccagcgcccugggcaagcugcaggacguggugaaccagaacgcucaggcccugaacacccuggugaagcagcugagcagcaacuucggcgccaucagcucagugcugaaugacauccugagcaggcuggaucccccagaggccgaggugcagaucgaccggcugaucaccggccggcugcagagccugcagaccuacgugacccagcagcugauccgggccgccgagauccgggccagcgccaaccuggcagccaccaagaugagcgagugcgugcugggccagagcaagcggguggacuuuugcggcaagggcuaccaccugaugagcuucccccagagcgcuccccacggcgugguguuccuccacgugacauacguccccgcccaggagaagaacuucaccaccgcccccgccauuugccacgacggcaaggcccacuucccccgggagggaguguucgugagcaacggcacccacugguucgugacccagcggaacuucuacgagccucagaucaucaccaccgacaacaccuucgugagcggcaacugcgacguggugaucggcaucgugaacaacaccguguacgacccccugcagcccgagcuggacagcuucaaggaggagcuggacaaguacuucaagaaccacaccagcccagacguggaccugggcgacaucagcggcaucaacgccagcguggugaacauccagaaggagaucgaccggcugaacgagguggccaagaaccugaacgagagccugaucgaccugcaggagcugggcaaguacgagcaguacaucaaguggcccugguacaucuggcugggcuucaucgccggccugaucgccaucgugauggugaccaucaugcugugcugcaugaccagcugcuguagcugccugaagggcugcugcagcugcggcagcugcugcaaguucgacgaggacgacagcgagcccgugcugaagggcgugaagcugcacuacaccugaggacuagucccuguucccagagcccacuuuuuuuucuuuuuuugaaauaaaauagccugucuuucagaucucaaaggcucuuuucagagccaccaaaaaaaaaaaaaaaaaaaaaaaaaaaaaaaaaaaaaaaaaaaaaaaaaaaaaaaaaaaaaaaaaaaaaaaaaaaaaaaaaaaaaaaaaaaaaaaaaaaaa

SEQ ID NO: 23807 - RNA, 4191 nt, Artificial Sequence
  SARS-CoV-2/Wuhan/WIV05/2019__EPI_ISL_402128 spike protein mRNA gc (1-1273)(K986P_V987P_K986P_V987P_L18F_T20N_P26S_D138Y_R190S_K417T _E484K_N501Y_D614G_H655Y_T1027I)
aggagagggcgcuuggcuugcaaggacccugagcugcggcauugaagcacacccaacccaacucgacugaagucagccucacugaaccggaucugagaaucuucucucucugggcuugccagggcucuccgaaccuagcuagcauccucuucaauuccaacuagaaagcuuaccauguucguguuccuggugcugcugccccuggugagcagccagugcgugaacuucaccaaccggacccagcugcccagcgccuacaccaacagcuucacccggggcguguacuacccugacaagguguuccggagcagcgugcugcacagcacccaggaccuguuccugcccuucuucagcaacgugaccugguuccacgccauccacgugagcggcaccaacggcaccaagcgguucgacaaccccgugcugccauucaacgacggcguguacuucgccagcaccgagaagucaaacaucauccggggcuggaucuuuggcaccacccuggacagcaagacccagagccugcugaucgugaacaacgccacaaacguggugaucaaggugugcgaguuccaguucugcaacuaccccuuccugggcguguacuaccacaagaacaacaagagcuggauggagagcgaguuccgggucuacagcagcgcuaauaacugcaccuucgaguacgugagccagcccuuccugauggaccuggagggcaagcagggcaacuucaagaaccucagcgaguucguguucaagaacaucgacggcuacuucaagaucuacagcaagcacacccccaucaaccuggugcgggaucugccccagggauucagcgcccuggagccccugguggaccugccuaucggcaucaacaucacccgguuccagacccugcuggcccugcacaggagcuaccugacccccggcgacagcagcagcggcuggaccgccggcgccgccgcauacuacgugggcuaccugcagccccggaccuuccugcugaaguacaacgagaacggcaccaucaccgacgccguggacugcgcccuggacccacugagcgagaccaagugcacccuaaagagcuucaccguggagaagggcaucuaccagaccagcaacuuccgggugcagcccaccgagagcaucgugcgguuccccaacauuacuaaccugugucccuucggcgagguguucaacgccacccgguucgccagcguguacgccuggaaccggaagcggaucagcaacugcguggccgacuacagcgugcuguacaacagcgccagcuucagcaccuucaagugcuacggcgugagccccaccaagcugaacgaccugugcuucaccaacguguacgcugacagcuucgugauccggggcgacgaggugcggcagaucgccccuggccagaccggcaccaucgccgacuacaacuacaagcugcccgacgacuucaccggcugcgugaucgccuggaacagcaacaaccuggacagcaaggugggcggcaacuacaacuaccuguaccggcuguuccguaagagcaaccugaagcccuuugagcgggacaucagcaccgagaucuaccaggccggcagcaccccaugcaacggugugaagggcuucaacugcuacuucccccugcagagcuacggcuuccagcccaccuacggcgugggcuaccagcccuaccgggugguggugcugagcuucgagcugcugcacgcccccgccaccgugugcggccccaaaaagagcaccaaccuggugaagaacaagugcgugaacuucaauuucaacggccugaccggcaccggcgugcugaccgagagcaacaagaaguuccugccuuuccagcaguucggccgggacaucgccgauaccaccgacgcagugcgggacccccagacccuggagauccuggacaucacccccugcagcuucggcggcgugagcgucaucaccccaggcacaaacaccagcaaccagguggccgugcuguaccagggagugaacugcaccgaggugcccguggccauccacgccgaccagcugacccccaccuggcggguguacuccaccggcagcaacguguuccagacccgggccggcugccugaucggcgccgaguacgugaacaacagcuacgagugcgacauccccaucggcgcuggcaucugcgccagcuaccagacccagaccaacagcccccggcgggcccggagcguggccagccagagcaucaucgccuacaccaugagccugggcgccgagaacagcguggccuacagcaacaacagcaucgcgauccccaccaacuucaccaucagcgugaccaccgagauauuaccugugagcaugaccaagaccagcguggacuguaccauguacaucugcggcgacagcaccgagugcagcaaccugcugcugcaguacggcagcuucugcacccagcugaaccgggcccugaccggcaucgccguggagcaggacaagaacacccaagagguguucgcccaggugaagcagaucuacaagacuccacccaucaaggacuucggcggcuucaacuucagccagauccugcccgaccccagcaagcccagcaagcggagcuucaucgaggaccugcuguucaacaaggugacccuggccgacgccggcuucaucaagcaguacggcgacugccugggggacaucgccgcucgggaucugaucugcgcccagaaguucaacggccugaccgugcugccuccccugcugaccgacgagaugaucgcccaguacaccagcgcccugcuggccggcaccaucaccagcggcuggaccuucggcgccggcgcagcccuucagauccccuucgccaugcagauggccuaccgguucaacggcaucggcgugacccagaacgugcuguacgagaaccagaagcugaucgccaaccaguucaacagcgccaucggcaagauccaggacagccugagcagcaccgccagcgcccugggcaagcugcaggacguggugaaccagaacgcucaggcccugaacacccuggugaagcagcugagcucaaacuuuggcgccaucagcagcgugcugaaugacauccugagccggcuggacccacccgaggccgaggugcagaucgacaggcugaucaccggccggcugcagagccugcagaccuacgugacccagcagcugauccgggccgccgagauccgggccagcgccaaccuggcagccauuaagaugagcgagugcgugcugggccagagcaagcggguggacuucugcggcaagggcuaccaccugaugagcuucccccagagcgcuccccacggcgugguguuccugcacgugaccuacguccccgcccaggagaagaacuucacaaccgcccccgccaucugccacgacggcaaggcccacuucccccgggagggaguguucgugagcaacggcacccacugguucgugacccagcggaacuucuacgagccccagaucaucaccaccgacaacaccuucgugagcggcaacugcgacguggugaucggcaucgugaacaacaccguguacgacccucuccagcccgagcuggacagcuucaaggaggagcuggacaaguacuucaagaaccacaccagccccgacguggaccugggcgauaucagcggcaucaacgccagcguggugaacauccagaaggagaucgaccggcugaacgagguggccaagaaccugaacgagagccugaucgaccugcaggagcugggcaaguacgagcaguacaucaaguggccaugguacaucuggcugggcuucaucgccggccugaucgccaucgugauggugaccaucaugcugugcugcaugaccagcugcuguagcugccugaagggcugcugcagcugcggcagcugcugcaaguucgacgaggacgacagcgagcccgugcugaagggcgugaagcugcacuacaccugaggacuagucccuguucccagagcccacuuuuuuuucuuuuuuugaaauaaaauagccugucuuucagaucucaaaggcucuuuucagagccaccaaaaaaaaaaaaaaaaaaaaaaaaaaaaaaaaaaaaaaaaaaaaaaaaaaaaaaaaaaaaaaaaaaaaaaaaaaaaaaaaaaaaaaaaaaaaaaaaaaaaa

SEQ ID NO: 23808 - RNA, 4191 nt, Artificial Sequence
  SARS-CoV-2/Wuhan/WIV05/2019__EPI_ISL_402128 spike protein mRNA gc (1-1273)(K986P_V987P_K986P_V987P_S13I_W152C_L452R_D614G)
aggagagggcgcuuggcuugcaaggacccugagcugcggcauugaagcacacccaacccaacucgacugaagucagccucacugaaccggaucugagaaucuucucucucugggcuugccagggcucuccgaaccuagcuagcauccucuucaauuccaacuagaaagcuuaccauguucguguuccuggugcugcugccccuggugagcauccagugcgugaaccugaccacccggacccagcugcccccugccuacaccaacagcuucacccggggcguguacuaccccgacaagguguuccggagcagcgugcugcacagcacccaggaccuguuccugcccuucuucagcaacgugaccugguuccacgccauccacgugagcggcaccaacggcaccaagcgguucgacaacccagugcugcccuucaacgacggcguguacuucgccagcaccgagaagucaaacaucauccggggcuggaucuucggcaccacccuggacagcaagacacagagccugcugaucgugaacaacgccaccaacguggugaucaaggugugcgaguuucaguucugcaacgaccccuuccugggcguguacuaccacaagaacaacaagagcugcauggagagcgaguuccgggucuacagcagcgcuaacaauugcaccuucgaguacgugagccagcccuuccugauggaccucgagggcaagcagggcaacuucaagaaccugcgggaguucguguucaagaacaucgauggcuacuucaagaucuacagcaagcacacccccaucaaccuggugcgggaccugccccagggauucagcgcccuggagccucugguggaccugcccaucggcaucaacaucaccagguuccagacccugcuggcccugcaccggagcuaccugacccccggcgacagcagcagcggcuggaccgccggcgccgccgcauacuacgugggcuaccugcagccacggaccuuccugcugaaguacaacgagaacggcaccaucaccgacgccguggacugcgcccuggacccccugagcgagaccaaguguacccuaaagagcuucaccguggagaagggcaucuaccagaccagcaacuuccgggugcagcccacugagagcauugugcgguuccccaacaucaccaaccugugccccuucggcgagguguucaacgccacccgguucgccagcguguacgccuggaaccggaagcggaucagcaacugcguggccgacuacagcgugcuguacaacagcgccagcuucagcaccuucaagugcuacggcgugagcccuaccaagcugaacgaccugugcuucaccaacguguacgcugacagcuucgugauccggggcgacgaggugcggcagaucgcccccggccagaccggcaagaucgccgacuacaacuacaagcugcccgacgacuucaccggcugcgugaucgccuggaacagcaacaaccuggacagcaaggugggcggcaacuacaacuaccgguaccggcuguuccguaagagcaaccugaagccauucgagcgggacaucagcaccgagaucuaccaggccggcagcacccccugcaacgguguggagggcuuuaacugcuacuucccccugcagagcuacggcuuccagcccaccaacggcgugggcuaccagcccuaccgggugguggugcugagcuucgagcugcugcacgcccccgccaccgugugcggcccuaaaaagagcaccaaccuggugaagaacaagugcgugaacuucaauuucaacggccugaccggcaccggcgugcugaccgagagcaacaagaaguuccugcccuuccagcaguucggccgggauaucgccgacaccaccgacgcagugcgggacccccagacccuggagauccuggacaucaccccaugcagcuucggcggcgugagcgucaucacccccggcacaaacaccagcaaccagguggccgugcuguaccagggagugaacugcaccgaggugcccguggccauccacgccgaccagcugacccccaccuggcggguguacagcaccggcagcaacguguuccagacccgggccggcugccugaucggcgccgagcacgugaacaacagcuacgagugcgacauccccaucggcgcuggcaucugugccuccuaccagacccagaccaacagcccccggcgggcccggagcguggccagccagagcaucaucgccuacaccaugagccugggcgccgagaacagcguggccuacagcaacaacagcaucgcgaucccuaccaacuucaccauaagcgugaccaccgagaucuuacccgugagcaugaccaagaccagcguggacugcaccauguacaucugcggcgacagcaccgagugcagcaaccugcugcugcaguacggcagcuucugcacccagcugaaccgggcccugaccggcaucgccguggagcaggacaagaacacccaagagguguucgcccaggugaagcagaucuacaagacucccccaaucaaggacuucggcggcuucaacuucagccagauccugcccgaccccagcaagcccagcaagcggagcuucaucgaggaccugcuguucaacaaggugacccuggccgacgccggcuucaucaagcaguacggcgacugccugggggauaucgccgcucgggaccugaucugcgcccagaaguucaacggccugaccgugcugcccccucugcugaccgacgagaugaucgcccaguacaccagcgcccugcuggccggcaccaucaccagcggcuggaccuucggcgccggcgcagcccuucagauccccuucgccaugcagauggccuacagguucaacggcaucggcgugacccagaacgugcuguacgagaaccagaagcugaucgccaaccaguucaacagcgccaucggcaagauccaggacagccugagcagcaccgccagcgcccugggcaagcugcaggacguggugaaccagaacgcucaggcccugaacacccuggugaagcagcugagcagcaacuucggcgccaucagcagcgugcugaaugacauccugucacggcuggaucccccagaggccgaggugcagaucgaccggcugaucaccggccggcugcagagccugcagaccuacgugacccagcagcugauccgggccgccgagauucgggccagcgccaaccuggcagccaccaagaugagcgagugcgugcugggccagagcaagcggguggacuuuugcggcaagggcuaccaccugaugagcuucccccagagcgcuccccacggcgugguguuccugcacgugacauacguccccgcccaggagaagaacuucaccaccgcccccgccaucugccacgacggcaaggcccacuucccccgggagggaguguucgugagcaacggcacccacugguucgugacccagcggaacuucuacgagccucagaucaucaccaccgacaacaccuucgugagcggcaacugcgacguggugaucggcaucgugaacaacaccguguacgacccccuccagcccgagcuggacagcuucaaggaggagcuggacaaguacuucaagaaccacaccagcccagacguggaccugggcgacaucagcggcaucaacgccagcguggugaacauccagaaggagaucgaccggcugaacgagguggccaagaaccugaacgagagccugaucgaccugcaggagcugggcaaguacgagcaguacaucaaguggcccugguacaucuggcugggcuucaucgccggccugaucgccaucgugauggugaccaucaugcugugcugcaugaccagcuguugcagcugccugaagggcugcugcagcugcggcagcugcugcaaguucgacgaggacgacagcgagcccgugcugaagggcgugaagcugcacuacaccugaggacuagucccuguucccagagcccacuuuuuuuucuuuuuuugaaauaaaauagccugucuuucagaucucaaaggcucuuuucagagccaccaaaaaaaaaaaaaaaaaaaaaaaaaaaaaaaaaaaaaaaaaaaaaaaaaaaaaaaaaaaaaaaaaaaaaaaaaaaaaaaaaaaaaaaaaaaaaaaaaaaaa

SEQ ID NO: 23809 - RNA, 4191 nt, Artificial Sequence
  SARS-CoV-2/Wuhan/WIV05/2019__EPI_ISL_402128 spike protein mRNA gc mod (1-1273)(K986P_V987P)
aggagagggcgcuuggcuugcaaggacccugagcugcggcauugaagcacacccaacccaacucgacugaagucagccucacugaaccggaucugagaaucuucucucucugggcuugccagggcucuccgaaccuagcuagcauccucuucaauuccaacuagaaagcuuaccauguucguguuucuggugcugcugccccugguguccagccagugugugaaccugaccaccagaacacagcugccuccagccuacaccaacagcuucaccagaggcguguacuaccccgacaagguguucagauccagcgugcugcacucuacccaggaccuguuccugccuuucuucagcaacgugaccugguuccacgccauccacguguccggcaccaauggcaccaagagauucgacaaccccgugcugcccuucaacgacgggguguacuuugccagcaccgagaaguccaacaucaucagaggcuggaucuucggcaccacacuggacagcaagacccagagccugcugaucgugaacaacgccaccaacguggucaucaaagugugcgaguuccaguucugcaacgaccccuuccugggcgucuacuaccacaagaacaacaagagcuggauggaaagcgaguuccggguguacagcagcgccaacaacugcaccuucgaguacgugucccagccuuuccugauggaccuggaaggcaagcagggcaacuucaagaaccugcgcgaguucguguucaagaacaucgacggcuacuucaaaaucuacagcaagcacaccccuaucaaccucgugcgggaucugccucagggcuucucugcucuggaaccccugguggaucugcccaucggcaucaacaucacccgguuucagacacugcuggcccugcacagaagcuaccugacaccuggcgauagcagcagcggauggacagcuggugccgccgcuuacuaugugggcuaccugcagccuagaaccuuccugcugaaguacaacgagaacggcaccaucaccgacgccguggauugugcucuggauccucugagcgagacaaagugcacccugaaguccuucaccguggaaaagggcaucuaccagaccagcaacuuccgggugcagcccaccgaauccaucgugcgguuccccaauaucaccaaucugugccccuucggcgagguguucaaugccaccagauucgccucuguguacgccuggaaccggaagcggaucagcaauugcguggccgacuacuccgugcuguacaacuccgccagcuucagcaccuucaagugcuacggcguguccccuaccaagcugaacgaccugugcuucacaaacguguacgccgacagcuucgugauccggggagaugaagugcggcagauugccccuggacagacaggcaagaucgccgacuacaacuacaagcugcccgacgacuucaccggcugugugauugccuggaacagcaacaaccuggacuccaaagucggcggcaacuacaauuaccuguaccggcuguuccggaaguccaaucugaagcccuucgagcgggacaucagcaccgaaaucuaucaggccggcagcaccccuugcaacggcguggaaggcuucaacugcuacuucccacugcaguccuacggcuuucagcccacaaauggcgugggcuaucagcccuacagagugguggugcugagcuucgaacugcugcaugcuccugccacagugugcggcccuaagaaaagcaccaaucucgugaagaacaaaugcgugaacuucaacuucaacggccugaccggcaccggcgugcugacagagagcaacaagaaguuccugccauuccagcaguuuggccgggauaucgccgauaccacagacgccguuagagauccccagacacuggaaauccuggacaucaccccaugcagcuucggcggagugucugugaucaccccuggcaccaacaccagcaaucagguggcagugcuguaccaggacgugaacuguaccgaagugcccguggccauucacgccgaucagcugacaccuacauggcggguguacuccaccggcagcaauguguuucagaccagagccggcugucugaucggagccgagcacgugaacaauagcuacgagugcgacauccccaucggcgcuggcaucugugccagcuaccagacacagacaaacagccccagacgggcuagaagcguggccagccagagcaucauugccuacacaaugucucugggcgccgagaacagcguggccuacuccaacaacucuaucgcuauccccaccaacuucaccaucagcgugaccaccgagauccugccuguguccaugaccaagaccagcguggacugcaccauguacaucugcggcgauuccaccgagugcuccaaccugcugcugcaguacggcagcuucugcacccagcugaauagagcccugacagggaucgccguggaacaggacaagaacacccaagagguguucgcccaagugaagcaaaucuacaagaccccuccuaucaaggacuucggcggcuucaauuucagccagauucugcccgauccuagcaagcccagcaagcggagcuucaucgaggaccugcuguucaacaaagugacacuggccgacgccggcuucaucaagcaguauggcgauugucugggcgacauugccgccagggaucugauuugcgcccagaaguuuaacggacugacagugcugccuccucugcugaccgaugagaugaucgcccaguacacaucugcccugcuggccggcacaaucacaagcggcuggacauuuggagcuggcgccgcucugcagauccccuuugcuaugcagauggccuaccgguucaacggcaucggagugacccagaaugugcuguacgagaaccagaagcugaucgccaaccaguucaacagcgccaucggcaagauccaggacagccugagcagcacagcaagcgcccugggaaagcugcaggacguggucaaccagaaugcccaggcacugaacacccuggucaagcagcuguccuccaacuucggcgccaucagcucugugcugaacgauauccugagcagacuggacccuccugaggccgaggugcagaucgacagacugaucacaggcagacugcagagccuccagacauacgugacccagcagcugaucagagccgccgagauuagagccucugccaaucuggccgccaccaagaugucugagugugugcugggccagagcaagagaguggacuuuugcggcaagggcuaccaccugaugagcuucccucagucugccccucacggcgugguguuucugcacgugacauaugugcccgcucaagagaagaauuucaccaccgcuccagccaucugccacgacggcaaagcccacuuuccuagagaaggcguguucguguccaacggcacccauugguucgugacacagcggaacuucuacgagccccagaucaucaccaccgacaacaccuucgugucuggcaacugcgacguugugaucggcauugugaacaauaccguguacgacccucugcagcccgagcuggacagcuucaaagaggaacuggacaaguacuuuaagaaccacacaagccccgacguggaccugggcgauaucagcggaaucaaugccagcgucgugaacauccagaaagagaucgaccggcugaacgagguggccaagaaucugaacgagagccugaucgaccugcaagaacuggggaaguacgagcaguacaucaaguggcccugguacaucuggcugggcuuuaucgccggacugauugccaucgugauggucacaaucaugcuguguugcaugaccagcugcuguagcugccugaagggcuguuguagcuguggcagcugcugcaaguucgacgaggacgauucugagcccgugcugaagggcgugaaacugcacuacaccugaggacuagucccuguucccagagcccacuuuuuuuucuuuuuuugaaauaaaauagccugucuuucagaucucaaaggcucuuuucagagccaccaaaaaaaaaaaaaaaaaaaaaaaaaaaaaaaaaaaaaaaaaaaaaaaaaaaaaaaaaaaaaaaaaaaaaaaaaaaaaaaaaaaaaaaaaaaaaaaaaaaaa

SEQ ID NO: 23810 - RNA, 4191 nt, Artificial Sequence
  SARS-CoV-2/Wuhan/WIV05/2019__EPI_ISL_402128 spike protein mRNA gc mod (1-1273)(K986P_V987P_ D614G)
aggagagggcgcuuggcuugcaaggacccugagcugcggcauugaagcacacccaacccaacucgacugaagucagccucacugaaccggaucugagaaucuucucucucugggcuugccagggcucuccgaaccuagcuagcauccucuucaauuccaacuagaaagcuuaccauguucguguuucuggugcugcugccccugguguccagccagugugugaaccugaccaccagaacacagcugccuccagccuacaccaacagcuucaccagaggcguguacuaccccgacaagguguucagauccagcgugcugcacucuacccaggaccuguuccugccuuucuucagcaacgugaccugguuccacgccauccacguguccggcaccaauggcaccaagagauucgacaaccccgugcugcccuucaacgacgggguguacuuugccagcaccgagaaguccaacaucaucagaggcuggaucuucggcaccacacuggacagcaagacccagagccugcugaucgugaacaacgccaccaacguggucaucaaagugugcgaguuccaguucugcaacgaccccuuccugggcgucuacuaccacaagaacaacaagagcuggauggaaagcgaguuccggguguacagcagcgccaacaacugcaccuucgaguacgugucccagccuuuccugauggaccuggaaggcaagcagggcaacuucaagaaccugcgcgaguucguguucaagaacaucgacggcuacuucaaaaucuacagcaagcacaccccuaucaaccucgugcgggaucugccucagggcuucucugcucuggaaccccugguggaucugcccaucggcaucaacaucacccgguuucagacacugcuggcccugcacagaagcuaccugacaccuggcgauagcagcagcggauggacagcuggugccgccgcuuacuaugugggcuaccugcagccuagaaccuuccugcugaaguacaacgagaacggcaccaucaccgacgccguggauugugcucuggauccucugagcgagacaaagugcacccugaaguccuucaccguggaaaagggcaucuaccagaccagcaacuuccgggugcagcccaccgaauccaucgugcgguuccccaauaucaccaaucugugccccuucggcgagguguucaaugccaccagauucgccucuguguacgccuggaaccggaagcggaucagcaauugcguggccgacuacuccgugcuguacaacuccgccagcuucagcaccuucaagugcuacggcguguccccuaccaagcugaacgaccugugcuucacaaacguguacgccgacagcuucgugauccggggagaugaagugcggcagauugccccuggacagacaggcaagaucgccgacuacaacuacaagcugcccgacgacuucaccggcugugugauugccuggaacagcaacaaccuggacuccaaagucggcggcaacuacaauuaccuguaccggcuguuccggaaguccaaucugaagcccuucgagcgggacaucagcaccgaaaucuaucaggccggcagcaccccuugcaacggcguggaaggcuucaacugcuacuucccacugcaguccuacggcuuucagcccacaaauggcgugggcuaucagcccuacagagugguggugcugagcuucgaacugcugcaugcuccugccacagugugcggcccuaagaaaagcaccaaucucgugaagaacaaaugcgugaacuucaacuucaacggccugaccggcaccggcgugcugacagagagcaacaagaaguuccugccauuccagcaguuuggccgggauaucgccgauaccacagacgccguuagagauccccagacacuggaaauccuggacaucaccccaugcagcuucggcggagugucugugaucaccccuggcaccaacaccagcaaucagguggcagugcuguaccagggcgugaacuguaccgaagugcccguggccauucacgccgaucagcugacaccuacauggcggguguacuccaccggcagcaauguguuucagaccagagccggcugucugaucggagccgagcacgugaacaauagcuacgagugcgacauccccaucggcgcuggcaucugugccagcuaccagacacagacaaacagccccagacgggcuagaagcguggccagccagagcaucauugccuacacaaugucucugggcgccgagaacagcguggccuacuccaacaacucuaucgcuauccccaccaacuucaccaucagcgugaccaccgagauccugccuguguccaugaccaagaccagcguggacugcaccauguacaucugcggcgauuccaccgagugcuccaaccugcugcugcaguacggcagcuucugcacccagcugaauagagcccugacagggaucgccguggaacaggacaagaacacccaagagguguucgcccaagugaagcaaaucuacaagaccccuccuaucaaggacuucggcggcuucaauuucagccagauucugcccgauccuagcaagcccagcaagcggagcuucaucgaggaccugcuguucaacaaagugacacuggccgacgccggcuucaucaagcaguauggcgauugucugggcgacauugccgccagggaucugauuugcgcccagaaguuuaacggacugacagugcugccuccucugcugaccgaugagaugaucgcccaguacacaucugcccugcuggccggcacaaucacaagcggcuggacauuuggagcuggcgccgcucugcagauccccuuugcuaugcagauggccuaccgguucaacggcaucggagugacccagaaugugcuguacgagaaccagaagcugaucgccaaccaguucaacagcgccaucggcaagauccaggacagccugagcagcacagcaagcgcccugggaaagcugcaggacguggucaaccagaaugcccaggcacugaacacccuggucaagcagcuguccuccaacuucggcgccaucagcucugugcugaacgauauccugagcagacuggacccuccugaggccgaggugcagaucgacagacugaucacaggcagacugcagagccuccagacauacgugacccagcagcugaucagagccgccgagauuagagccucugccaaucuggccgccaccaagaugucugagugugugcugggccagagcaagagaguggacuuuugcggcaagggcuaccaccugaugagcuucccucagucugccccucacggcgugguguuucugcacgugacauaugugcccgcucaagagaagaauuucaccaccgcuccagccaucugccacgacggcaaagcccacuuuccuagagaaggcguguucguguccaacggcacccauugguucgugacacagcggaacuucuacgagccccagaucaucaccaccgacaacaccuucgugucuggcaacugcgacguugugaucggcauugugaacaauaccguguacgacccucugcagcccgagcuggacagcuucaaagaggaacuggacaaguacuuuaagaaccacacaagccccgacguggaccugggcgauaucagcggaaucaaugccagcgucgugaacauccagaaagagaucgaccggcugaacgagguggccaagaaucugaacgagagccugaucgaccugcaagaacuggggaaguacgagcaguacaucaaguggcccugguacaucuggcugggcuuuaucgccggacugauugccaucgugauggucacaaucaugcuguguugcaugaccagcugcuguagcugccugaagggcuguuguagcuguggcagcugcugcaaguucgacgaggacgauucugagcccgugcugaagggcgugaaacugcacuacaccugaggacuagucccuguucccagagcccacuuuuuuuucuuuuuuugaaauaaaauagccugucuuucagaucucaaaggcucuuuucagagccaccaaaaaaaaaaaaaaaaaaaaaaaaaaaaaaaaaaaaaaaaaaaaaaaaaaaaaaaaaaaaaaaaaaaaaaaaaaaaaaaaaaaaaaaaaaaaaaaaaaaaa

SEQ ID NO: 23811 - RNA, 4191 nt, Artificial Sequence
  SARS-CoV-2/Wuhan/WIV05/2019__EPI_ISL_402128 spike protein mRNA gc mod (1-1273)(K986P_V987P_A222V_D614G)
aggagagggcgcuuggcuugcaaggacccugagcugcggcauugaagcacacccaacccaacucgacugaagucagccucacugaaccggaucugagaaucuucucucucugggcuugccagggcucuccgaaccuagcuagcauccucuucaauuccaacuagaaagcuuaccauguucguguuucuggugcugcugccccugguguccagccagugugugaaccugaccaccagaacacagcugccuccagccuacaccaacagcuucaccagaggcguguacuaccccgacaagguguucagauccagcgugcugcacucuacccaggaccuguuccugccuuucuucagcaacgugaccugguuccacgccauccacguguccggcaccaauggcaccaagagauucgacaaccccgugcugcccuucaacgacgggguguacuuugccagcaccgagaaguccaacaucaucagaggcuggaucuucggcaccacacuggacagcaagacccagagccugcugaucgugaacaacgccaccaacguggucaucaaagugugcgaguuccaguucugcaacgaccccuuccugggcgucuacuaccacaagaacaacaagagcuggauggaaagcgaguuccggguguacagcagcgccaacaacugcaccuucgaguacgugucccagccuuuccugauggaccuggaaggcaagcagggcaacuucaagaaccugcgcgaguucguguucaagaacaucgacggcuacuucaaaaucuacagcaagcacaccccuaucaaccucgugcgggaucugccucagggcuucucugugcuggaaccccugguggaucugcccaucggcaucaacaucacccgguuucagacacugcuggcccugcacagaagcuaccugacaccuggcgauagcagcagcggauggacagcuggugccgccgcuuacuaugugggcuaccugcagccuagaaccuuccugcugaaguacaacgagaacggcaccaucaccgacgccguggauugugcucuggauccucugagcgagacaaagugcacccugaaguccuucaccguggaaaagggcaucuaccagaccagcaacuuccgggugcagcccaccgaauccaucgugcgguuccccaauaucaccaaucugugccccuucggcgagguguucaaugccaccagauucgccucuguguacgccuggaaccggaagcggaucagcaauugcguggccgacuacuccgugcuguacaacuccgccagcuucagcaccuucaagugcuacggcguguccccuaccaagcugaacgaccugugcuucacaaacguguacgccgacagcuucgugauccggggagaugaagugcggcagauugccccuggacagacaggcaagaucgccgacuacaacuacaagcugcccgacgacuucaccggcugugugauugccuggaacagcaacaaccuggacuccaaagucggcggcaacuacaauuaccuguaccggcuguuccggaaguccaaucugaagcccuucgagcgggacaucagcaccgaaaucuaucaggccggcagcaccccuugcaacggcguggaaggcuucaacugcuacuucccacugcaguccuacggcuuucagcccacaaauggcgugggcuaucagcccuacagagugguggugcugagcuucgaacugcugcaugcuccugccacagugugcggcccuaagaaaagcaccaaucucgugaagaacaaaugcgugaacuucaacuucaacggccugaccggcaccggcgugcugacagagagcaacaagaaguuccugccauuccagcaguuuggccgggauaucgccgauaccacagacgccguuagagauccccagacacuggaaauccuggacaucaccccaugcagcuucggcggagugucugugaucaccccuggcaccaacaccagcaaucagguggcagugcuguaccagggcgugaacuguaccgaagugcccguggccauucacgccgaucagcugacaccuacauggcggguguacuccaccggcagcaauguguuucagaccagagccggcugucugaucggagccgagcacgugaacaauagcuacgagugcgacauccccaucggcgcuggcaucugugccagcuaccagacacagacaaacagccccagacgggcuagaagcguggccagccagagcaucauugccuacacaaugucucugggcgccgagaacagcguggccuacuccaacaacucuaucgcuauccccaccaacuucaccaucagcgugaccaccgagauccugccuguguccaugaccaagaccagcguggacugcaccauguacaucugcggcgauuccaccgagugcuccaaccugcugcugcaguacggcagcuucugcacccagcugaauagagcccugacagggaucgccguggaacaggacaagaacacccaagagguguucgcccaagugaagcaaaucuacaagaccccuccuaucaaggacuucggcggcuucaauuucagccagauucugcccgauccuagcaagcccagcaagcggagcuucaucgaggaccugcuguucaacaaagugacacuggccgacgccggcuucaucaagcaguauggcgauugucugggcgacauugccgccagggaucugauuugcgcccagaaguuuaacggacugacagugcugccuccucugcugaccgaugagaugaucgcccaguacacaucugcccugcuggccggcacaaucacaagcggcuggacauuuggagcuggcgccgcucugcagauccccuuugcuaugcagauggccuaccgguucaacggcaucggagugacccagaaugugcuguacgagaaccagaagcugaucgccaaccaguucaacagcgccaucggcaagauccaggacagccugagcagcacagcaagcgcccugggaaagcugcaggacguggucaaccagaaugcccaggcacugaacacccuggucaagcagcuguccuccaacuucggcgccaucagcucugugcugaacgauauccugagcagacuggacccuccugaggccgaggugcagaucgacagacugaucacaggcagacugcagagccuccagacauacgugacccagcagcugaucagagccgccgagauuagagccucugccaaucuggccgccaccaagaugucugagugugugcugggccagagcaagagaguggacuuuugcggcaagggcuaccaccugaugagcuucccucagucugccccucacggcgugguguuucugcacgugacauaugugcccgcucaagagaagaauuucaccaccgcuccagccaucugccacgacggcaaagcccacuuuccuagagaaggcguguucguguccaacggcacccauugguucgugacacagcggaacuucuacgagccccagaucaucaccaccgacaacaccuucgugucuggcaacugcgacguugugaucggcauugugaacaauaccguguacgacccucugcagcccgagcuggacagcuucaaagaggaacuggacaaguacuuuaagaaccacacaagccccgacguggaccugggcgauaucagcggaaucaaugccagcgucgugaacauccagaaagagaucgaccggcugaacgagguggccaagaaucugaacgagagccugaucgaccugcaagaacuggggaaguacgagcaguacaucaaguggcccugguacaucuggcugggcuuuaucgccggacugauugccaucgugauggucacaaucaugcuguguugcaugaccagcugcuguagcugccugaagggcuguuguagcuguggcagcugcugcaaguucgacgaggacgauucugagcccgugcugaagggcgugaaacugcacuacaccugaggacuagucccuguucccagagcccacuuuuuuuucuuuuuuugaaauaaaauagccugucuuucagaucucaaaggcucuuuucagagccaccaaaaaaaaaaaaaaaaaaaaaaaaaaaaaaaaaaaaaaaaaaaaaaaaaaaaaaaaaaaaaaaaaaaaaaaaaaaaaaaaaaaaaaaaaaaaaaaaaaaaa

SEQ ID NO: 23812 - RNA, 4191 nt, Artificial Sequence
  SARS-CoV-2/Wuhan/WIV05/2019__EPI_ISL_402128 spike protein mRNA gc mod (1-1273)(K986P_V987P_N439K_D614G)
aggagagggcgcuuggcuugcaaggacccugagcugcggcauugaagcacacccaacccaacucgacugaagucagccucacugaaccggaucugagaaucuucucucucugggcuugccagggcucuccgaaccuagcuagcauccucuucaauuccaacuagaaagcuuaccauguucguguuucuggugcugcugccccugguguccagccagugugugaaccugaccaccagaacacagcugccuccagccuacaccaacagcuucaccagaggcguguacuaccccgacaagguguucagauccagcgugcugcacucuacccaggaccuguuccugccuuucuucagcaacgugaccugguuccacgccauccacguguccggcaccaauggcaccaagagauucgacaaccccgugcugcccuucaacgacgggguguacuuugccagcaccgagaaguccaacaucaucagaggcuggaucuucggcaccacacuggacagcaagacccagagccugcugaucgugaacaacgccaccaacguggucaucaaagugugcgaguuccaguucugcaacgaccccuuccugggcgucuacuaccacaagaacaacaagagcuggauggaaagcgaguuccggguguacagcagcgccaacaacugcaccuucgaguacgugucccagccuuuccugauggaccuggaaggcaagcagggcaacuucaagaaccugcgcgaguucguguucaagaacaucgacggcuacuucaaaaucuacagcaagcacaccccuaucaaccucgugcgggaucugccucagggcuucucugcucuggaaccccugguggaucugcccaucggcaucaacaucacccgguuucagacacugcuggcccugcacagaagcuaccugacaccuggcgauagcagcagcggauggacagcuggugccgccgcuuacuaugugggcuaccugcagccuagaaccuuccugcugaaguacaacgagaacggcaccaucaccgacgccguggauugugcucuggauccucugagcgagacaaagugcacccugaaguccuucaccguggaaaagggcaucuaccagaccagcaacuuccgggugcagcccaccgaauccaucgugcgguuccccaauaucaccaaucugugccccuucggcgagguguucaaugccaccagauucgccucuguguacgccuggaaccggaagcggaucagcaauugcguggccgacuacuccgugcuguacaacuccgccagcuucagcaccuucaagugcuacggcguguccccuaccaagcugaacgaccugugcuucacaaacguguacgccgacagcuucgugauccggggagaugaagugcggcagauugccccuggacagacaggcaagaucgccgacuacaacuacaagcugcccgacgacuucaccggcugugugauugccuggaacagcaagaaccuggacuccaaagucggcggcaacuacaauuaccuguaccggcuguuccggaaguccaaucugaagcccuucgagcgggacaucagcaccgaaaucuaucaggccggcagcaccccuugcaacggcguggaaggcuucaacugcuacuucccacugcaguccuacggcuuucagcccacaaauggcgugggcuaucagcccuacagagugguggugcugagcuucgaacugcugcaugcuccugccacagugugcggcccuaagaaaagcaccaaucucgugaagaacaaaugcgugaacuucaacuucaacggccugaccggcaccggcgugcugacagagagcaacaagaaguuccugccauuccagcaguuuggccgggauaucgccgauaccacagacgccguuagagauccccagacacuggaaauccuggacaucaccccaugcagcuucggcggagugucugugaucaccccuggcaccaacaccagcaaucagguggcagugcuguaccagggcgugaacuguaccgaagugcccguggccauucacgccgaucagcugacaccuacauggcggguguacuccaccggcagcaauguguuucagaccagagccggcugucugaucggagccgagcacgugaacaauagcuacgagugcgacauccccaucggcgcuggcaucugugccagcuaccagacacagacaaacagccccagacgggcuagaagcguggccagccagagcaucauugccuacacaaugucucugggcgccgagaacagcguggccuacuccaacaacucuaucgcuauccccaccaacuucaccaucagcgugaccaccgagauccugccuguguccaugaccaagaccagcguggacugcaccauguacaucugcggcgauuccaccgagugcuccaaccugcugcugcaguacggcagcuucugcacccagcugaauagagcccugacagggaucgccguggaacaggacaagaacacccaagagguguucgcccaagugaagcaaaucuacaagaccccuccuaucaaggacuucggcggcuucaauuucagccagauucugcccgauccuagcaagcccagcaagcggagcuucaucgaggaccugcuguucaacaaagugacacuggccgacgccggcuucaucaagcaguauggcgauugucugggcgacauugccgccagggaucugauuugcgcccagaaguuuaacggacugacagugcugccuccucugcugaccgaugagaugaucgcccaguacacaucugcccugcuggccggcacaaucacaagcggcuggacauuuggagcuggcgccgcucugcagauccccuuugcuaugcagauggccuaccgguucaacggcaucggagugacccagaaugugcuguacgagaaccagaagcugaucgccaaccaguucaacagcgccaucggcaagauccaggacagccugagcagcacagcaagcgcccugggaaagcugcaggacguggucaaccagaaugcccaggcacugaacacccuggucaagcagcuguccuccaacuucggcgccaucagcucugugcugaacgauauccugagcagacuggacccuccugaggccgaggugcagaucgacagacugaucacaggcagacugcagagccuccagacauacgugacccagcagcugaucagagccgccgagauuagagccucugccaaucuggccgccaccaagaugucugagugugugcugggccagagcaagagaguggacuuuugcggcaagggcuaccaccugaugagcuucccucagucugccccucacggcgugguguuucugcacgugacauaugugcccgcucaagagaagaauuucaccaccgcuccagccaucugccacgacggcaaagcccacuuuccuagagaaggcguguucguguccaacggcacccauugguucgugacacagcggaacuucuacgagccccagaucaucaccaccgacaacaccuucgugucuggcaacugcgacguugugaucggcauugugaacaauaccguguacgacccucugcagcccgagcuggacagcuucaaagaggaacuggacaaguacuuuaagaaccacacaagccccgacguggaccugggcgauaucagcggaaucaaugccagcgucgugaacauccagaaagagaucgaccggcugaacgagguggccaagaaucugaacgagagccugaucgaccugcaagaacuggggaaguacgagcaguacaucaaguggcccugguacaucuggcugggcuuuaucgccggacugauugccaucgugauggucacaaucaugcuguguugcaugaccagcugcuguagcugccugaagggcuguuguagcuguggcagcugcugcaaguucgacgaggacgauucugagcccgugcugaagggcgugaaacugcacuacaccugaggacuagucccuguucccagagcccacuuuuuuuucuuuuuuugaaauaaaauagccugucuuucagaucucaaaggcucuuuucagagccaccaaaaaaaaaaaaaaaaaaaaaaaaaaaaaaaaaaaaaaaaaaaaaaaaaaaaaaaaaaaaaaaaaaaaaaaaaaaaaaaaaaaaaaaaaaaaaaaaaaaaa

SEQ ID NO: 23813 - RNA, 4191 nt, Artificial Sequence
  SARS-CoV-2/Wuhan/WIV05/2019__EPI_ISL_402128 spike protein mRNA gc mod (1-1273)(K986P_V987P_S477N_D614G)
aggagagggcgcuuggcuugcaaggacccugagcugcggcauugaagcacacccaacccaacucgacugaagucagccucacugaaccggaucugagaaucuucucucucugggcuugccagggcucuccgaaccuagcuagcauccucuucaauuccaacuagaaagcuuaccauguucguguuucuggugcugcugccccugguguccagccagugugugaaccugaccaccagaacacagcugccuccagccuacaccaacagcuucaccagaggcguguacuaccccgacaagguguucagauccagcgugcugcacucuacccaggaccuguuccugccuuucuucagcaacgugaccugguuccacgccauccacguguccggcaccaauggcaccaagagauucgacaaccccgugcugcccuucaacgacgggguguacuuugccagcaccgagaaguccaacaucaucagaggcuggaucuucggcaccacacuggacagcaagacccagagccugcugaucgugaacaacgccaccaacguggucaucaaagugugcgaguuccaguucugcaacgaccccuuccugggcgucuacuaccacaagaacaacaagagcuggauggaaagcgaguuccggguguacagcagcgccaacaacugcaccuucgaguacgugucccagccuuuccugauggaccuggaaggcaagcagggcaacuucaagaaccugcgcgaguucguguucaagaacaucgacggcuacuucaaaaucuacagcaagcacaccccuaucaaccucgugcgggaucugccucagggcuucucugcucuggaaccccugguggaucugcccaucggcaucaacaucacccgguuucagacacugcuggcccugcacagaagcuaccugacaccuggcgauagcagcagcggauggacagcuggugccgccgcuuacuaugugggcuaccugcagccuagaaccuuccugcugaaguacaacgagaacggcaccaucaccgacgccguggauugugcucuggauccucugagcgagacaaagugcacccugaaguccuucaccguggaaaagggcaucuaccagaccagcaacuuccgggugcagcccaccgaauccaucgugcgguuccccaauaucaccaaucugugccccuucggcgagguguucaaugccaccagauucgccucuguguacgccuggaaccggaagcggaucagcaauugcguggccgacuacuccgugcuguacaacuccgccagcuucagcaccuucaagugcuacggcguguccccuaccaagcugaacgaccugugcuucacaaacguguacgccgacagcuucgugauccggggagaugaagugcggcagauugccccuggacagacaggcaagaucgccgacuacaacuacaagcugcccgacgacuucaccggcugugugauugccuggaacagcaacaaccuggacuccaaagucggcggcaacuacaauuaccuguaccggcuguuccggaaguccaaucugaagcccuucgagcgggacaucagcaccgaaaucuaucaggccggcaacaccccuugcaacggcguggaaggcuucaacugcuacuucccacugcaguccuacggcuuucagcccacaaauggcgugggcuaucagcccuacagagugguggugcugagcuucgaacugcugcaugcuccugccacagugugcggcccuaagaaaagcaccaaucucgugaagaacaaaugcgugaacuucaacuucaacggccugaccggcaccggcgugcugacagagagcaacaagaaguuccugccauuccagcaguuuggccgggauaucgccgauaccacagacgccguuagagauccccagacacuggaaauccuggacaucaccccaugcagcuucggcggagugucugugaucaccccuggcaccaacaccagcaaucagguggcagugcuguaccagggcgugaacuguaccgaagugcccguggccauucacgccgaucagcugacaccuacauggcggguguacuccaccggcagcaauguguuucagaccagagccggcugucugaucggagccgagcacgugaacaauagcuacgagugcgacauccccaucggcgcuggcaucugugccagcuaccagacacagacaaacagccccagacgggcuagaagcguggccagccagagcaucauugccuacacaaugucucugggcgccgagaacagcguggccuacuccaacaacucuaucgcuauccccaccaacuucaccaucagcgugaccaccgagauccugccuguguccaugaccaagaccagcguggacugcaccauguacaucugcggcgauuccaccgagugcuccaaccugcugcugcaguacggcagcuucugcacccagcugaauagagcccugacagggaucgccguggaacaggacaagaacacccaagagguguucgcccaagugaagcaaaucuacaagaccccuccuaucaaggacuucggcggcuucaauuucagccagauucugcccgauccuagcaagcccagcaagcggagcuucaucgaggaccugcuguucaacaaagugacacuggccgacgccggcuucaucaagcaguauggcgauugucugggcgacauugccgccagggaucugauuugcgcccagaaguuuaacggacugacagugcugccuccucugcugaccgaugagaugaucgcccaguacacaucugcccugcuggccggcacaaucacaagcggcuggacauuuggagcuggcgccgcucugcagauccccuuugcuaugcagauggccuaccgguucaacggcaucggagugacccagaaugugcuguacgagaaccagaagcugaucgccaaccaguucaacagcgccaucggcaagauccaggacagccugagcagcacagcaagcgcccugggaaagcugcaggacguggucaaccagaaugcccaggcacugaacacccuggucaagcagcuguccuccaacuucggcgccaucagcucugugcugaacgauauccugagcagacuggacccuccugaggccgaggugcagaucgacagacugaucacaggcagacugcagagccuccagacauacgugacccagcagcugaucagagccgccgagauuagagccucugccaaucuggccgccaccaagaugucugagugugugcugggccagagcaagagaguggacuuuugcggcaagggcuaccaccugaugagcuucccucagucugccccucacggcgugguguuucugcacgugacauaugugcccgcucaagagaagaauuucaccaccgcuccagccaucugccacgacggcaaagcccacuuuccuagagaaggcguguucguguccaacggcacccauugguucgugacacagcggaacuucuacgagccccagaucaucaccaccgacaacaccuucgugucuggcaacugcgacguugugaucggcauugugaacaauaccguguacgacccucugcagcccgagcuggacagcuucaaagaggaacuggacaaguacuuuaagaaccacacaagccccgacguggaccugggcgauaucagcggaaucaaugccagcgucgugaacauccagaaagagaucgaccggcugaacgagguggccaagaaucugaacgagagccugaucgaccugcaagaacuggggaaguacgagcaguacaucaaguggcccugguacaucuggcugggcuuuaucgccggacugauugccaucgugauggucacaaucaugcuguguugcaugaccagcugcuguagcugccugaagggcuguuguagcuguggcagcugcugcaaguucgacgaggacgauucugagcccgugcugaagggcgugaaacugcacuacaccugaggacuagucccuguucccagagcccacuuuuuuuucuuuuuuugaaauaaaauagccugucuuucagaucucaaaggcucuuuucagagccaccaaaaaaaaaaaaaaaaaaaaaaaaaaaaaaaaaaaaaaaaaaaaaaaaaaaaaaaaaaaaaaaaaaaaaaaaaaaaaaaaaaaaaaaaaaaaaaaaaaaaa

SEQ ID NO: 23814 - RNA, 4191 nt, Artificial Sequence
  SARS-CoV-2/Wuhan/WIV05/2019__EPI_ISL_402128 spike protein mRNA gc mod (1-1273)(K986P_V987P_N501Y_D614G)
aggagagggcgcuuggcuugcaaggacccugagcugcggcauugaagcacacccaacccaacucgacugaagucagccucacugaaccggaucugagaaucuucucucucugggcuugccagggcucuccgaaccuagcuagcauccucuucaauuccaacuagaaagcuuaccauguucguguuucuggugcugcugccccugguguccagccagugugugaaccugaccaccagaacacagcugccuccagccuacaccaacagcuucaccagaggcguguacuaccccgacaagguguucagauccagcgugcugcacucuacccaggaccuguuccugccuuucuucagcaacgugaccugguuccacgccauccacguguccggcaccaauggcaccaagagauucgacaaccccgugcugcccuucaacgacgggguguacuuugccagcaccgagaaguccaacaucaucagaggcuggaucuucggcaccacacuggacagcaagacccagagccugcugaucgugaacaacgccaccaacguggucaucaaagugugcgaguuccaguucugcaacgaccccuuccugggcgucuacuaccacaagaacaacaagagcuggauggaaagcgaguuccggguguacagcagcgccaacaacugcaccuucgaguacgugucccagccuuuccugauggaccuggaaggcaagcagggcaacuucaagaaccugcgcgaguucguguucaagaacaucgacggcuacuucaaaaucuacagcaagcacaccccuaucaaccucgugcgggaucugccucagggcuucucugcucuggaaccccugguggaucugcccaucggcaucaacaucacccgguuucagacacugcuggcccugcacagaagcuaccugacaccuggcgauagcagcagcggauggacagcuggugccgccgcuuacuaugugggcuaccugcagccuagaaccuuccugcugaaguacaacgagaacggcaccaucaccgacgccguggauugugcucuggauccucugagcgagacaaagugcacccugaaguccuucaccguggaaaagggcaucuaccagaccagcaacuuccgggugcagcccaccgaauccaucgugcgguuccccaauaucaccaaucugugccccuucggcgagguguucaaugccaccagauucgccucuguguacgccuggaaccggaagcggaucagcaauugcguggccgacuacuccgugcuguacaacuccgccagcuucagcaccuucaagugcuacggcguguccccuaccaagcugaacgaccugugcuucacaaacguguacgccgacagcuucgugauccggggagaugaagugcggcagauugccccuggacagacaggcaagaucgccgacuacaacuacaagcugcccgacgacuucaccggcugugugauugccuggaacagcaacaaccuggacuccaaagucggcggcaacuacaauuaccuguaccggcuguuccggaaguccaaucugaagcccuucgagcgggacaucagcaccgaaaucuaucaggccggcagcaccccuugcaacggcguggaaggcuucaacugcuacuucccacugcaguccuacggcuuucagcccacauacggcgugggcuaucagcccuacagagugguggugcugagcuucgaacugcugcaugcuccugccacagugugcggcccuaagaaaagcaccaaucucgugaagaacaaaugcgugaacuucaacuucaacggccugaccggcaccggcgugcugacagagagcaacaagaaguuccugccauuccagcaguuuggccgggauaucgccgauaccacagacgccguuagagauccccagacacuggaaauccuggacaucaccccaugcagcuucggcggagugucugugaucaccccuggcaccaacaccagcaaucagguggcagugcuguaccagggcgugaacuguaccgaagugcccguggccauucacgccgaucagcugacaccuacauggcggguguacuccaccggcagcaauguguuucagaccagagccggcugucugaucggagccgagcacgugaacaauagcuacgagugcgacauccccaucggcgcuggcaucugugccagcuaccagacacagacaaacagccccagacgggcuagaagcguggccagccagagcaucauugccuacacaaugucucugggcgccgagaacagcguggccuacuccaacaacucuaucgcuauccccaccaacuucaccaucagcgugaccaccgagauccugccuguguccaugaccaagaccagcguggacugcaccauguacaucugcggcgauuccaccgagugcuccaaccugcugcugcaguacggcagcuucugcacccagcugaauagagcccugacagggaucgccguggaacaggacaagaacacccaagagguguucgcccaagugaagcaaaucuacaagaccccuccuaucaaggacuucggcggcuucaauuucagccagauucugcccgauccuagcaagcccagcaagcggagcuucaucgaggaccugcuguucaacaaagugacacuggccgacgccggcuucaucaagcaguauggcgauugucugggcgacauugccgccagggaucugauuugcgcccagaaguuuaacggacugacagugcugccuccucugcugaccgaugagaugaucgcccaguacacaucugcccugcuggccggcacaaucacaagcggcuggacauuuggagcuggcgccgcucugcagauccccuuugcuaugcagauggccuaccgguucaacggcaucggagugacccagaaugugcuguacgagaaccagaagcugaucgccaaccaguucaacagcgccaucggcaagauccaggacagccugagcagcacagcaagcgcccugggaaagcugcaggacguggucaaccagaaugcccaggcacugaacacccuggucaagcagcuguccuccaacuucggcgccaucagcucugugcugaacgauauccugagcagacuggacccuccugaggccgaggugcagaucgacagacugaucacaggcagacugcagagccuccagacauacgugacccagcagcugaucagagccgccgagauuagagccucugccaaucuggccgccaccaagaugucugagugugugcugggccagagcaagagaguggacuuuugcggcaagggcuaccaccugaugagcuucccucagucugccccucacggcgugguguuucugcacgugacauaugugcccgcucaagagaagaauuucaccaccgcuccagccaucugccacgacggcaaagcccacuuuccuagagaaggcguguucguguccaacggcacccauugguucgugacacagcggaacuucuacgagccccagaucaucaccaccgacaacaccuucgugucuggcaacugcgacguugugaucggcauugugaacaauaccguguacgacccucugcagcccgagcuggacagcuucaaagaggaacuggacaaguacuuuaagaaccacacaagccccgacguggaccugggcgauaucagcggaaucaaugccagcgucgugaacauccagaaagagaucgaccggcugaacgagguggccaagaaucugaacgagagccugaucgaccugcaagaacuggggaaguacgagcaguacaucaaguggcccugguacaucuggcugggcuuuaucgccggacugauugccaucgugauggucacaaucaugcuguguugcaugaccagcugcuguagcugccugaagggcuguuguagcuguggcagcugcugcaaguucgacgaggacgauucugagcccgugcugaagggcgugaaacugcacuacaccugaggacuagucccuguucccagagcccacuuuuuuuucuuuuuuugaaauaaaauagccugucuuucagaucucaaaggcucuuuucagagccaccaaaaaaaaaaaaaaaaaaaaaaaaaaaaaaaaaaaaaaaaaaaaaaaaaaaaaaaaaaaaaaaaaaaaaaaaaaaaaaaaaaaaaaaaaaaaaaaaaaaaa

SEQ ID NO: 23815 - RNA, 4185 nt, Artificial Sequence
  SARS-CoV-2/Wuhan/WIV05/2019__EPI_ISL_402128 spike protein mRNA gc mod (1-1273)(K986P_V987P_H69del_V70del_D614G)
aggagagggcgcuuggcuugcaaggacccugagcugcggcauugaagcacacccaacccaacucgacugaagucagccucacugaaccggaucugagaaucuucucucucugggcuugccagggcucuccgaaccuagcuagcauccucuucaauuccaacuagaaagcuuaccauguucguguuucuggugcugcugccccugguguccagccagugugugaaccugaccaccagaacacagcugccuccagccuacaccaacagcuucaccagaggcguguacuaccccgacaagguguucagauccagcgugcugcacucuacccaggaccuguuccugccuuucuucagcaacgugaccugguuccacgccaucuccggcaccaauggcaccaagagauucgacaaccccgugcugcccuucaacgacgggguguacuuugccagcaccgagaaguccaacaucaucagaggcuggaucuucggcaccacacuggacagcaagacccagagccugcugaucgugaacaacgccaccaacguggucaucaaagugugcgaguuccaguucugcaacgaccccuuccugggcgucuacuaccacaagaacaacaagagcuggauggaaagcgaguuccggguguacagcagcgccaacaacugcaccuucgaguacgugucccagccuuuccugauggaccuggaaggcaagcagggcaacuucaagaaccugcgcgaguucguguucaagaacaucgacggcuacuucaaaaucuacagcaagcacaccccuaucaaccucgugcgggaucugccucagggcuucucugcucuggaaccccugguggaucugcccaucggcaucaacaucacccgguuucagacacugcuggcccugcacagaagcuaccugacaccuggcgauagcagcagcggauggacagcuggugccgccgcuuacuaugugggcuaccugcagccuagaaccuuccugcugaaguacaacgagaacggcaccaucaccgacgccguggauugugcucuggauccucugagcgagacaaagugcacccugaaguccuucaccguggaaaagggcaucuaccagaccagcaacuuccgggugcagcccaccgaauccaucgugcgguuccccaauaucaccaaucugugccccuucggcgagguguucaaugccaccagauucgccucuguguacgccuggaaccggaagcggaucagcaauugcguggccgacuacuccgugcuguacaacuccgccagcuucagcaccuucaagugcuacggcguguccccuaccaagcugaacgaccugugcuucacaaacguguacgccgacagcuucgugauccggggagaugaagugcggcagauugccccuggacagacaggcaagaucgccgacuacaacuacaagcugcccgacgacuucaccggcugugugauugccuggaacagcaacaaccuggacuccaaagucggcggcaacuacaauuaccuguaccggcuguuccggaaguccaaucugaagcccuucgagcgggacaucagcaccgaaaucuaucaggccggcagcaccccuugcaacggcguggaaggcuucaacugcuacuucccacugcaguccuacggcuuucagcccacaaauggcgugggcuaucagcccuacagagugguggugcugagcuucgaacugcugcaugcuccugccacagugugcggcccuaagaaaagcaccaaucucgugaagaacaaaugcgugaacuucaacuucaacggccugaccggcaccggcgugcugacagagagcaacaagaaguuccugccauuccagcaguuuggccgggauaucgccgauaccacagacgccguuagagauccccagacacuggaaauccuggacaucaccccaugcagcuucggcggagugucugugaucaccccuggcaccaacaccagcaaucagguggcagugcuguaccagggcgugaacuguaccgaagugcccguggccauucacgccgaucagcugacaccuacauggcggguguacuccaccggcagcaauguguuucagaccagagccggcugucugaucggagccgagcacgugaacaauagcuacgagugcgacauccccaucggcgcuggcaucugugccagcuaccagacacagacaaacagccccagacgggcuagaagcguggccagccagagcaucauugccuacacaaugucucugggcgccgagaacagcguggccuacuccaacaacucuaucgcuauccccaccaacuucaccaucagcgugaccaccgagauccugccuguguccaugaccaagaccagcguggacugcaccauguacaucugcggcgauuccaccgagugcuccaaccugcugcugcaguacggcagcuucugcacccagcugaauagagcccugacagggaucgccguggaacaggacaagaacacccaagagguguucgcccaagugaagcaaaucuacaagaccccuccuaucaaggacuucggcggcuucaauuucagccagauucugcccgauccuagcaagcccagcaagcggagcuucaucgaggaccugcuguucaacaaagugacacuggccgacgccggcuucaucaagcaguauggcgauugucugggcgacauugccgccagggaucugauuugcgcccagaaguuuaacggacugacagugcugccuccucugcugaccgaugagaugaucgcccaguacacaucugcccugcuggccggcacaaucacaagcggcuggacauuuggagcuggcgccgcucugcagauccccuuugcuaugcagauggccuaccgguucaacggcaucggagugacccagaaugugcuguacgagaaccagaagcugaucgccaaccaguucaacagcgccaucggcaagauccaggacagccugagcagcacagcaagcgcccugggaaagcugcaggacguggucaaccagaaugcccaggcacugaacacccuggucaagcagcuguccuccaacuucggcgccaucagcucugugcugaacgauauccugagcagacuggacccuccugaggccgaggugcagaucgacagacugaucacaggcagacugcagagccuccagacauacgugacccagcagcugaucagagccgccgagauuagagccucugccaaucuggccgccaccaagaugucugagugugugcugggccagagcaagagaguggacuuuugcggcaagggcuaccaccugaugagcuucccucagucugccccucacggcgugguguuucugcacgugacauaugugcccgcucaagagaagaauuucaccaccgcuccagccaucugccacgacggcaaagcccacuuuccuagagaaggcguguucguguccaacggcacccauugguucgugacacagcggaacuucuacgagccccagaucaucaccaccgacaacaccuucgugucuggcaacugcgacguugugaucggcauugugaacaauaccguguacgacccucugcagcccgagcuggacagcuucaaagaggaacuggacaaguacuuuaagaaccacacaagccccgacguggaccugggcgauaucagcggaaucaaugccagcgucgugaacauccagaaagagaucgaccggcugaacgagguggccaagaaucugaacgagagccugaucgaccugcaagaacuggggaaguacgagcaguacaucaaguggcccugguacaucuggcugggcuuuaucgccggacugauugccaucgugauggucacaaucaugcuguguugcaugaccagcugcuguagcugccugaagggcuguuguagcuguggcagcugcugcaaguucgacgaggacgauucugagcccgugcugaagggcgugaaacugcacuacaccugaggacuagucccuguucccagagcccacuuuuuuuucuuuuuuugaaauaaaauagccugucuuucagaucucaaaggcucuuuucagagccaccaaaaaaaaaaaaaaaaaaaaaaaaaaaaaaaaaaaaaaaaaaaaaaaaaaaaaaaaaaaaaaaaaaaaaaaaaaaaaaaaaaaaaaaaaaaaaaaaaaaaa

SEQ ID NO: 23816 - RNA, 4191 nt, Artificial Sequence
  SARS-CoV-2/Wuhan/WIV05/2019__EPI_ISL_402128 spike protein mRNA gc mod (1-1273)(K986P_V987P_Y453F_D614G)
aggagagggcgcuuggcuugcaaggacccugagcugcggcauugaagcacacccaacccaacucgacugaagucagccucacugaaccggaucugagaaucuucucucucugggcuugccagggcucuccgaaccuagcuagcauccucuucaauuccaacuagaaagcuuaccauguucguguuucuggugcugcugccccugguguccagccagugugugaaccugaccaccagaacacagcugccuccagccuacaccaacagcuucaccagaggcguguacuaccccgacaagguguucagauccagcgugcugcacucuacccaggaccuguuccugccuuucuucagcaacgugaccugguuccacgccauccacguguccggcaccaauggcaccaagagauucgacaaccccgugcugcccuucaacgacgggguguacuuugccagcaccgagaaguccaacaucaucagaggcuggaucuucggcaccacacuggacagcaagacccagagccugcugaucgugaacaacgccaccaacguggucaucaaagugugcgaguuccaguucugcaacgaccccuuccugggcgucuacuaccacaagaacaacaagagcuggauggaaagcgaguuccggguguacagcagcgccaacaacugcaccuucgaguacgugucccagccuuuccugauggaccuggaaggcaagcagggcaacuucaagaaccugcgcgaguucguguucaagaacaucgacggcuacuucaaaaucuacagcaagcacaccccuaucaaccucgugcgggaucugccucagggcuucucugcucuggaaccccugguggaucugcccaucggcaucaacaucacccgguuucagacacugcuggcccugcacagaagcuaccugacaccuggcgauagcagcagcggauggacagcuggugccgccgcuuacuaugugggcuaccugcagccuagaaccuuccugcugaaguacaacgagaacggcaccaucaccgacgccguggauugugcucuggauccucugagcgagacaaagugcacccugaaguccuucaccguggaaaagggcaucuaccagaccagcaacuuccgggugcagcccaccgaauccaucgugcgguuccccaauaucaccaaucugugccccuucggcgagguguucaaugccaccagauucgccucuguguacgccuggaaccggaagcggaucagcaauugcguggccgacuacuccgugcuguacaacuccgccagcuucagcaccuucaagugcuacggcguguccccuaccaagcugaacgaccugugcuucacaaacguguacgccgacagcuucgugauccggggagaugaagugcggcagauugccccuggacagacaggcaagaucgccgacuacaacuacaagcugcccgacgacuucaccggcugugugauugccuggaacagcaacaaccuggacuccaaagucggcggcaacuacaauuaccuguuccggcuguuccggaaguccaaucugaagcccuucgagcgggacaucagcaccgaaaucuaucaggccggcagcaccccuugcaacggcguggaaggcuucaacugcuacuucccacugcaguccuacggcuuucagcccacaaauggcgugggcuaucagcccuacagagugguggugcugagcuucgaacugcugcaugcuccugccacagugugcggcccuaagaaaagcaccaaucucgugaagaacaaaugcgugaacuucaacuucaacggccugaccggcaccggcgugcugacagagagcaacaagaaguuccugccauuccagcaguuuggccgggauaucgccgauaccacagacgccguuagagauccccagacacuggaaauccuggacaucaccccaugcagcuucggcggagugucugugaucaccccuggcaccaacaccagcaaucagguggcagugcuguaccagggcgugaacuguaccgaagugcccguggccauucacgccgaucagcugacaccuacauggcggguguacuccaccggcagcaauguguuucagaccagagccggcugucugaucggagccgagcacgugaacaauagcuacgagugcgacauccccaucggcgcuggcaucugugccagcuaccagacacagacaaacagccccagacgggcuagaagcguggccagccagagcaucauugccuacacaaugucucugggcgccgagaacagcguggccuacuccaacaacucuaucgcuauccccaccaacuucaccaucagcgugaccaccgagauccugccuguguccaugaccaagaccagcguggacugcaccauguacaucugcggcgauuccaccgagugcuccaaccugcugcugcaguacggcagcuucugcacccagcugaauagagcccugacagggaucgccguggaacaggacaagaacacccaagagguguucgcccaagugaagcaaaucuacaagaccccuccuaucaaggacuucggcggcuucaauuucagccagauucugcccgauccuagcaagcccagcaagcggagcuucaucgaggaccugcuguucaacaaagugacacuggccgacgccggcuucaucaagcaguauggcgauugucugggcgacauugccgccagggaucugauuugcgcccagaaguuuaacggacugacagugcugccuccucugcugaccgaugagaugaucgcccaguacacaucugcccugcuggccggcacaaucacaagcggcuggacauuuggagcuggcgccgcucugcagauccccuuugcuaugcagauggccuaccgguucaacggcaucggagugacccagaaugugcuguacgagaaccagaagcugaucgccaaccaguucaacagcgccaucggcaagauccaggacagccugagcagcacagcaagcgcccugggaaagcugcaggacguggucaaccagaaugcccaggcacugaacacccuggucaagcagcuguccuccaacuucggcgccaucagcucugugcugaacgauauccugagcagacuggacccuccugaggccgaggugcagaucgacagacugaucacaggcagacugcagagccuccagacauacgugacccagcagcugaucagagccgccgagauuagagccucugccaaucuggccgccaccaagaugucugagugugugcugggccagagcaagagaguggacuuuugcggcaagggcuaccaccugaugagcuucccucagucugccccucacggcgugguguuucugcacgugacauaugugcccgcucaagagaagaauuucaccaccgcuccagccaucugccacgacggcaaagcccacuuuccuagagaaggcguguucguguccaacggcacccauugguucgugacacagcggaacuucuacgagccccagaucaucaccaccgacaacaccuucgugucuggcaacugcgacguugugaucggcauugugaacaauaccguguacgacccucugcagcccgagcuggacagcuucaaagaggaacuggacaaguacuuuaagaaccacacaagccccgacguggaccugggcgauaucagcggaaucaaugccagcgucgugaacauccagaaagagaucgaccggcugaacgagguggccaagaaucugaacgagagccugaucgaccugcaagaacuggggaaguacgagcaguacaucaaguggcccugguacaucuggcugggcuuuaucgccggacugauugccaucgugauggucacaaucaugcuguguugcaugaccagcugcuguagcugccugaagggcuguuguagcuguggcagcugcugcaaguucgacgaggacgauucugagcccgugcugaagggcgugaaacugcacuacaccugaggacuagucccuguucccagagcccacuuuuuuuucuuuuuuugaaauaaaauagccugucuuucagaucucaaaggcucuuuucagagccaccaaaaaaaaaaaaaaaaaaaaaaaaaaaaaaaaaaaaaaaaaaaaaaaaaaaaaaaaaaaaaaaaaaaaaaaaaaaaaaaaaaaaaaaaaaaaaaaaaaaaa

SEQ ID NO: 23817 - RNA, 4191 nt, Artificial Sequence
  SARS-CoV-2/Wuhan/WIV05/2019__EPI_ISL_402128 spike protein mRNA gc mod (1-1273)(K986P_V987P_D614G_I692V)
aggagagggcgcuuggcuugcaaggacccugagcugcggcauugaagcacacccaacccaacucgacugaagucagccucacugaaccggaucugagaaucuucucucucugggcuugccagggcucuccgaaccuagcuagcauccucuucaauuccaacuagaaagcuuaccauguucguguuucuggugcugcugccccugguguccagccagugugugaaccugaccaccagaacacagcugccuccagccuacaccaacagcuucaccagaggcguguacuaccccgacaagguguucagauccagcgugcugcacucuacccaggaccuguuccugccuuucuucagcaacgugaccugguuccacgccauccacguguccggcaccaauggcaccaagagauucgacaaccccgugcugcccuucaacgacgggguguacuuugccagcaccgagaaguccaacaucaucagaggcuggaucuucggcaccacacuggacagcaagacccagagccugcugaucgugaacaacgccaccaacguggucaucaaagugugcgaguuccaguucugcaacgaccccuuccugggcgucuacuaccacaagaacaacaagagcuggauggaaagcgaguuccggguguacagcagcgccaacaacugcaccuucgaguacgugucccagccuuuccugauggaccuggaaggcaagcagggcaacuucaagaaccugcgcgaguucguguucaagaacaucgacggcuacuucaaaaucuacagcaagcacaccccuaucaaccucgugcgggaucugccucagggcuucucugcucuggaaccccugguggaucugcccaucggcaucaacaucacccgguuucagacacugcuggcccugcacagaagcuaccugacaccuggcgauagcagcagcggauggacagcuggugccgccgcuuacuaugugggcuaccugcagccuagaaccuuccugcugaaguacaacgagaacggcaccaucaccgacgccguggauugugcucuggauccucugagcgagacaaagugcacccugaaguccuucaccguggaaaagggcaucuaccagaccagcaacuuccgggugcagcccaccgaauccaucgugcgguuccccaauaucaccaaucugugccccuucggcgagguguucaaugccaccagauucgccucuguguacgccuggaaccggaagcggaucagcaauugcguggccgacuacuccgugcuguacaacuccgccagcuucagcaccuucaagugcuacggcguguccccuaccaagcugaacgaccugugcuucacaaacguguacgccgacagcuucgugauccggggagaugaagugcggcagauugccccuggacagacaggcaagaucgccgacuacaacuacaagcugcccgacgacuucaccggcugugugauugccuggaacagcaacaaccuggacuccaaagucggcggcaacuacaauuaccuguaccggcuguuccggaaguccaaucugaagcccuucgagcgggacaucagcaccgaaaucuaucaggccggcagcaccccuugcaacggcguggaaggcuucaacugcuacuucccacugcaguccuacggcuuucagcccacaaauggcgugggcuaucagcccuacagagugguggugcugagcuucgaacugcugcaugcuccugccacagugugcggcccuaagaaaagcaccaaucucgugaagaacaaaugcgugaacuucaacuucaacggccugaccggcaccggcgugcugacagagagcaacaagaaguuccugccauuccagcaguuuggccgggauaucgccgauaccacagacgccguuagagauccccagacacuggaaauccuggacaucaccccaugcagcuucggcggagugucugugaucaccccuggcaccaacaccagcaaucagguggcagugcuguaccagggcgugaacuguaccgaagugcccguggccauucacgccgaucagcugacaccuacauggcggguguacuccaccggcagcaauguguuucagaccagagccggcugucugaucggagccgagcacgugaacaauagcuacgagugcgacauccccaucggcgcuggcaucugugccagcuaccagacacagacaaacagccccagacgggcuagaagcguggccagccagagcgugauugccuacacaaugucucugggcgccgagaacagcguggccuacuccaacaacucuaucgcuauccccaccaacuucaccaucagcgugaccaccgagauccugccuguguccaugaccaagaccagcguggacugcaccauguacaucugcggcgauuccaccgagugcuccaaccugcugcugcaguacggcagcuucugcacccagcugaauagagcccugacagggaucgccguggaacaggacaagaacacccaagagguguucgcccaagugaagcaaaucuacaagaccccuccuaucaaggacuucggcggcuucaauuucagccagauucugcccgauccuagcaagcccagcaagcggagcuucaucgaggaccugcuguucaacaaagugacacuggccgacgccggcuucaucaagcaguauggcgauugucugggcgacauugccgccagggaucugauuugcgcccagaaguuuaacggacugacagugcugccuccucugcugaccgaugagaugaucgcccaguacacaucugcccugcuggccggcacaaucacaagcggcuggacauuuggagcuggcgccgcucugcagauccccuuugcuaugcagauggccuaccgguucaacggcaucggagugacccagaaugugcuguacgagaaccagaagcugaucgccaaccaguucaacagcgccaucggcaagauccaggacagccugagcagcacagcaagcgcccugggaaagcugcaggacguggucaaccagaaugcccaggcacugaacacccuggucaagcagcuguccuccaacuucggcgccaucagcucugugcugaacgauauccugagcagacuggacccuccugaggccgaggugcagaucgacagacugaucacaggcagacugcagagccuccagacauacgugacccagcagcugaucagagccgccgagauuagagccucugccaaucuggccgccaccaagaugucugagugugugcugggccagagcaagagaguggacuuuugcggcaagggcuaccaccugaugagcuucccucagucugccccucacggcgugguguuucugcacgugacauaugugcccgcucaagagaagaauuucaccaccgcuccagccaucugccacgacggcaaagcccacuuuccuagagaaggcguguucguguccaacggcacccauugguucgugacacagcggaacuucuacgagccccagaucaucaccaccgacaacaccuucgugucuggcaacugcgacguugugaucggcauugugaacaauaccguguacgacccucugcagcccgagcuggacagcuucaaagaggaacuggacaaguacuuuaagaaccacacaagccccgacguggaccugggcgauaucagcggaaucaaugccagcgucgugaacauccagaaagagaucgaccggcugaacgagguggccaagaaucugaacgagagccugaucgaccugcaagaacuggggaaguacgagcaguacaucaaguggcccugguacaucuggcugggcuuuaucgccggacugauugccaucgugauggucacaaucaugcuguguugcaugaccagcugcuguagcugccugaagggcuguuguagcuguggcagcugcugcaaguucgacgaggacgauucugagcccgugcugaagggcgugaaacugcacuacaccugaggacuagucccuguucccagagcccacuuuuuuuucuuuuuuugaaauaaaauagccugucuuucagaucucaaaggcucuuuucagagccaccaaaaaaaaaaaaaaaaaaaaaaaaaaaaaaaaaaaaaaaaaaaaaaaaaaaaaaaaaaaaaaaaaaaaaaaaaaaaaaaaaaaaaaaaaaaaaaaaaaaaa

SEQ ID NO: 23818 - RNA, 4191 nt, Artificial Sequence
  SARS-CoV-2/Wuhan/WIV05/2019__EPI_ISL_402128 spike protein mRNA gc mod (1-1273)(K986P_V987P_D614G_M1229I)
aggagagggcgcuuggcuugcaaggacccugagcugcggcauugaagcacacccaacccaacucgacugaagucagccucacugaaccggaucugagaaucuucucucucugggcuugccagggcucuccgaaccuagcuagcauccucuucaauuccaacuagaaagcuuaccauguucguguuucuggugcugcugccccugguguccagccagugugugaaccugaccaccagaacacagcugccuccagccuacaccaacagcuucaccagaggcguguacuaccccgacaagguguucagauccagcgugcugcacucuacccaggaccuguuccugccuuucuucagcaacgugaccugguuccacgccauccacguguccggcaccaauggcaccaagagauucgacaaccccgugcugcccuucaacgacgggguguacuuugccagcaccgagaaguccaacaucaucagaggcuggaucuucggcaccacacuggacagcaagacccagagccugcugaucgugaacaacgccaccaacguggucaucaaagugugcgaguuccaguucugcaacgaccccuuccugggcgucuacuaccacaagaacaacaagagcuggauggaaagcgaguuccggguguacagcagcgccaacaacugcaccuucgaguacgugucccagccuuuccugauggaccuggaaggcaagcagggcaacuucaagaaccugcgcgaguucguguucaagaacaucgacggcuacuucaaaaucuacagcaagcacaccccuaucaaccucgugcgggaucugccucagggcuucucugcucuggaaccccugguggaucugcccaucggcaucaacaucacccgguuucagacacugcuggcccugcacagaagcuaccugacaccuggcgauagcagcagcggauggacagcuggugccgccgcuuacuaugugggcuaccugcagccuagaaccuuccugcugaaguacaacgagaacggcaccaucaccgacgccguggauugugcucuggauccucugagcgagacaaagugcacccugaaguccuucaccguggaaaagggcaucuaccagaccagcaacuuccgggugcagcccaccgaauccaucgugcgguuccccaauaucaccaaucugugccccuucggcgagguguucaaugccaccagauucgccucuguguacgccuggaaccggaagcggaucagcaauugcguggccgacuacuccgugcuguacaacuccgccagcuucagcaccuucaagugcuacggcguguccccuaccaagcugaacgaccugugcuucacaaacguguacgccgacagcuucgugauccggggagaugaagugcggcagauugccccuggacagacaggcaagaucgccgacuacaacuacaagcugcccgacgacuucaccggcugugugauugccuggaacagcaacaaccuggacuccaaagucggcggcaacuacaauuaccuguaccggcuguuccggaaguccaaucugaagcccuucgagcgggacaucagcaccgaaaucuaucaggccggcagcaccccuugcaacggcguggaaggcuucaacugcuacuucccacugcaguccuacggcuuucagcccacaaauggcgugggcuaucagcccuacagagugguggugcugagcuucgaacugcugcaugcuccugccacagugugcggcccuaagaaaagcaccaaucucgugaagaacaaaugcgugaacuucaacuucaacggccugaccggcaccggcgugcugacagagagcaacaagaaguuccugccauuccagcaguuuggccgggauaucgccgauaccacagacgccguuagagauccccagacacuggaaauccuggacaucaccccaugcagcuucggcggagugucugugaucaccccuggcaccaacaccagcaaucagguggcagugcuguaccagggcgugaacuguaccgaagugcccguggccauucacgccgaucagcugacaccuacauggcggguguacuccaccggcagcaauguguuucagaccagagccggcugucugaucggagccgagcacgugaacaauagcuacgagugcgacauccccaucggcgcuggcaucugugccagcuaccagacacagacaaacagccccagacgggcuagaagcguggccagccagagcaucauugccuacacaaugucucugggcgccgagaacagcguggccuacuccaacaacucuaucgcuauccccaccaacuucaccaucagcgugaccaccgagauccugccuguguccaugaccaagaccagcguggacugcaccauguacaucugcggcgauuccaccgagugcuccaaccugcugcugcaguacggcagcuucugcacccagcugaauagagcccugacagggaucgccguggaacaggacaagaacacccaagagguguucgcccaagugaagcaaaucuacaagaccccuccuaucaaggacuucggcggcuucaauuucagccagauucugcccgauccuagcaagcccagcaagcggagcuucaucgaggaccugcuguucaacaaagugacacuggccgacgccggcuucaucaagcaguauggcgauugucugggcgacauugccgccagggaucugauuugcgcccagaaguuuaacggacugacagugcugccuccucugcugaccgaugagaugaucgcccaguacacaucugcccugcuggccggcacaaucacaagcggcuggacauuuggagcuggcgccgcucugcagauccccuuugcuaugcagauggccuaccgguucaacggcaucggagugacccagaaugugcuguacgagaaccagaagcugaucgccaaccaguucaacagcgccaucggcaagauccaggacagccugagcagcacagcaagcgcccugggaaagcugcaggacguggucaaccagaaugcccaggcacugaacacccuggucaagcagcuguccuccaacuucggcgccaucagcucugugcugaacgauauccugagcagacuggacccuccugaggccgaggugcagaucgacagacugaucacaggcagacugcagagccuccagacauacgugacccagcagcugaucagagccgccgagauuagagccucugccaaucuggccgccaccaagaugucugagugugugcugggccagagcaagagaguggacuuuugcggcaagggcuaccaccugaugagcuucccucagucugccccucacggcgugguguuucugcacgugacauaugugcccgcucaagagaagaauuucaccaccgcuccagccaucugccacgacggcaaagcccacuuuccuagagaaggcguguucguguccaacggcacccauugguucgugacacagcggaacuucuacgagccccagaucaucaccaccgacaacaccuucgugucuggcaacugcgacguugugaucggcauugugaacaauaccguguacgacccucugcagcccgagcuggacagcuucaaagaggaacuggacaaguacuuuaagaaccacacaagccccgacguggaccugggcgauaucagcggaaucaaugccagcgucgugaacauccagaaagagaucgaccggcugaacgagguggccaagaaucugaacgagagccugaucgaccugcaagaacuggggaaguacgagcaguacaucaaguggcccugguacaucuggcugggcuuuaucgccggacugauugccaucgugaucgucacaaucaugcuguguugcaugaccagcugcuguagcugccugaagggcuguuguagcuguggcagcugcugcaaguucgacgaggacgauucugagcccgugcugaagggcgugaaacugcacuacaccugaggacuagucccuguucccagagcccacuuuuuuuucuuuuuuugaaauaaaauagccugucuuucagaucucaaaggcucuuuucagagccaccaaaaaaaaaaaaaaaaaaaaaaaaaaaaaaaaaaaaaaaaaaaaaaaaaaaaaaaaaaaaaaaaaaaaaaaaaaaaaaaaaaaaaaaaaaaaaaaaaaaaa

SEQ ID NO: 23819 - RNA, 4185 nt, Artificial Sequence
  SARS-CoV-2/Wuhan/WIV05/2019__EPI_ISL_402128 spike protein mRNA gc mod (1-1273)(K986P_V987P_H69del_V70del_A222V_Y453F_S477N_D614G_I692V)
aggagagggcgcuuggcuugcaaggacccugagcugcggcauugaagcacacccaacccaacucgacugaagucagccucacugaaccggaucugagaaucuucucucucugggcuugccagggcucuccgaaccuagcuagcauccucuucaauuccaacuagaaagcuuaccauguucguguuucuggugcugcugccccugguguccagccagugugugaaccugaccaccagaacacagcugccuccagccuacaccaacagcuucaccagaggcguguacuaccccgacaagguguucagauccagcgugcugcacucuacccaggaccuguuccugccuuucuucagcaacgugaccugguuccacgccaucuccggcaccaauggcaccaagagauucgacaaccccgugcugcccuucaacgacgggguguacuuugccagcaccgagaaguccaacaucaucagaggcuggaucuucggcaccacacuggacagcaagacccagagccugcugaucgugaacaacgccaccaacguggucaucaaagugugcgaguuccaguucugcaacgaccccuuccugggcgucuacuaccacaagaacaacaagagcuggauggaaagcgaguuccggguguacagcagcgccaacaacugcaccuucgaguacgugucccagccuuuccugauggaccuggaaggcaagcagggcaacuucaagaaccugcgcgaguucguguucaagaacaucgacggcuacuucaaaaucuacagcaagcacaccccuaucaaccucgugcgggaucugccucagggcuucucugugcuggaaccccugguggaucugcccaucggcaucaacaucacccgguuucagacacugcuggcccugcacagaagcuaccugacaccuggcgauagcagcagcggauggacagcuggugccgccgcuuacuaugugggcuaccugcagccuagaaccuuccugcugaaguacaacgagaacggcaccaucaccgacgccguggauugugcucuggauccucugagcgagacaaagugcacccugaaguccuucaccguggaaaagggcaucuaccagaccagcaacuuccgggugcagcccaccgaauccaucgugcgguuccccaauaucaccaaucugugccccuucggcgagguguucaaugccaccagauucgccucuguguacgccuggaaccggaagcggaucagcaauugcguggccgacuacuccgugcuguacaacuccgccagcuucagcaccuucaagugcuacggcguguccccuaccaagcugaacgaccugugcuucacaaacguguacgccgacagcuucgugauccggggagaugaagugcggcagauugccccuggacagacaggcaagaucgccgacuacaacuacaagcugcccgacgacuucaccggcugugugauugccuggaacagcaacaaccuggacuccaaagucggcggcaacuacaauuaccuguuccggcuguuccggaaguccaaucugaagcccuucgagcgggacaucagcaccgaaaucuaucaggccggcaacaccccuugcaacggcguggaaggcuucaacugcuacuucccacugcaguccuacggcuuucagcccacaaauggcgugggcuaucagcccuacagagugguggugcugagcuucgaacugcugcaugcuccugccacagugugcggcccuaagaaaagcaccaaucucgugaagaacaaaugcgugaacuucaacuucaacggccugaccggcaccggcgugcugacagagagcaacaagaaguuccugccauuccagcaguuuggccgggauaucgccgauaccacagacgccguuagagauccccagacacuggaaauccuggacaucaccccaugcagcuucggcggagugucugugaucaccccuggcaccaacaccagcaaucagguggcagugcuguaccagggcgugaacuguaccgaagugcccguggccauucacgccgaucagcugacaccuacauggcggguguacuccaccggcagcaauguguuucagaccagagccggcugucugaucggagccgagcacgugaacaauagcuacgagugcgacauccccaucggcgcuggcaucugugccagcuaccagacacagacaaacagccccagacgggcuagaagcguggccagccagagcgugauugccuacacaaugucucugggcgccgagaacagcguggccuacuccaacaacucuaucgcuauccccaccaacuucaccaucagcgugaccaccgagauccugccuguguccaugaccaagaccagcguggacugcaccauguacaucugcggcgauuccaccgagugcuccaaccugcugcugcaguacggcagcuucugcacccagcugaauagagcccugacagggaucgccguggaacaggacaagaacacccaagagguguucgcccaagugaagcaaaucuacaagaccccuccuaucaaggacuucggcggcuucaauuucagccagauucugcccgauccuagcaagcccagcaagcggagcuucaucgaggaccugcuguucaacaaagugacacuggccgacgccggcuucaucaagcaguauggcgauugucugggcgacauugccgccagggaucugauuugcgcccagaaguuuaacggacugacagugcugccuccucugcugaccgaugagaugaucgcccaguacacaucugcccugcuggccggcacaaucacaagcggcuggacauuuggagcuggcgccgcucugcagauccccuuugcuaugcagauggccuaccgguucaacggcaucggagugacccagaaugugcuguacgagaaccagaagcugaucgccaaccaguucaacagcgccaucggcaagauccaggacagccugagcagcacagcaagcgcccugggaaagcugcaggacguggucaaccagaaugcccaggcacugaacacccuggucaagcagcuguccuccaacuucggcgccaucagcucugugcugaacgauauccugagcagacuggacccuccugaggccgaggugcagaucgacagacugaucacaggcagacugcagagccuccagacauacgugacccagcagcugaucagagccgccgagauuagagccucugccaaucuggccgccaccaagaugucugagugugugcugggccagagcaagagaguggacuuuugcggcaagggcuaccaccugaugagcuucccucagucugccccucacggcgugguguuucugcacgugacauaugugcccgcucaagagaagaauuucaccaccgcuccagccaucugccacgacggcaaagcccacuuuccuagagaaggcguguucguguccaacggcacccauugguucgugacacagcggaacuucuacgagccccagaucaucaccaccgacaacaccuucgugucuggcaacugcgacguugugaucggcauugugaacaauaccguguacgacccucugcagcccgagcuggacagcuucaaagaggaacuggacaaguacuuuaagaaccacacaagccccgacguggaccugggcgauaucagcggaaucaaugccagcgucgugaacauccagaaagagaucgaccggcugaacgagguggccaagaaucugaacgagagccugaucgaccugcaagaacuggggaaguacgagcaguacaucaaguggcccugguacaucuggcugggcuuuaucgccggacugauugccaucgugauggucacaaucaugcuguguugcaugaccagcugcuguagcugccugaagggcuguuguagcuguggcagcugcugcaaguucgacgaggacgauucugagcccgugcugaagggcgugaaacugcacuacaccugaggacuagucccuguucccagagcccacuuuuuuuucuuuuuuugaaauaaaauagccugucuuucagaucucaaaggcucuuuucagagccaccaaaaaaaaaaaaaaaaaaaaaaaaaaaaaaaaaaaaaaaaaaaaaaaaaaaaaaaaaaaaaaaaaaaaaaaaaaaaaaaaaaaaaaaaaaaaaaaaaaaaa

SEQ ID NO: 23820 - RNA, 4185 nt, Artificial Sequence
  SARS-CoV-2/Wuhan/WIV05/2019__EPI_ISL_402128 spike protein mRNA gc mod (1-1273)(K986P_V987P_H69del_V70del_Y453F_D614G_I692V_M1229I)
aggagagggcgcuuggcuugcaaggacccugagcugcggcauugaagcacacccaacccaacucgacugaagucagccucacugaaccggaucugagaaucuucucucucugggcuugccagggcucuccgaaccuagcuagcauccucuucaauuccaacuagaaagcuuaccauguucguguuucuggugcugcugccccugguguccagccagugugugaaccugaccaccagaacacagcugccuccagccuacaccaacagcuucaccagaggcguguacuaccccgacaagguguucagauccagcgugcugcacucuacccaggaccuguuccugccuuucuucagcaacgugaccugguuccacgccaucuccggcaccaauggcaccaagagauucgacaaccccgugcugcccuucaacgacgggguguacuuugccagcaccgagaaguccaacaucaucagaggcuggaucuucggcaccacacuggacagcaagacccagagccugcugaucgugaacaacgccaccaacguggucaucaaagugugcgaguuccaguucugcaacgaccccuuccugggcgucuacuaccacaagaacaacaagagcuggauggaaagcgaguuccggguguacagcagcgccaacaacugcaccuucgaguacgugucccagccuuuccugauggaccuggaaggcaagcagggcaacuucaagaaccugcgcgaguucguguucaagaacaucgacggcuacuucaaaaucuacagcaagcacaccccuaucaaccucgugcgggaucugccucagggcuucucugcucuggaaccccugguggaucugcccaucggcaucaacaucacccgguuucagacacugcuggcccugcacagaagcuaccugacaccuggcgauagcagcagcggauggacagcuggugccgccgcuuacuaugugggcuaccugcagccuagaaccuuccugcugaaguacaacgagaacggcaccaucaccgacgccguggauugugcucuggauccucugagcgagacaaagugcacccugaaguccuucaccguggaaaagggcaucuaccagaccagcaacuuccgggugcagcccaccgaauccaucgugcgguuccccaauaucaccaaucugugccccuucggcgagguguucaaugccaccagauucgccucuguguacgccuggaaccggaagcggaucagcaauugcguggccgacuacuccgugcuguacaacuccgccagcuucagcaccuucaagugcuacggcguguccccuaccaagcugaacgaccugugcuucacaaacguguacgccgacagcuucgugauccggggagaugaagugcggcagauugccccuggacagacaggcaagaucgccgacuacaacuacaagcugcccgacgacuucaccggcugugugauugccuggaacagcaacaaccuggacuccaaagucggcggcaacuacaauuaccuguuccggcuguuccggaaguccaaucugaagcccuucgagcgggacaucagcaccgaaaucuaucaggccggcagcaccccuugcaacggcguggaaggcuucaacugcuacuucccacugcaguccuacggcuuucagcccacaaauggcgugggcuaucagcccuacagagugguggugcugagcuucgaacugcugcaugcuccugccacagugugcggcccuaagaaaagcaccaaucucgugaagaacaaaugcgugaacuucaacuucaacggccugaccggcaccggcgugcugacagagagcaacaagaaguuccugccauuccagcaguuuggccgggauaucgccgauaccacagacgccguuagagauccccagacacuggaaauccuggacaucaccccaugcagcuucggcggagugucugugaucaccccuggcaccaacaccagcaaucagguggcagugcuguaccagggcgugaacuguaccgaagugcccguggccauucacgccgaucagcugacaccuacauggcggguguacuccaccggcagcaauguguuucagaccagagccggcugucugaucggagccgagcacgugaacaauagcuacgagugcgacauccccaucggcgcuggcaucugugccagcuaccagacacagacaaacagccccagacgggcuagaagcguggccagccagagcgugauugccuacacaaugucucugggcgccgagaacagcguggccuacuccaacaacucuaucgcuauccccaccaacuucaccaucagcgugaccaccgagauccugccuguguccaugaccaagaccagcguggacugcaccauguacaucugcggcgauuccaccgagugcuccaaccugcugcugcaguacggcagcuucugcacccagcugaauagagcccugacagggaucgccguggaacaggacaagaacacccaagagguguucgcccaagugaagcaaaucuacaagaccccuccuaucaaggacuucggcggcuucaauuucagccagauucugcccgauccuagcaagcccagcaagcggagcuucaucgaggaccugcuguucaacaaagugacacuggccgacgccggcuucaucaagcaguauggcgauugucugggcgacauugccgccagggaucugauuugcgcccagaaguuuaacggacugacagugcugccuccucugcugaccgaugagaugaucgcccaguacacaucugcccugcuggccggcacaaucacaagcggcuggacauuuggagcuggcgccgcucugcagauccccuuugcuaugcagauggccuaccgguucaacggcaucggagugacccagaaugugcuguacgagaaccagaagcugaucgccaaccaguucaacagcgccaucggcaagauccaggacagccugagcagcacagcaagcgcccugggaaagcugcaggacguggucaaccagaaugcccaggcacugaacacccuggucaagcagcuguccuccaacuucggcgccaucagcucugugcugaacgauauccugagcagacuggacccuccugaggccgaggugcagaucgacagacugaucacaggcagacugcagagccuccagacauacgugacccagcagcugaucagagccgccgagauuagagccucugccaaucuggccgccaccaagaugucugagugugugcugggccagagcaagagaguggacuuuugcggcaagggcuaccaccugaugagcuucccucagucugccccucacggcgugguguuucugcacgugacauaugugcccgcucaagagaagaauuucaccaccgcuccagccaucugccacgacggcaaagcccacuuuccuagagaaggcguguucguguccaacggcacccauugguucgugacacagcggaacuucuacgagccccagaucaucaccaccgacaacaccuucgugucuggcaacugcgacguugugaucggcauugugaacaauaccguguacgacccucugcagcccgagcuggacagcuucaaagaggaacuggacaaguacuuuaagaaccacacaagccccgacguggaccugggcgauaucagcggaaucaaugccagcgucgugaacauccagaaagagaucgaccggcugaacgagguggccaagaaucugaacgagagccugaucgaccugcaagaacuggggaaguacgagcaguacaucaaguggcccugguacaucuggcugggcuuuaucgccggacugauugccaucgugaucgucacaaucaugcuguguugcaugaccagcugcuguagcugccugaagggcuguuguagcuguggcagcugcugcaaguucgacgaggacgauucugagcccgugcugaagggcgugaaacugcacuacaccugaggacuagucccuguucccagagcccacuuuuuuuucuuuuuuugaaauaaaauagccugucuuucagaucucaaaggcucuuuucagagccaccaaaaaaaaaaaaaaaaaaaaaaaaaaaaaaaaaaaaaaaaaaaaaaaaaaaaaaaaaaaaaaaaaaaaaaaaaaaaaaaaaaaaaaaaaaaaaaaaaaaaa

SEQ ID NO: 23821 - RNA, 4182 nt, Artificial Sequence
  SARS-CoV-2/Wuhan/WIV05/2019__EPI_ISL_402128 spike protein mRNA gc mod (1-1273)(K986P_V987P_K986P_V987P_H69del_V70del_Y144del_N501Y_A570 D_D614G_P681H_T716I_S982A_D1118H)
aggagagggcgcuuggcuugcaaggacccugagcugcggcauugaagcacacccaacccaacucgacugaagucagccucacugaaccggaucugagaaucuucucucucugggcuugccagggcucuccgaaccuagcuagcauccucuucaauuccaacuagaaagcuuaccauguucguguuucuggugcugcugccccugguguccagccagugugugaaccugaccaccagaacacagcugccuccagccuacaccaacagcuucaccagaggcguguacuaccccgacaagguguucagauccagcgugcugcacucuacccaggaccuguuccugccuuucuucagcaacgugaccugguuccacgccaucuccggcaccaauggcaccaagagauucgacaaccccgugcugcccuucaacgacgggguguacuuugccagcaccgagaaguccaacaucaucagaggcuggaucuucggcaccacacuggacagcaagacccagagccugcugaucgugaacaacgccaccaacguggucaucaaagugugcgaguuccaguucugcaacgaccccuuccugggcgucuaccacaagaacaacaagagcuggauggaaagcgaguuccggguguacagcagcgccaacaacugcaccuucgaguacgugucccagccuuuccugauggaccuggaaggcaagcagggcaacuucaagaaccugcgcgaguucguguucaagaacaucgacggcuacuucaaaaucuacagcaagcacaccccuaucaaccucgugcgggaucugccucagggcuucucugcucuggaaccccugguggaucugcccaucggcaucaacaucacccgguuucagacacugcuggcccugcacagaagcuaccugacaccuggcgauagcagcagcggauggacagcuggugccgccgcuuacuaugugggcuaccugcagccuagaaccuuccugcugaaguacaacgagaacggcaccaucaccgacgccguggauugugcucuggauccucugagcgagacaaagugcacccugaaguccuucaccguggaaaagggcaucuaccagaccagcaacuuccgggugcagcccaccgaauccaucgugcgguuccccaauaucaccaaucugugccccuucggcgagguguucaaugccaccagauucgccucuguguacgccuggaaccggaagcggaucagcaauugcguggccgacuacuccgugcuguacaacuccgccagcuucagcaccuucaagugcuacggcguguccccuaccaagcugaacgaccugugcuucacaaacguguacgccgacagcuucgugauccggggagaugaagugcggcagauugccccuggacagacaggcaagaucgccgacuacaacuacaagcugcccgacgacuucaccggcugugugauugccuggaacagcaacaaccuggacuccaaagucggcggcaacuacaauuaccuguaccggcuguuccggaaguccaaucugaagcccuucgagcgggacaucagcaccgaaaucuaucaggccggcagcaccccuugcaacggcguggaaggcuucaacugcuacuucccacugcaguccuacggcuuucagcccacauacggcgugggcuaucagcccuacagagugguggugcugagcuucgaacugcugcaugcuccugccacagugugcggcccuaagaaaagcaccaaucucgugaagaacaaaugcgugaacuucaacuucaacggccugaccggcaccggcgugcugacagagagcaacaagaaguuccugccauuccagcaguuuggccgggauaucgacgauaccacagacgccguuagagauccccagacacuggaaauccuggacaucaccccaugcagcuucggcggagugucugugaucaccccuggcaccaacaccagcaaucagguggcagugcuguaccagggcgugaacuguaccgaagugcccguggccauucacgccgaucagcugacaccuacauggcggguguacuccaccggcagcaauguguuucagaccagagccggcugucugaucggagccgagcacgugaacaauagcuacgagugcgacauccccaucggcgcuggcaucugugccagcuaccagacacagacaaacagccacagacgggcuagaagcguggccagccagagcaucauugccuacacaaugucucugggcgccgagaacagcguggccuacuccaacaacucuaucgcuauccccaucaacuucaccaucagcgugaccaccgagauccugccuguguccaugaccaagaccagcguggacugcaccauguacaucugcggcgauuccaccgagugcuccaaccugcugcugcaguacggcagcuucugcacccagcugaauagagcccugacagggaucgccguggaacaggacaagaacacccaagagguguucgcccaagugaagcaaaucuacaagaccccuccuaucaaggacuucggcggcuucaauuucagccagauucugcccgauccuagcaagcccagcaagcggagcuucaucgaggaccugcuguucaacaaagugacacuggccgacgccggcuucaucaagcaguauggcgauugucugggcgacauugccgccagggaucugauuugcgcccagaaguuuaacggacugacagugcugccuccucugcugaccgaugagaugaucgcccaguacacaucugcccugcuggccggcacaaucacaagcggcuggacauuuggagcuggcgccgcucugcagauccccuuugcuaugcagauggccuaccgguucaacggcaucggagugacccagaaugugcuguacgagaaccagaagcugaucgccaaccaguucaacagcgccaucggcaagauccaggacagccugagcagcacagcaagcgcccugggaaagcugcaggacguggucaaccagaaugcccaggcacugaacacccuggucaagcagcuguccuccaacuucggcgccaucagcucugugcugaacgauauccuggccagacuggacccuccugaggccgaggugcagaucgacagacugaucacaggcagacugcagagccuccagacauacgugacccagcagcugaucagagccgccgagauuagagccucugccaaucuggccgccaccaagaugucugagugugugcugggccagagcaagagaguggacuuuugcggcaagggcuaccaccugaugagcuucccucagucugccccucacggcgugguguuucugcacgugacauaugugcccgcucaagagaagaauuucaccaccgcuccagccaucugccacgacggcaaagcccacuuuccuagagaaggcguguucguguccaacggcacccauugguucgugacacagcggaacuucuacgagccccagaucaucaccacccacaacaccuucgugucuggcaacugcgacguugugaucggcauugugaacaauaccguguacgacccucugcagcccgagcuggacagcuucaaagaggaacuggacaaguacuuuaagaaccacacaagccccgacguggaccugggcgauaucagcggaaucaaugccagcgucgugaacauccagaaagagaucgaccggcugaacgagguggccaagaaucugaacgagagccugaucgaccugcaagaacuggggaaguacgagcaguacaucaaguggcccugguacaucuggcugggcuuuaucgccggacugauugccaucgugauggucacaaucaugcuguguugcaugaccagcugcuguagcugccugaagggcuguuguagcuguggcagcugcugcaaguucgacgaggacgauucugagcccgugcugaagggcgugaaacugcacuacaccugaggacuagucccuguucccagagcccacuuuuuuuucuuuuuuugaaauaaaauagccugucuuucagaucucaaaggcucuuuucagagccaccaaaaaaaaaaaaaaaaaaaaaaaaaaaaaaaaaaaaaaaaaaaaaaaaaaaaaaaaaaaaaaaaaaaaaaaaaaaaaaaaaaaaaaaaaaaaaaaaaaaaa

SEQ ID NO: 23822 - RNA, 4191 nt, Artificial Sequence
  SARS-CoV-2/Wuhan/WIV05/2019__EPI_ISL_402128 spike protein mRNA gc mod (1-1273)(K986P_V987P_K986P_V987P_K417N_E484K_N501Y_D614G)
aggagagggcgcuuggcuugcaaggacccugagcugcggcauugaagcacacccaacccaacucgacugaagucagccucacugaaccggaucugagaaucuucucucucugggcuugccagggcucuccgaaccuagcuagcauccucuucaauuccaacuagaaagcuuaccauguucguguuucuggugcugcugccccugguguccagccagugugugaaccugaccaccagaacacagcugccuccagccuacaccaacagcuucaccagaggcguguacuaccccgacaagguguucagauccagcgugcugcacucuacccaggaccuguuccugccuuucuucagcaacgugaccugguuccacgccauccacguguccggcaccaauggcaccaagagauucgacaaccccgugcugcccuucaacgacgggguguacuuugccagcaccgagaaguccaacaucaucagaggcuggaucuucggcaccacacuggacagcaagacccagagccugcugaucgugaacaacgccaccaacguggucaucaaagugugcgaguuccaguucugcaacgaccccuuccugggcgucuacuaccacaagaacaacaagagcuggauggaaagcgaguuccggguguacagcagcgccaacaacugcaccuucgaguacgugucccagccuuuccugauggaccuggaaggcaagcagggcaacuucaagaaccugcgcgaguucguguucaagaacaucgacggcuacuucaaaaucuacagcaagcacaccccuaucaaccucgugcgggaucugccucagggcuucucugcucuggaaccccugguggaucugcccaucggcaucaacaucacccgguuucagacacugcuggcccugcacagaagcuaccugacaccuggcgauagcagcagcggauggacagcuggugccgccgcuuacuaugugggcuaccugcagccuagaaccuuccugcugaaguacaacgagaacggcaccaucaccgacgccguggauugugcucuggauccucugagcgagacaaagugcacccugaaguccuucaccguggaaaagggcaucuaccagaccagcaacuuccgggugcagcccaccgaauccaucgugcgguuccccaauaucaccaaucugugccccuucggcgagguguucaaugccaccagauucgccucuguguacgccuggaaccggaagcggaucagcaauugcguggccgacuacuccgugcuguacaacuccgccagcuucagcaccuucaagugcuacggcguguccccuaccaagcugaacgaccugugcuucacaaacguguacgccgacagcuucgugauccggggagaugaagugcggcagauugccccuggacagacaggcaacaucgccgacuacaacuacaagcugcccgacgacuucaccggcugugugauugccuggaacagcaacaaccuggacuccaaagucggcggcaacuacaauuaccuguaccggcuguuccggaaguccaaucugaagcccuucgagcgggacaucagcaccgaaaucuaucaggccggcagcaccccuugcaacggcgugaagggcuucaacugcuacuucccacugcaguccuacggcuuucagcccacauacggcgugggcuaucagcccuacagagugguggugcugagcuucgaacugcugcaugcuccugccacagugugcggcccuaagaaaagcaccaaucucgugaagaacaaaugcgugaacuucaacuucaacggccugaccggcaccggcgugcugacagagagcaacaagaaguuccugccauuccagcaguuuggccgggauaucgccgauaccacagacgccguuagagauccccagacacuggaaauccuggacaucaccccaugcagcuucggcggagugucugugaucaccccuggcaccaacaccagcaaucagguggcagugcuguaccagggcgugaacuguaccgaagugcccguggccauucacgccgaucagcugacaccuacauggcggguguacuccaccggcagcaauguguuucagaccagagccggcugucugaucggagccgagcacgugaacaauagcuacgagugcgacauccccaucggcgcuggcaucugugccagcuaccagacacagacaaacagccccagacgggcuagaagcguggccagccagagcaucauugccuacacaaugucucugggcgccgagaacagcguggccuacuccaacaacucuaucgcuauccccaccaacuucaccaucagcgugaccaccgagauccugccuguguccaugaccaagaccagcguggacugcaccauguacaucugcggcgauuccaccgagugcuccaaccugcugcugcaguacggcagcuucugcacccagcugaauagagcccugacagggaucgccguggaacaggacaagaacacccaagagguguucgcccaagugaagcaaaucuacaagaccccuccuaucaaggacuucggcggcuucaauuucagccagauucugcccgauccuagcaagcccagcaagcggagcuucaucgaggaccugcuguucaacaaagugacacuggccgacgccggcuucaucaagcaguauggcgauugucugggcgacauugccgccagggaucugauuugcgcccagaaguuuaacggacugacagugcugccuccucugcugaccgaugagaugaucgcccaguacacaucugcccugcuggccggcacaaucacaagcggcuggacauuuggagcuggcgccgcucugcagauccccuuugcuaugcagauggccuaccgguucaacggcaucggagugacccagaaugugcuguacgagaaccagaagcugaucgccaaccaguucaacagcgccaucggcaagauccaggacagccugagcagcacagcaagcgcccugggaaagcugcaggacguggucaaccagaaugcccaggcacugaacacccuggucaagcagcuguccuccaacuucggcgccaucagcucugugcugaacgauauccugagcagacuggacccuccugaggccgaggugcagaucgacagacugaucacaggcagacugcagagccuccagacauacgugacccagcagcugaucagagccgccgagauuagagccucugccaaucuggccgccaccaagaugucugagugugugcugggccagagcaagagaguggacuuuugcggcaagggcuaccaccugaugagcuucccucagucugccccucacggcgugguguuucugcacgugacauaugugcccgcucaagagaagaauuucaccaccgcuccagccaucugccacgacggcaaagcccacuuuccuagagaaggcguguucguguccaacggcacccauugguucgugacacagcggaacuucuacgagccccagaucaucaccaccgacaacaccuucgugucuggcaacugcgacguugugaucggcauugugaacaauaccguguacgacccucugcagcccgagcuggacagcuucaaagaggaacuggacaaguacuuuaagaaccacacaagccccgacguggaccugggcgauaucagcggaaucaaugccagcgucgugaacauccagaaagagaucgaccggcugaacgagguggccaagaaucugaacgagagccugaucgaccugcaagaacuggggaaguacgagcaguacaucaaguggcccugguacaucuggcugggcuuuaucgccggacugauugccaucgugauggucacaaucaugcuguguugcaugaccagcugcuguagcugccugaagggcuguuguagcuguggcagcugcugcaaguucgacgaggacgauucugagcccgugcugaagggcgugaaacugcacuacaccugaggacuagucccuguucccagagcccacuuuuuuuucuuuuuuugaaauaaaauagccugucuuucagaucucaaaggcucuuuucagagccaccaaaaaaaaaaaaaaaaaaaaaaaaaaaaaaaaaaaaaaaaaaaaaaaaaaaaaaaaaaaaaaaaaaaaaaaaaaaaaaaaaaaaaaaaaaaaaaaaaaaaa

SEQ ID NO: 23823 - RNA, 4182 nt, Artificial Sequence
  SARS-CoV-2/Wuhan/WIV05/2019__EPI_ISL_402128 spike protein mRNA gc mod (1-1273)(K986P_V987P_K986P_V987P_L18F_D80A_D215G_L242del_A243del_ L244del_R246I_K417N_E484K_N501Y_D614G_A701V)
aggagagggcgcuuggcuugcaaggacccugagcugcggcauugaagcacacccaacccaacucgacugaagucagccucacugaaccggaucugagaaucuucucucucugggcuugccagggcucuccgaaccuagcuagcauccucuucaauuccaacuagaaagcuuaccauguucguguuucuggugcugcugccccugguguccagccagugugugaacuucaccaccagaacacagcugccuccagccuacaccaacagcuucaccagaggcguguacuaccccgacaagguguucagauccagcgugcugcacucuacccaggaccuguuccugccuuucuucagcaacgugaccugguuccacgccauccacguguccggcaccaauggcaccaagagauucgccaaccccgugcugcccuucaacgacgggguguacuuugccagcaccgagaaguccaacaucaucagaggcuggaucuucggcaccacacuggacagcaagacccagagccugcugaucgugaacaacgccaccaacguggucaucaaagugugcgaguuccaguucugcaacgaccccuuccugggcgucuacuaccacaagaacaacaagagcuggauggaaagcgaguuccggguguacagcagcgccaacaacugcaccuucgaguacgugucccagccuuuccugauggaccuggaaggcaagcagggcaacuucaagaaccugcgcgaguucguguucaagaacaucgacggcuacuucaaaaucuacagcaagcacaccccuaucaaccucgugcggggccugccucagggcuucucugcucuggaaccccugguggaucugcccaucggcaucaacaucacccgguuucagacacugcacaucagcuaccugacaccuggcgauagcagcagcggauggacagcuggugccgccgcuuacuaugugggcuaccugcagccuagaaccuuccugcugaaguacaacgagaacggcaccaucaccgacgccguggauugugcucuggauccucugagcgagacaaagugcacccugaaguccuucaccguggaaaagggcaucuaccagaccagcaacuuccgggugcagcccaccgaauccaucgugcgguuccccaauaucaccaaucugugccccuucggcgagguguucaaugccaccagauucgccucuguguacgccuggaaccggaagcggaucagcaauugcguggccgacuacuccgugcuguacaacuccgccagcuucagcaccuucaagugcuacggcguguccccuaccaagcugaacgaccugugcuucacaaacguguacgccgacagcuucgugauccggggagaugaagugcggcagauugccccuggacagacaggcaacaucgccgacuacaacuacaagcugcccgacgacuucaccggcugugugauugccuggaacagcaacaaccuggacuccaaagucggcggcaacuacaauuaccuguaccggcuguuccggaaguccaaucugaagcccuucgagcgggacaucagcaccgaaaucuaucaggccggcagcaccccuugcaacggcgugaagggcuucaacugcuacuucccacugcaguccuacggcuuucagcccacauacggcgugggcuaucagcccuacagagugguggugcugagcuucgaacugcugcaugcuccugccacagugugcggcccuaagaaaagcaccaaucucgugaagaacaaaugcgugaacuucaacuucaacggccugaccggcaccggcgugcugacagagagcaacaagaaguuccugccauuccagcaguuuggccgggauaucgccgauaccacagacgccguuagagauccccagacacuggaaauccuggacaucaccccaugcagcuucggcggagugucugugaucaccccuggcaccaacaccagcaaucagguggcagugcuguaccagggcgugaacuguaccgaagugcccguggccauucacgccgaucagcugacaccuacauggcggguguacuccaccggcagcaauguguuucagaccagagccggcugucugaucggagccgagcacgugaacaauagcuacgagugcgacauccccaucggcgcuggcaucugugccagcuaccagacacagacaaacagccccagacgggcuagaagcguggccagccagagcaucauugccuacacaaugucucugggcguggagaacagcguggccuacuccaacaacucuaucgcuauccccaccaacuucaccaucagcgugaccaccgagauccugccuguguccaugaccaagaccagcguggacugcaccauguacaucugcggcgauuccaccgagugcuccaaccugcugcugcaguacggcagcuucugcacccagcugaauagagcccugacagggaucgccguggaacaggacaagaacacccaagagguguucgcccaagugaagcaaaucuacaagaccccuccuaucaaggacuucggcggcuucaauuucagccagauucugcccgauccuagcaagcccagcaagcggagcuucaucgaggaccugcuguucaacaaagugacacuggccgacgccggcuucaucaagcaguauggcgauugucugggcgacauugccgccagggaucugauuugcgcccagaaguuuaacggacugacagugcugccuccucugcugaccgaugagaugaucgcccaguacacaucugcccugcuggccggcacaaucacaagcggcuggacauuuggagcuggcgccgcucugcagauccccuuugcuaugcagauggccuaccgguucaacggcaucggagugacccagaaugugcuguacgagaaccagaagcugaucgccaaccaguucaacagcgccaucggcaagauccaggacagccugagcagcacagcaagcgcccugggaaagcugcaggacguggucaaccagaaugcccaggcacugaacacccuggucaagcagcuguccuccaacuucggcgccaucagcucugugcugaacgauauccugagcagacuggacccuccugaggccgaggugcagaucgacagacugaucacaggcagacugcagagccuccagacauacgugacccagcagcugaucagagccgccgagauuagagccucugccaaucuggccgccaccaagaugucugagugugugcugggccagagcaagagaguggacuuuugcggcaagggcuaccaccugaugagcuucccucagucugccccucacggcgugguguuucugcacgugacauaugugcccgcucaagagaagaauuucaccaccgcuccagccaucugccacgacggcaaagcccacuuuccuagagaaggcguguucguguccaacggcacccauugguucgugacacagcggaacuucuacgagccccagaucaucaccaccgacaacaccuucgugucuggcaacugcgacguugugaucggcauugugaacaauaccguguacgacccucugcagcccgagcuggacagcuucaaagaggaacuggacaaguacuuuaagaaccacacaagccccgacguggaccugggcgauaucagcggaaucaaugccagcgucgugaacauccagaaagagaucgaccggcugaacgagguggccaagaaucugaacgagagccugaucgaccugcaagaacuggggaaguacgagcaguacaucaaguggcccugguacaucuggcugggcuuuaucgccggacugauugccaucgugauggucacaaucaugcuguguugcaugaccagcugcuguagcugccugaagggcuguuguagcuguggcagcugcugcaaguucgacgaggacgauucugagcccgugcugaagggcgugaaacugcacuacaccugaggacuagucccuguucccagagcccacuuuuuuuucuuuuuuugaaauaaaauagccugucuuucagaucucaaaggcucuuuucagagccaccaaaaaaaaaaaaaaaaaaaaaaaaaaaaaaaaaaaaaaaaaaaaaaaaaaaaaaaaaaaaaaaaaaaaaaaaaaaaaaaaaaaaaaaaaaaaaaaaaaaaa

SEQ ID NO: 23824 - RNA, 4191 nt, Artificial Sequence
  SARS-CoV-2/Wuhan/WIV05/2019__EPI_ISL_402128 spike protein mRNA gc mod (1-1273)(K986P_V987P_K986P_V987P_E484K_D614G)
aggagagggcgcuuggcuugcaaggacccugagcugcggcauugaagcacacccaacccaacucgacugaagucagccucacugaaccggaucugagaaucuucucucucugggcuugccagggcucuccgaaccuagcuagcauccucuucaauuccaacuagaaagcuuaccauguucguguuucuggugcugcugccccugguguccagccagugugugaaccugaccaccagaacacagcugccuccagccuacaccaacagcuucaccagaggcguguacuaccccgacaagguguucagauccagcgugcugcacucuacccaggaccuguuccugccuuucuucagcaacgugaccugguuccacgccauccacguguccggcaccaauggcaccaagagauucgacaaccccgugcugcccuucaacgacgggguguacuuugccagcaccgagaaguccaacaucaucagaggcuggaucuucggcaccacacuggacagcaagacccagagccugcugaucgugaacaacgccaccaacguggucaucaaagugugcgaguuccaguucugcaacgaccccuuccugggcgucuacuaccacaagaacaacaagagcuggauggaaagcgaguuccggguguacagcagcgccaacaacugcaccuucgaguacgugucccagccuuuccugauggaccuggaaggcaagcagggcaacuucaagaaccugcgcgaguucguguucaagaacaucgacggcuacuucaaaaucuacagcaagcacaccccuaucaaccucgugcgggaucugccucagggcuucucugcucuggaaccccugguggaucugcccaucggcaucaacaucacccgguuucagacacugcuggcccugcacagaagcuaccugacaccuggcgauagcagcagcggauggacagcuggugccgccgcuuacuaugugggcuaccugcagccuagaaccuuccugcugaaguacaacgagaacggcaccaucaccgacgccguggauugugcucuggauccucugagcgagacaaagugcacccugaaguccuucaccguggaaaagggcaucuaccagaccagcaacuuccgggugcagcccaccgaauccaucgugcgguuccccaauaucaccaaucugugccccuucggcgagguguucaaugccaccagauucgccucuguguacgccuggaaccggaagcggaucagcaauugcguggccgacuacuccgugcuguacaacuccgccagcuucagcaccuucaagugcuacggcguguccccuaccaagcugaacgaccugugcuucacaaacguguacgccgacagcuucgugauccggggagaugaagugcggcagauugccccuggacagacaggcaagaucgccgacuacaacuacaagcugcccgacgacuucaccggcugugugauugccuggaacagcaacaaccuggacuccaaagucggcggcaacuacaauuaccuguaccggcuguuccggaaguccaaucugaagcccuucgagcgggacaucagcaccgaaaucuaucaggccggcagcaccccuugcaacggcgugaagggcuucaacugcuacuucccacugcaguccuacggcuuucagcccacaaauggcgugggcuaucagcccuacagagugguggugcugagcuucgaacugcugcaugcuccugccacagugugcggcccuaagaaaagcaccaaucucgugaagaacaaaugcgugaacuucaacuucaacggccugaccggcaccggcgugcugacagagagcaacaagaaguuccugccauuccagcaguuuggccgggauaucgccgauaccacagacgccguuagagauccccagacacuggaaauccuggacaucaccccaugcagcuucggcggagugucugugaucaccccuggcaccaacaccagcaaucagguggcagugcuguaccagggcgugaacuguaccgaagugcccguggccauucacgccgaucagcugacaccuacauggcggguguacuccaccggcagcaauguguuucagaccagagccggcugucugaucggagccgagcacgugaacaauagcuacgagugcgacauccccaucggcgcuggcaucugugccagcuaccagacacagacaaacagccccagacgggcuagaagcguggccagccagagcaucauugccuacacaaugucucugggcgccgagaacagcguggccuacuccaacaacucuaucgcuauccccaccaacuucaccaucagcgugaccaccgagauccugccuguguccaugaccaagaccagcguggacugcaccauguacaucugcggcgauuccaccgagugcuccaaccugcugcugcaguacggcagcuucugcacccagcugaauagagcccugacagggaucgccguggaacaggacaagaacacccaagagguguucgcccaagugaagcaaaucuacaagaccccuccuaucaaggacuucggcggcuucaauuucagccagauucugcccgauccuagcaagcccagcaagcggagcuucaucgaggaccugcuguucaacaaagugacacuggccgacgccggcuucaucaagcaguauggcgauugucugggcgacauugccgccagggaucugauuugcgcccagaaguuuaacggacugacagugcugccuccucugcugaccgaugagaugaucgcccaguacacaucugcccugcuggccggcacaaucacaagcggcuggacauuuggagcuggcgccgcucugcagauccccuuugcuaugcagauggccuaccgguucaacggcaucggagugacccagaaugugcuguacgagaaccagaagcugaucgccaaccaguucaacagcgccaucggcaagauccaggacagccugagcagcacagcaagcgcccugggaaagcugcaggacguggucaaccagaaugcccaggcacugaacacccuggucaagcagcuguccuccaacuucggcgccaucagcucugugcugaacgauauccugagcagacuggacccuccugaggccgaggugcagaucgacagacugaucacaggcagacugcagagccuccagacauacgugacccagcagcugaucagagccgccgagauuagagccucugccaaucuggccgccaccaagaugucugagugugugcugggccagagcaagagaguggacuuuugcggcaagggcuaccaccugaugagcuucccucagucugccccucacggcgugguguuucugcacgugacauaugugcccgcucaagagaagaauuucaccaccgcuccagccaucugccacgacggcaaagcccacuuuccuagagaaggcguguucguguccaacggcacccauugguucgugacacagcggaacuucuacgagccccagaucaucaccaccgacaacaccuucgugucuggcaacugcgacguugugaucggcauugugaacaauaccguguacgacccucugcagcccgagcuggacagcuucaaagaggaacuggacaaguacuuuaagaaccacacaagccccgacguggaccugggcgauaucagcggaaucaaugccagcgucgugaacauccagaaagagaucgaccggcugaacgagguggccaagaaucugaacgagagccugaucgaccugcaagaacuggggaaguacgagcaguacaucaaguggcccugguacaucuggcugggcuuuaucgccggacugauugccaucgugauggucacaaucaugcuguguugcaugaccagcugcuguagcugccugaagggcuguuguagcuguggcagcugcugcaaguucgacgaggacgauucugagcccgugcugaagggcgugaaacugcacuacaccugaggacuagucccuguucccagagcccacuuuuuuuucuuuuuuugaaauaaaauagccugucuuucagaucucaaaggcucuuuucagagccaccaaaaaaaaaaaaaaaaaaaaaaaaaaaaaaaaaaaaaaaaaaaaaaaaaaaaaaaaaaaaaaaaaaaaaaaaaaaaaaaaaaaaaaaaaaaaaaaaaaaaa

SEQ ID NO: 23825 - RNA, 4191 nt, Artificial Sequence
  SARS-CoV-2/Wuhan/WIV05/2019__EPI_ISL_402128 spike protein mRNA gc mod (1-1273)(K986P_V987P_K986P_V987P_L18F_T20N_P26S_D138Y_R190S_K417T _E484K_N501Y_D614G_H655Y_T1027I)
aggagagggcgcuuggcuugcaaggacccugagcugcggcauugaagcacacccaacccaacucgacugaagucagccucacugaaccggaucugagaaucuucucucucugggcuugccagggcucuccgaaccuagcuagcauccucuucaauuccaacuagaaagcuuaccauguucguguuucuggugcugcugccccugguguccagccagugugugaacuucaccaacagaacacagcugccuagcgccuacaccaacagcuucaccagaggcguguacuaccccgacaagguguucagauccagcgugcugcacucuacccaggaccuguuccugccuuucuucagcaacgugaccugguuccacgccauccacguguccggcaccaauggcaccaagagauucgacaaccccgugcugcccuucaacgacgggguguacuuugccagcaccgagaaguccaacaucaucagaggcuggaucuucggcaccacacuggacagcaagacccagagccugcugaucgugaacaacgccaccaacguggucaucaaagugugcgaguuccaguucugcaacuaccccuuccugggcgucuacuaccacaagaacaacaagagcuggauggaaagcgaguuccggguguacagcagcgccaacaacugcaccuucgaguacgugucccagccuuuccugauggaccuggaaggcaagcagggcaacuucaagaaccugagcgaguucguguucaagaacaucgacggcuacuucaaaaucuacagcaagcacaccccuaucaaccucgugcgggaucugccucagggcuucucugcucuggaaccccugguggaucugcccaucggcaucaacaucacccgguuucagacacugcuggcccugcacagaagcuaccugacaccuggcgauagcagcagcggauggacagcuggugccgccgcuuacuaugugggcuaccugcagccuagaaccuuccugcugaaguacaacgagaacggcaccaucaccgacgccguggauugugcucuggauccucugagcgagacaaagugcacccugaaguccuucaccguggaaaagggcaucuaccagaccagcaacuuccgggugcagcccaccgaauccaucgugcgguuccccaauaucaccaaucugugccccuucggcgagguguucaaugccaccagauucgccucuguguacgccuggaaccggaagcggaucagcaauugcguggccgacuacuccgugcuguacaacuccgccagcuucagcaccuucaagugcuacggcguguccccuaccaagcugaacgaccugugcuucacaaacguguacgccgacagcuucgugauccggggagaugaagugcggcagauugccccuggacagacaggcaccaucgccgacuacaacuacaagcugcccgacgacuucaccggcugugugauugccuggaacagcaacaaccuggacuccaaagucggcggcaacuacaauuaccuguaccggcuguuccggaaguccaaucugaagcccuucgagcgggacaucagcaccgaaaucuaucaggccggcagcaccccuugcaacggcgugaagggcuucaacugcuacuucccacugcaguccuacggcuuucagcccacauacggcgugggcuaucagcccuacagagugguggugcugagcuucgaacugcugcaugcuccugccacagugugcggcccuaagaaaagcaccaaucucgugaagaacaaaugcgugaacuucaacuucaacggccugaccggcaccggcgugcugacagagagcaacaagaaguuccugccauuccagcaguuuggccgggauaucgccgauaccacagacgccguuagagauccccagacacuggaaauccuggacaucaccccaugcagcuucggcggagugucugugaucaccccuggcaccaacaccagcaaucagguggcagugcuguaccagggcgugaacuguaccgaagugcccguggccauucacgccgaucagcugacaccuacauggcggguguacuccaccggcagcaauguguuucagaccagagccggcugucugaucggagccgaguacgugaacaauagcuacgagugcgacauccccaucggcgcuggcaucugugccagcuaccagacacagacaaacagccccagacgggcuagaagcguggccagccagagcaucauugccuacacaaugucucugggcgccgagaacagcguggccuacuccaacaacucuaucgcuauccccaccaacuucaccaucagcgugaccaccgagauccugccuguguccaugaccaagaccagcguggacugcaccauguacaucugcggcgauuccaccgagugcuccaaccugcugcugcaguacggcagcuucugcacccagcugaauagagcccugacagggaucgccguggaacaggacaagaacacccaagagguguucgcccaagugaagcaaaucuacaagaccccuccuaucaaggacuucggcggcuucaauuucagccagauucugcccgauccuagcaagcccagcaagcggagcuucaucgaggaccugcuguucaacaaagugacacuggccgacgccggcuucaucaagcaguauggcgauugucugggcgacauugccgccagggaucugauuugcgcccagaaguuuaacggacugacagugcugccuccucugcugaccgaugagaugaucgcccaguacacaucugcccugcuggccggcacaaucacaagcggcuggacauuuggagcuggcgccgcucugcagauccccuuugcuaugcagauggccuaccgguucaacggcaucggagugacccagaaugugcuguacgagaaccagaagcugaucgccaaccaguucaacagcgccaucggcaagauccaggacagccugagcagcacagcaagcgcccugggaaagcugcaggacguggucaaccagaaugcccaggcacugaacacccuggucaagcagcuguccuccaacuucggcgccaucagcucugugcugaacgauauccugagcagacuggacccuccugaggccgaggugcagaucgacagacugaucacaggcagacugcagagccuccagacauacgugacccagcagcugaucagagccgccgagauuagagccucugccaaucuggccgccaucaagaugucugagugugugcugggccagagcaagagaguggacuuuugcggcaagggcuaccaccugaugagcuucccucagucugccccucacggcgugguguuucugcacgugacauaugugcccgcucaagagaagaauuucaccaccgcuccagccaucugccacgacggcaaagcccacuuuccuagagaaggcguguucguguccaacggcacccauugguucgugacacagcggaacuucuacgagccccagaucaucaccaccgacaacaccuucgugucuggcaacugcgacguugugaucggcauugugaacaauaccguguacgacccucugcagcccgagcuggacagcuucaaagaggaacuggacaaguacuuuaagaaccacacaagccccgacguggaccugggcgauaucagcggaaucaaugccagcgucgugaacauccagaaagagaucgaccggcugaacgagguggccaagaaucugaacgagagccugaucgaccugcaagaacuggggaaguacgagcaguacaucaaguggcccugguacaucuggcugggcuuuaucgccggacugauugccaucgugauggucacaaucaugcuguguugcaugaccagcugcuguagcugccugaagggcuguuguagcuguggcagcugcugcaaguucgacgaggacgauucugagcccgugcugaagggcgugaaacugcacuacaccugaggacuagucccuguucccagagcccacuuuuuuuucuuuuuuugaaauaaaauagccugucuuucagaucucaaaggcucuuuucagagccaccaaaaaaaaaaaaaaaaaaaaaaaaaaaaaaaaaaaaaaaaaaaaaaaaaaaaaaaaaaaaaaaaaaaaaaaaaaaaaaaaaaaaaaaaaaaaaaaaaaaaa

SEQ ID NO: 23826 - RNA, 4191 nt, Artificial Sequence
  SARS-CoV-2/Wuhan/WIV05/2019__EPI_ISL_402128 spike protein mRNA gc mod (1-1273)(K986P_V987P_K986P_V987P_S13I_W152C_L452R_D614G)
aggagagggcgcuuggcuugcaaggacccugagcugcggcauugaagcacacccaacccaacucgacugaagucagccucacugaaccggaucugagaaucuucucucucugggcuugccagggcucuccgaaccuagcuagcauccucuucaauuccaacuagaaagcuuaccauguucguguuucuggugcugcugccccugguguccauccagugugugaaccugaccaccagaacacagcugccuccagccuacaccaacagcuucaccagaggcguguacuaccccgacaagguguucagauccagcgugcugcacucuacccaggaccuguuccugccuuucuucagcaacgugaccugguuccacgccauccacguguccggcaccaauggcaccaagagauucgacaaccccgugcugcccuucaacgacgggguguacuuugccagcaccgagaaguccaacaucaucagaggcuggaucuucggcaccacacuggacagcaagacccagagccugcugaucgugaacaacgccaccaacguggucaucaaagugugcgaguuccaguucugcaacgaccccuuccugggcgucuacuaccacaagaacaacaagagcugcauggaaagcgaguuccggguguacagcagcgccaacaacugcaccuucgaguacgugucccagccuuuccugauggaccuggaaggcaagcagggcaacuucaagaaccugcgcgaguucguguucaagaacaucgacggcuacuucaaaaucuacagcaagcacaccccuaucaaccucgugcgggaucugccucagggcuucucugcucuggaaccccugguggaucugcccaucggcaucaacaucacccgguuucagacacugcuggcccugcacagaagcuaccugacaccuggcgauagcagcagcggauggacagcuggugccgccgcuuacuaugugggcuaccugcagccuagaaccuuccugcugaaguacaacgagaacggcaccaucaccgacgccguggauugugcucuggauccucugagcgagacaaagugcacccugaaguccuucaccguggaaaagggcaucuaccagaccagcaacuuccgggugcagcccaccgaauccaucgugcgguuccccaauaucaccaaucugugccccuucggcgagguguucaaugccaccagauucgccucuguguacgccuggaaccggaagcggaucagcaauugcguggccgacuacuccgugcuguacaacuccgccagcuucagcaccuucaagugcuacggcguguccccuaccaagcugaacgaccugugcuucacaaacguguacgccgacagcuucgugauccggggagaugaagugcggcagauugccccuggacagacaggcaagaucgccgacuacaacuacaagcugcccgacgacuucaccggcugugugauugccuggaacagcaacaaccuggacuccaaagucggcggcaacuacaauuaccgcuaccggcuguuccggaaguccaaucugaagcccuucgagcgggacaucagcaccgaaaucuaucaggccggcagcaccccuugcaacggcguggaaggcuucaacugcuacuucccacugcaguccuacggcuuucagcccacaaauggcgugggcuaucagcccuacagagugguggugcugagcuucgaacugcugcaugcuccugccacagugugcggcccuaagaaaagcaccaaucucgugaagaacaaaugcgugaacuucaacuucaacggccugaccggcaccggcgugcugacagagagcaacaagaaguuccugccauuccagcaguuuggccgggauaucgccgauaccacagacgccguuagagauccccagacacuggaaauccuggacaucaccccaugcagcuucggcggagugucugugaucaccccuggcaccaacaccagcaaucagguggcagugcuguaccagggcgugaacuguaccgaagugcccguggccauucacgccgaucagcugacaccuacauggcggguguacuccaccggcagcaauguguuucagaccagagccggcugucugaucggagccgagcacgugaacaauagcuacgagugcgacauccccaucggcgcuggcaucugugccagcuaccagacacagacaaacagccccagacgggcuagaagcguggccagccagagcaucauugccuacacaaugucucugggcgccgagaacagcguggccuacuccaacaacucuaucgcuauccccaccaacuucaccaucagcgugaccaccgagauccugccuguguccaugaccaagaccagcguggacugcaccauguacaucugcggcgauuccaccgagugcuccaaccugcugcugcaguacggcagcuucugcacccagcugaauagagcccugacagggaucgccguggaacaggacaagaacacccaagagguguucgcccaagugaagcaaaucuacaagaccccuccuaucaaggacuucggcggcuucaauuucagccagauucugcccgauccuagcaagcccagcaagcggagcuucaucgaggaccugcuguucaacaaagugacacuggccgacgccggcuucaucaagcaguauggcgauugucugggcgacauugccgccagggaucugauuugcgcccagaaguuuaacggacugacagugcugccuccucugcugaccgaugagaugaucgcccaguacacaucugcccugcuggccggcacaaucacaagcggcuggacauuuggagcuggcgccgcucugcagauccccuuugcuaugcagauggccuaccgguucaacggcaucggagugacccagaaugugcuguacgagaaccagaagcugaucgccaaccaguucaacagcgccaucggcaagauccaggacagccugagcagcacagcaagcgcccugggaaagcugcaggacguggucaaccagaaugcccaggcacugaacacccuggucaagcagcuguccuccaacuucggcgccaucagcucugugcugaacgauauccugagcagacuggacccuccugaggccgaggugcagaucgacagacugaucacaggcagacugcagagccuccagacauacgugacccagcagcugaucagagccgccgagauuagagccucugccaaucuggccgccaccaagaugucugagugugugcugggccagagcaagagaguggacuuuugcggcaagggcuaccaccugaugagcuucccucagucugccccucacggcgugguguuucugcacgugacauaugugcccgcucaagagaagaauuucaccaccgcuccagccaucugccacgacggcaaagcccacuuuccuagagaaggcguguucguguccaacggcacccauugguucgugacacagcggaacuucuacgagccccagaucaucaccaccgacaacaccuucgugucuggcaacugcgacguugugaucggcauugugaacaauaccguguacgacccucugcagcccgagcuggacagcuucaaagaggaacuggacaaguacuuuaagaaccacacaagccccgacguggaccugggcgauaucagcggaaucaaugccagcgucgugaacauccagaaagagaucgaccggcugaacgagguggccaagaaucugaacgagagccugaucgaccugcaagaacuggggaaguacgagcaguacaucaaguggcccugguacaucuggcugggcuuuaucgccggacugauugccaucgugauggucacaaucaugcuguguugcaugaccagcugcuguagcugccugaagggcuguuguagcuguggcagcugcugcaaguucgacgaggacgauucugagcccgugcugaagggcgugaaacugcacuacaccugaggacuagucccuguucccagagcccacuuuuuuuucuuuuuuugaaauaaaauagccugucuuucagaucucaaaggcucuuuucagagccaccaaaaaaaaaaaaaaaaaaaaaaaaaaaaaaaaaaaaaaaaaaaaaaaaaaaaaaaaaaaaaaaaaaaaaaaaaaaaaaaaaaaaaaaaaaaaaaaaaaaaa

SEQ ID NO: 23827 - RNA, 4191 nt, Artificial Sequence
  SARS-CoV-2/Wuhan/WIV05/2019__EPI_ISL_402128 spike protein mRNA gc mod (1-1273)(K986P_V987P)
aggagagggcgcuuggcuugcaaggacccugagcugcggcauugaagcacacccaacccaacucgacugaagucagccucacugaaccggaucugagaaucuucucucucugggcuugccagggcucuccgaaccuagcuagcauccucuucaauuccaacuagaaagcuuaccauguucguguuccuggugcugcugccucugguguccagccagugugugaaccugaccaccagaacacagcugccuccagccuacaccaacagcuuuaccagaggcguguacuaccccgacaagguguucagauccagcgugcugcacucuacccaggaccuguuccugccuuucuucagcaacgugaccugguuccacgccauccacguguccggcaccaauggcaccaagagauucgacaaccccgugcugcccuucaacgacgggguguacuuugccagcaccgagaaguccaacaucaucagaggcuggaucuucggcaccacacuggacagcaagacccagagccugcugaucgugaacaacgccaccaacguggucaucaaagugugcgaguuccaguucugcaacgaccccuuccugggcgucuacuaccacaagaacaacaagagcuggauggaaagcgaguuccggguguacagcagcgccaacaacugcaccuucgaguacgugucccagccuuuccugauggaccuggaaggcaagcagggcaacuucaagaaccugcgcgaguucguguuuaagaacaucgacggcuacuucaagaucuacagcaagcacaccccuaucaaccucgugcgggaucugccucagggcuucucugcucuggaaccccugguggaucugcccaucggcaucaacaucacccgguuucagacacugcuggcccugcacagaagcuaccugacaccuggcgauagcagcagcggauggacagcuggugccgccgcuuacuaugugggcuaccugcagccuagaaccuuccugcugaaguacaacgagaacggcaccaucaccgacgccguggauugugcucuggauccucugagcgagacaaagugcacccugaaguccuucaccguggaaaagggcaucuaccagaccagcaacuuccgggugcagcccaccgaauccaucgugcgguuccccaauaucaccaaucugugccccuucggcgagguguucaaugccaccagauucgccucuguguacgccuggaaccggaagcggaucagcaauugcguggccgacuacuccgugcuguacaacuccgccagcuucagcaccuucaagugcuacggcguguccccuaccaagcugaacgaccugugcuucacaaacguguacgccgacagcuucgugauccggggagaugaagugcggcagauugccccuggacagacaggcaagaucgccgacuacaacuacaagcugcccgacgacuucaccggcugugugauugccuggaacagcaacaaccuggacuccaaagucggcggcaacuacaauuaccuguaccggcuguuccggaaguccaaucugaagcccuucgagcgggacaucuccaccgagaucuaucaggccggcagcaccccuuguaacggcguggaaggcuucaacugcuacuucccacugcaguccuacggcuuucagcccacaaauggcgugggcuaucagcccuacagagugguggugcugagcuucgaacugcugcaugccccugccacagugugcggcccuaagaaaagcaccaaucucgugaagaacaaaugcgugaacuucaacuucaacggccugaccggcaccggcgugcugacagagagcaacaagaaguuccugccauuccagcaguuuggccgggauaucgccgauaccacagacgccguuagagauccccagacacuggaaauccuggacaucaccccuugcagcuucggcggagugucugugaucaccccuggcaccaacaccagcaaucagguggcagugcuguaccaggacgugaacuguaccgaagugcccguggccauucacgccgaucagcugacaccuacauggcggguguacuccaccggcagcaauguguuucagaccagagccggcugucugaucggagccgagcacgugaacaauagcuacgagugcgacauccccaucggcgcuggaaucugcgccagcuaccagacacagacaaacagcccucggagagccagaagcguggccagccagagcaucauugccuacacaaugucucugggcgccgagaacagcguggccuacuccaacaacucuaucgcuauccccaccaacuucaccaucagcgugaccacagagauccugccuguguccaugaccaagaccagcguggacugcaccauguacaucugcggcgauuccaccgagugcuccaaccugcugcugcaguacggcagcuucugcacccagcugaauagagcccugacagggaucgccguggaacaggacaagaacacccaagagguguucgcccaagugaagcagaucuacaagaccccuccuaucaaggacuucggcggcuucaauuucagccagauucugcccgauccuagcaagcccagcaagcggagcuucaucgaggaccugcuguucaacaaagugacacuggccgacgccggcuucaucaagcaguauggcgauugucugggcgacauugccgccagggaucugauuugcgcccagaaguuuaacggacugacagugcugccuccucugcugaccgaugagaugaucgcccaguacacaucugcccugcuggccggcacaaucacaagcggcuggacauuuggagcaggcgccgcucugcagauccccuuugcuaugcagauggccuaccgguucaacggcaucggagugacccagaaugugcuguacgagaaccagaagcugaucgccaaccaguucaacagcgccaucggcaagauccaggacagccugagcagcacagcaagcgcccugggaaagcugcaggacguggucaaccagaaugcccaggcacugaacacccuggucaagcagcuguccuccaacuucggcgccaucagcucugugcugaacgauauccugagcagacuggacccuccugaggccgaggugcagaucgacagacugaucacaggcagacugcagagccuccagacauacgugacccagcagcugaucagagccgccgagauuagagccucugccaaucuggccgccaccaagaugucugagugugugcugggccagagcaagagaguggacuuuugcggcaagggcuaccaccugaugagcuucccucagucugccccucacggcgugguguuucugcacgugacauaugugcccgcucaagagaagaauuucaccaccgcuccagccaucugccacgacggcaaagcccacuuuccuagagaaggcguguucguguccaacggcacccauugguucgugacacagcggaacuucuacgagccccagaucaucaccaccgacaacaccuucgugucuggcaacugcgacgucgugaucggcauugugaacaauaccguguacgacccucugcagcccgagcuggacagcuucaaagaggaacuggacaaguacuuuaagaaccacacaagccccgacguggaccugggcgauaucagcggaaucaaugccagcgucgugaacauccagaaagagaucgaccggcugaacgagguggccaagaaucugaacgagagccugaucgaccugcaagaacuggggaaguacgagcaguacaucaaguggcccugguacaucuggcugggcuuuaucgccggacugauugccaucgugauggucacaaucaugcuguguugcaugaccagcugcuguagcugccugaagggcuguuguagcuguggcagcugcugcaaguucgacgaggacgauucugagcccgugcugaagggcgugaaacugcacuacacaugaggacuagucccuguucccagagcccacuuuuuuuucuuuuuuugaaauaaaauagccugucuuucagaucucaaaggcucuuuucagagccaccaaaaaaaaaaaaaaaaaaaaaaaaaaaaaaaaaaaaaaaaaaaaaaaaaaaaaaaaaaaaaaaaaaaaaaaaaaaaaaaaaaaaaaaaaaaaaaaaaaaaa

SEQ ID NO: 23828 - RNA, 4191 nt, Artificial Sequence
  SARS-CoV-2/Wuhan/WIV05/2019__EPI_ISL_402128 spike protein mRNA gc mod (1-1273)(K986P_V987P_ D614G)
aggagagggcgcuuggcuugcaaggacccugagcugcggcauugaagcacacccaacccaacucgacugaagucagccucacugaaccggaucugagaaucuucucucucugggcuugccagggcucuccgaaccuagcuagcauccucuucaauuccaacuagaaagcuuaccauguucguguuccuggugcugcugccucugguguccagccagugugugaaccugaccaccagaacacagcugccuccagccuacaccaacagcuuuaccagaggcguguacuaccccgacaagguguucagauccagcgugcugcacucuacccaggaccuguuccugccuuucuucagcaacgugaccugguuccacgccauccacguguccggcaccaauggcaccaagagauucgacaaccccgugcugcccuucaacgacgggguguacuuugccagcaccgagaaguccaacaucaucagaggcuggaucuucggcaccacacuggacagcaagacccagagccugcugaucgugaacaacgccaccaacguggucaucaaagugugcgaguuccaguucugcaacgaccccuuccugggcgucuacuaccacaagaacaacaagagcuggauggaaagcgaguuccggguguacagcagcgccaacaacugcaccuucgaguacgugucccagccuuuccugauggaccuggaaggcaagcagggcaacuucaagaaccugcgcgaguucguguuuaagaacaucgacggcuacuucaagaucuacagcaagcacaccccuaucaaccucgugcgggaucugccucagggcuucucugcucuggaaccccugguggaucugcccaucggcaucaacaucacccgguuucagacacugcuggcccugcacagaagcuaccugacaccuggcgauagcagcagcggauggacagcuggugccgccgcuuacuaugugggcuaccugcagccuagaaccuuccugcugaaguacaacgagaacggcaccaucaccgacgccguggauugugcucuggauccucugagcgagacaaagugcacccugaaguccuucaccguggaaaagggcaucuaccagaccagcaacuuccgggugcagcccaccgaauccaucgugcgguuccccaauaucaccaaucugugccccuucggcgagguguucaaugccaccagauucgccucuguguacgccuggaaccggaagcggaucagcaauugcguggccgacuacuccgugcuguacaacuccgccagcuucagcaccuucaagugcuacggcguguccccuaccaagcugaacgaccugugcuucacaaacguguacgccgacagcuucgugauccggggagaugaagugcggcagauugccccuggacagacaggcaagaucgccgacuacaacuacaagcugcccgacgacuucaccggcugugugauugccuggaacagcaacaaccuggacuccaaagucggcggcaacuacaauuaccuguaccggcuguuccggaaguccaaucugaagcccuucgagcgggacaucuccaccgagaucuaucaggccggcagcaccccuuguaacggcguggaaggcuucaacugcuacuucccacugcaguccuacggcuuucagcccacaaauggcgugggcuaucagcccuacagagugguggugcugagcuucgaacugcugcaugccccugccacagugugcggcccuaagaaaagcaccaaucucgugaagaacaaaugcgugaacuucaacuucaacggccugaccggcaccggcgugcugacagagagcaacaagaaguuccugccauuccagcaguuuggccgggauaucgccgauaccacagacgccguuagagauccccagacacuggaaauccuggacaucaccccuugcagcuucggcggagugucugugaucaccccuggcaccaacaccagcaaucagguggcagugcuguaccagggcgugaacuguaccgaagugcccguggccauucacgccgaucagcugacaccuacauggcggguguacuccaccggcagcaauguguuucagaccagagccggcugucugaucggagccgagcacgugaacaauagcuacgagugcgacauccccaucggcgcuggaaucugcgccagcuaccagacacagacaaacagcccucggagagccagaagcguggccagccagagcaucauugccuacacaaugucucugggcgccgagaacagcguggccuacuccaacaacucuaucgcuauccccaccaacuucaccaucagcgugaccacagagauccugccuguguccaugaccaagaccagcguggacugcaccauguacaucugcggcgauuccaccgagugcuccaaccugcugcugcaguacggcagcuucugcacccagcugaauagagcccugacagggaucgccguggaacaggacaagaacacccaagagguguucgcccaagugaagcagaucuacaagaccccuccuaucaaggacuucggcggcuucaauuucagccagauucugcccgauccuagcaagcccagcaagcggagcuucaucgaggaccugcuguucaacaaagugacacuggccgacgccggcuucaucaagcaguauggcgauugucugggcgacauugccgccagggaucugauuugcgcccagaaguuuaacggacugacagugcugccuccucugcugaccgaugagaugaucgcccaguacacaucugcccugcuggccggcacaaucacaagcggcuggacauuuggagcaggcgccgcucugcagauccccuuugcuaugcagauggccuaccgguucaacggcaucggagugacccagaaugugcuguacgagaaccagaagcugaucgccaaccaguucaacagcgccaucggcaagauccaggacagccugagcagcacagcaagcgcccugggaaagcugcaggacguggucaaccagaaugcccaggcacugaacacccuggucaagcagcuguccuccaacuucggcgccaucagcucugugcugaacgauauccugagcagacuggacccuccugaggccgaggugcagaucgacagacugaucacaggcagacugcagagccuccagacauacgugacccagcagcugaucagagccgccgagauuagagccucugccaaucuggccgccaccaagaugucugagugugugcugggccagagcaagagaguggacuuuugcggcaagggcuaccaccugaugagcuucccucagucugccccucacggcgugguguuucugcacgugacauaugugcccgcucaagagaagaauuucaccaccgcuccagccaucugccacgacggcaaagcccacuuuccuagagaaggcguguucguguccaacggcacccauugguucgugacacagcggaacuucuacgagccccagaucaucaccaccgacaacaccuucgugucuggcaacugcgacgucgugaucggcauugugaacaauaccguguacgacccucugcagcccgagcuggacagcuucaaagaggaacuggacaaguacuuuaagaaccacacaagccccgacguggaccugggcgauaucagcggaaucaaugccagcgucgugaacauccagaaagagaucgaccggcugaacgagguggccaagaaucugaacgagagccugaucgaccugcaagaacuggggaaguacgagcaguacaucaaguggcccugguacaucuggcugggcuuuaucgccggacugauugccaucgugauggucacaaucaugcuguguugcaugaccagcugcuguagcugccugaagggcuguuguagcuguggcagcugcugcaaguucgacgaggacgauucugagcccgugcugaagggcgugaaacugcacuacacaugaggacuagucccuguucccagagcccacuuuuuuuucuuuuuuugaaauaaaauagccugucuuucagaucucaaaggcucuuuucagagccaccaaaaaaaaaaaaaaaaaaaaaaaaaaaaaaaaaaaaaaaaaaaaaaaaaaaaaaaaaaaaaaaaaaaaaaaaaaaaaaaaaaaaaaaaaaaaaaaaaaaaa

SEQ ID NO: 23829 - RNA, 4191 nt, Artificial Sequence
  SARS-CoV-2/Wuhan/WIV05/2019__EPI_ISL_402128 spike protein mRNA gc mod (1-1273)(K986P_V987P_A222V_D614G)
aggagagggcgcuuggcuugcaaggacccugagcugcggcauugaagcacacccaacccaacucgacugaagucagccucacugaaccggaucugagaaucuucucucucugggcuugccagggcucuccgaaccuagcuagcauccucuucaauuccaacuagaaagcuuaccauguucguguuccuggugcugcugccucugguguccagccagugugugaaccugaccaccagaacacagcugccuccagccuacaccaacagcuuuaccagaggcguguacuaccccgacaagguguucagauccagcgugcugcacucuacccaggaccuguuccugccuuucuucagcaacgugaccugguuccacgccauccacguguccggcaccaauggcaccaagagauucgacaaccccgugcugcccuucaacgacgggguguacuuugccagcaccgagaaguccaacaucaucagaggcuggaucuucggcaccacacuggacagcaagacccagagccugcugaucgugaacaacgccaccaacguggucaucaaagugugcgaguuccaguucugcaacgaccccuuccugggcgucuacuaccacaagaacaacaagagcuggauggaaagcgaguuccggguguacagcagcgccaacaacugcaccuucgaguacgugucccagccuuuccugauggaccuggaaggcaagcagggcaacuucaagaaccugcgcgaguucguguuuaagaacaucgacggcuacuucaagaucuacagcaagcacaccccuaucaaccucgugcgggaucugccucagggcuucucugugcuggaaccccugguggaucugcccaucggcaucaacaucacccgguuucagacacugcuggcccugcacagaagcuaccugacaccuggcgauagcagcagcggauggacagcuggugccgccgcuuacuaugugggcuaccugcagccuagaaccuuccugcugaaguacaacgagaacggcaccaucaccgacgccguggauugugcucuggauccucugagcgagacaaagugcacccugaaguccuucaccguggaaaagggcaucuaccagaccagcaacuuccgggugcagcccaccgaauccaucgugcgguuccccaauaucaccaaucugugccccuucggcgagguguucaaugccaccagauucgccucuguguacgccuggaaccggaagcggaucagcaauugcguggccgacuacuccgugcuguacaacuccgccagcuucagcaccuucaagugcuacggcguguccccuaccaagcugaacgaccugugcuucacaaacguguacgccgacagcuucgugauccggggagaugaagugcggcagauugccccuggacagacaggcaagaucgccgacuacaacuacaagcugcccgacgacuucaccggcugugugauugccuggaacagcaacaaccuggacuccaaagucggcggcaacuacaauuaccuguaccggcuguuccggaaguccaaucugaagcccuucgagcgggacaucuccaccgagaucuaucaggccggcagcaccccuuguaacggcguggaaggcuucaacugcuacuucccacugcaguccuacggcuuucagcccacaaauggcgugggcuaucagcccuacagagugguggugcugagcuucgaacugcugcaugccccugccacagugugcggcccuaagaaaagcaccaaucucgugaagaacaaaugcgugaacuucaacuucaacggccugaccggcaccggcgugcugacagagagcaacaagaaguuccugccauuccagcaguuuggccgggauaucgccgauaccacagacgccguuagagauccccagacacuggaaauccuggacaucaccccuugcagcuucggcggagugucugugaucaccccuggcaccaacaccagcaaucagguggcagugcuguaccagggcgugaacuguaccgaagugcccguggccauucacgccgaucagcugacaccuacauggcggguguacuccaccggcagcaauguguuucagaccagagccggcugucugaucggagccgagcacgugaacaauagcuacgagugcgacauccccaucggcgcuggaaucugcgccagcuaccagacacagacaaacagcccucggagagccagaagcguggccagccagagcaucauugccuacacaaugucucugggcgccgagaacagcguggccuacuccaacaacucuaucgcuauccccaccaacuucaccaucagcgugaccacagagauccugccuguguccaugaccaagaccagcguggacugcaccauguacaucugcggcgauuccaccgagugcuccaaccugcugcugcaguacggcagcuucugcacccagcugaauagagcccugacagggaucgccguggaacaggacaagaacacccaagagguguucgcccaagugaagcagaucuacaagaccccuccuaucaaggacuucggcggcuucaauuucagccagauucugcccgauccuagcaagcccagcaagcggagcuucaucgaggaccugcuguucaacaaagugacacuggccgacgccggcuucaucaagcaguauggcgauugucugggcgacauugccgccagggaucugauuugcgcccagaaguuuaacggacugacagugcugccuccucugcugaccgaugagaugaucgcccaguacacaucugcccugcuggccggcacaaucacaagcggcuggacauuuggagcaggcgccgcucugcagauccccuuugcuaugcagauggccuaccgguucaacggcaucggagugacccagaaugugcuguacgagaaccagaagcugaucgccaaccaguucaacagcgccaucggcaagauccaggacagccugagcagcacagcaagcgcccugggaaagcugcaggacguggucaaccagaaugcccaggcacugaacacccuggucaagcagcuguccuccaacuucggcgccaucagcucugugcugaacgauauccugagcagacuggacccuccugaggccgaggugcagaucgacagacugaucacaggcagacugcagagccuccagacauacgugacccagcagcugaucagagccgccgagauuagagccucugccaaucuggccgccaccaagaugucugagugugugcugggccagagcaagagaguggacuuuugcggcaagggcuaccaccugaugagcuucccucagucugccccucacggcgugguguuucugcacgugacauaugugcccgcucaagagaagaauuucaccaccgcuccagccaucugccacgacggcaaagcccacuuuccuagagaaggcguguucguguccaacggcacccauugguucgugacacagcggaacuucuacgagccccagaucaucaccaccgacaacaccuucgugucuggcaacugcgacgucgugaucggcauugugaacaauaccguguacgacccucugcagcccgagcuggacagcuucaaagaggaacuggacaaguacuuuaagaaccacacaagccccgacguggaccugggcgauaucagcggaaucaaugccagcgucgugaacauccagaaagagaucgaccggcugaacgagguggccaagaaucugaacgagagccugaucgaccugcaagaacuggggaaguacgagcaguacaucaaguggcccugguacaucuggcugggcuuuaucgccggacugauugccaucgugauggucacaaucaugcuguguugcaugaccagcugcuguagcugccugaagggcuguuguagcuguggcagcugcugcaaguucgacgaggacgauucugagcccgugcugaagggcgugaaacugcacuacacaugaggacuagucccuguucccagagcccacuuuuuuuucuuuuuuugaaauaaaauagccugucuuucagaucucaaaggcucuuuucagagccaccaaaaaaaaaaaaaaaaaaaaaaaaaaaaaaaaaaaaaaaaaaaaaaaaaaaaaaaaaaaaaaaaaaaaaaaaaaaaaaaaaaaaaaaaaaaaaaaaaaaaa

SEQ ID NO: 23830 - RNA, 4191 nt, Artificial Sequence
  SARS-CoV-2/Wuhan/WIV05/2019__EPI_ISL_402128 spike protein mRNA gc mod (1-1273)(K986P_V987P_N439K_D614G)
aggagagggcgcuuggcuugcaaggacccugagcugcggcauugaagcacacccaacccaacucgacugaagucagccucacugaaccggaucugagaaucuucucucucugggcuugccagggcucuccgaaccuagcuagcauccucuucaauuccaacuagaaagcuuaccauguucguguuccuggugcugcugccucugguguccagccagugugugaaccugaccaccagaacacagcugccuccagccuacaccaacagcuuuaccagaggcguguacuaccccgacaagguguucagauccagcgugcugcacucuacccaggaccuguuccugccuuucuucagcaacgugaccugguuccacgccauccacguguccggcaccaauggcaccaagagauucgacaaccccgugcugcccuucaacgacgggguguacuuugccagcaccgagaaguccaacaucaucagaggcuggaucuucggcaccacacuggacagcaagacccagagccugcugaucgugaacaacgccaccaacguggucaucaaagugugcgaguuccaguucugcaacgaccccuuccugggcgucuacuaccacaagaacaacaagagcuggauggaaagcgaguuccggguguacagcagcgccaacaacugcaccuucgaguacgugucccagccuuuccugauggaccuggaaggcaagcagggcaacuucaagaaccugcgcgaguucguguuuaagaacaucgacggcuacuucaagaucuacagcaagcacaccccuaucaaccucgugcgggaucugccucagggcuucucugcucuggaaccccugguggaucugcccaucggcaucaacaucacccgguuucagacacugcuggcccugcacagaagcuaccugacaccuggcgauagcagcagcggauggacagcuggugccgccgcuuacuaugugggcuaccugcagccuagaaccuuccugcugaaguacaacgagaacggcaccaucaccgacgccguggauugugcucuggauccucugagcgagacaaagugcacccugaaguccuucaccguggaaaagggcaucuaccagaccagcaacuuccgggugcagcccaccgaauccaucgugcgguuccccaauaucaccaaucugugccccuucggcgagguguucaaugccaccagauucgccucuguguacgccuggaaccggaagcggaucagcaauugcguggccgacuacuccgugcuguacaacuccgccagcuucagcaccuucaagugcuacggcguguccccuaccaagcugaacgaccugugcuucacaaacguguacgccgacagcuucgugauccggggagaugaagugcggcagauugccccuggacagacaggcaagaucgccgacuacaacuacaagcugcccgacgacuucaccggcugugugauugccuggaacagcaagaaccuggacuccaaagucggcggcaacuacaauuaccuguaccggcuguuccggaaguccaaucugaagcccuucgagcgggacaucuccaccgagaucuaucaggccggcagcaccccuuguaacggcguggaaggcuucaacugcuacuucccacugcaguccuacggcuuucagcccacaaauggcgugggcuaucagcccuacagagugguggugcugagcuucgaacugcugcaugccccugccacagugugcggcccuaagaaaagcaccaaucucgugaagaacaaaugcgugaacuucaacuucaacggccugaccggcaccggcgugcugacagagagcaacaagaaguuccugccauuccagcaguuuggccgggauaucgccgauaccacagacgccguuagagauccccagacacuggaaauccuggacaucaccccuugcagcuucggcggagugucugugaucaccccuggcaccaacaccagcaaucagguggcagugcuguaccagggcgugaacuguaccgaagugcccguggccauucacgccgaucagcugacaccuacauggcggguguacuccaccggcagcaauguguuucagaccagagccggcugucugaucggagccgagcacgugaacaauagcuacgagugcgacauccccaucggcgcuggaaucugcgccagcuaccagacacagacaaacagcccucggagagccagaagcguggccagccagagcaucauugccuacacaaugucucugggcgccgagaacagcguggccuacuccaacaacucuaucgcuauccccaccaacuucaccaucagcgugaccacagagauccugccuguguccaugaccaagaccagcguggacugcaccauguacaucugcggcgauuccaccgagugcuccaaccugcugcugcaguacggcagcuucugcacccagcugaauagagcccugacagggaucgccguggaacaggacaagaacacccaagagguguucgcccaagugaagcagaucuacaagaccccuccuaucaaggacuucggcggcuucaauuucagccagauucugcccgauccuagcaagcccagcaagcggagcuucaucgaggaccugcuguucaacaaagugacacuggccgacgccggcuucaucaagcaguauggcgauugucugggcgacauugccgccagggaucugauuugcgcccagaaguuuaacggacugacagugcugccuccucugcugaccgaugagaugaucgcccaguacacaucugcccugcuggccggcacaaucacaagcggcuggacauuuggagcaggcgccgcucugcagauccccuuugcuaugcagauggccuaccgguucaacggcaucggagugacccagaaugugcuguacgagaaccagaagcugaucgccaaccaguucaacagcgccaucggcaagauccaggacagccugagcagcacagcaagcgcccugggaaagcugcaggacguggucaaccagaaugcccaggcacugaacacccuggucaagcagcuguccuccaacuucggcgccaucagcucugugcugaacgauauccugagcagacuggacccuccugaggccgaggugcagaucgacagacugaucacaggcagacugcagagccuccagacauacgugacccagcagcugaucagagccgccgagauuagagccucugccaaucuggccgccaccaagaugucugagugugugcugggccagagcaagagaguggacuuuugcggcaagggcuaccaccugaugagcuucccucagucugccccucacggcgugguguuucugcacgugacauaugugcccgcucaagagaagaauuucaccaccgcuccagccaucugccacgacggcaaagcccacuuuccuagagaaggcguguucguguccaacggcacccauugguucgugacacagcggaacuucuacgagccccagaucaucaccaccgacaacaccuucgugucuggcaacugcgacgucgugaucggcauugugaacaauaccguguacgacccucugcagcccgagcuggacagcuucaaagaggaacuggacaaguacuuuaagaaccacacaagccccgacguggaccugggcgauaucagcggaaucaaugccagcgucgugaacauccagaaagagaucgaccggcugaacgagguggccaagaaucugaacgagagccugaucgaccugcaagaacuggggaaguacgagcaguacaucaaguggcccugguacaucuggcugggcuuuaucgccggacugauugccaucgugauggucacaaucaugcuguguugcaugaccagcugcuguagcugccugaagggcuguuguagcuguggcagcugcugcaaguucgacgaggacgauucugagcccgugcugaagggcgugaaacugcacuacacaugaggacuagucccuguucccagagcccacuuuuuuuucuuuuuuugaaauaaaauagccugucuuucagaucucaaaggcucuuuucagagccaccaaaaaaaaaaaaaaaaaaaaaaaaaaaaaaaaaaaaaaaaaaaaaaaaaaaaaaaaaaaaaaaaaaaaaaaaaaaaaaaaaaaaaaaaaaaaaaaaaaaaa

SEQ ID NO: 23831 - RNA, 4191 nt, Artificial Sequence
  SARS-CoV-2/Wuhan/WIV05/2019__EPI_ISL_402128 spike protein mRNA gc mod (1-1273)(K986P_V987P_S477N_D614G)
aggagagggcgcuuggcuugcaaggacccugagcugcggcauugaagcacacccaacccaacucgacugaagucagccucacugaaccggaucugagaaucuucucucucugggcuugccagggcucuccgaaccuagcuagcauccucuucaauuccaacuagaaagcuuaccauguucguguuccuggugcugcugccucugguguccagccagugugugaaccugaccaccagaacacagcugccuccagccuacaccaacagcuuuaccagaggcguguacuaccccgacaagguguucagauccagcgugcugcacucuacccaggaccuguuccugccuuucuucagcaacgugaccugguuccacgccauccacguguccggcaccaauggcaccaagagauucgacaaccccgugcugcccuucaacgacgggguguacuuugccagcaccgagaaguccaacaucaucagaggcuggaucuucggcaccacacuggacagcaagacccagagccugcugaucgugaacaacgccaccaacguggucaucaaagugugcgaguuccaguucugcaacgaccccuuccugggcgucuacuaccacaagaacaacaagagcuggauggaaagcgaguuccggguguacagcagcgccaacaacugcaccuucgaguacgugucccagccuuuccugauggaccuggaaggcaagcagggcaacuucaagaaccugcgcgaguucguguuuaagaacaucgacggcuacuucaagaucuacagcaagcacaccccuaucaaccucgugcgggaucugccucagggcuucucugcucuggaaccccugguggaucugcccaucggcaucaacaucacccgguuucagacacugcuggcccugcacagaagcuaccugacaccuggcgauagcagcagcggauggacagcuggugccgccgcuuacuaugugggcuaccugcagccuagaaccuuccugcugaaguacaacgagaacggcaccaucaccgacgccguggauugugcucuggauccucugagcgagacaaagugcacccugaaguccuucaccguggaaaagggcaucuaccagaccagcaacuuccgggugcagcccaccgaauccaucgugcgguuccccaauaucaccaaucugugccccuucggcgagguguucaaugccaccagauucgccucuguguacgccuggaaccggaagcggaucagcaauugcguggccgacuacuccgugcuguacaacuccgccagcuucagcaccuucaagugcuacggcguguccccuaccaagcugaacgaccugugcuucacaaacguguacgccgacagcuucgugauccggggagaugaagugcggcagauugccccuggacagacaggcaagaucgccgacuacaacuacaagcugcccgacgacuucaccggcugugugauugccuggaacagcaacaaccuggacuccaaagucggcggcaacuacaauuaccuguaccggcuguuccggaaguccaaucugaagcccuucgagcgggacaucuccaccgagaucuaucaggccggcaacaccccuuguaacggcguggaaggcuucaacugcuacuucccacugcaguccuacggcuuucagcccacaaauggcgugggcuaucagcccuacagagugguggugcugagcuucgaacugcugcaugccccugccacagugugcggcccuaagaaaagcaccaaucucgugaagaacaaaugcgugaacuucaacuucaacggccugaccggcaccggcgugcugacagagagcaacaagaaguuccugccauuccagcaguuuggccgggauaucgccgauaccacagacgccguuagagauccccagacacuggaaauccuggacaucaccccuugcagcuucggcggagugucugugaucaccccuggcaccaacaccagcaaucagguggcagugcuguaccagggcgugaacuguaccgaagugcccguggccauucacgccgaucagcugacaccuacauggcggguguacuccaccggcagcaauguguuucagaccagagccggcugucugaucggagccgagcacgugaacaauagcuacgagugcgacauccccaucggcgcuggaaucugcgccagcuaccagacacagacaaacagcccucggagagccagaagcguggccagccagagcaucauugccuacacaaugucucugggcgccgagaacagcguggccuacuccaacaacucuaucgcuauccccaccaacuucaccaucagcgugaccacagagauccugccuguguccaugaccaagaccagcguggacugcaccauguacaucugcggcgauuccaccgagugcuccaaccugcugcugcaguacggcagcuucugcacccagcugaauagagcccugacagggaucgccguggaacaggacaagaacacccaagagguguucgcccaagugaagcagaucuacaagaccccuccuaucaaggacuucggcggcuucaauuucagccagauucugcccgauccuagcaagcccagcaagcggagcuucaucgaggaccugcuguucaacaaagugacacuggccgacgccggcuucaucaagcaguauggcgauugucugggcgacauugccgccagggaucugauuugcgcccagaaguuuaacggacugacagugcugccuccucugcugaccgaugagaugaucgcccaguacacaucugcccugcuggccggcacaaucacaagcggcuggacauuuggagcaggcgccgcucugcagauccccuuugcuaugcagauggccuaccgguucaacggcaucggagugacccagaaugugcuguacgagaaccagaagcugaucgccaaccaguucaacagcgccaucggcaagauccaggacagccugagcagcacagcaagcgcccugggaaagcugcaggacguggucaaccagaaugcccaggcacugaacacccuggucaagcagcuguccuccaacuucggcgccaucagcucugugcugaacgauauccugagcagacuggacccuccugaggccgaggugcagaucgacagacugaucacaggcagacugcagagccuccagacauacgugacccagcagcugaucagagccgccgagauuagagccucugccaaucuggccgccaccaagaugucugagugugugcugggccagagcaagagaguggacuuuugcggcaagggcuaccaccugaugagcuucccucagucugccccucacggcgugguguuucugcacgugacauaugugcccgcucaagagaagaauuucaccaccgcuccagccaucugccacgacggcaaagcccacuuuccuagagaaggcguguucguguccaacggcacccauugguucgugacacagcggaacuucuacgagccccagaucaucaccaccgacaacaccuucgugucuggcaacugcgacgucgugaucggcauugugaacaauaccguguacgacccucugcagcccgagcuggacagcuucaaagaggaacuggacaaguacuuuaagaaccacacaagccccgacguggaccugggcgauaucagcggaaucaaugccagcgucgugaacauccagaaagagaucgaccggcugaacgagguggccaagaaucugaacgagagccugaucgaccugcaagaacuggggaaguacgagcaguacaucaaguggcccugguacaucuggcugggcuuuaucgccggacugauugccaucgugauggucacaaucaugcuguguugcaugaccagcugcuguagcugccugaagggcuguuguagcuguggcagcugcugcaaguucgacgaggacgauucugagcccgugcugaagggcgugaaacugcacuacacaugaggacuagucccuguucccagagcccacuuuuuuuucuuuuuuugaaauaaaauagccugucuuucagaucucaaaggcucuuuucagagccaccaaaaaaaaaaaaaaaaaaaaaaaaaaaaaaaaaaaaaaaaaaaaaaaaaaaaaaaaaaaaaaaaaaaaaaaaaaaaaaaaaaaaaaaaaaaaaaaaaaaaa

SEQ ID NO: 23832 - RNA, 4191 nt, Artificial Sequence
  SARS-CoV-2/Wuhan/WIV05/2019__EPI_ISL_402128 spike protein mRNA gc mod (1-1273)(K986P_V987P_N501Y_D614G)
aggagagggcgcuuggcuugcaaggacccugagcugcggcauugaagcacacccaacccaacucgacugaagucagccucacugaaccggaucugagaaucuucucucucugggcuugccagggcucuccgaaccuagcuagcauccucuucaauuccaacuagaaagcuuaccauguucguguuccuggugcugcugccucugguguccagccagugugugaaccugaccaccagaacacagcugccuccagccuacaccaacagcuuuaccagaggcguguacuaccccgacaagguguucagauccagcgugcugcacucuacccaggaccuguuccugccuuucuucagcaacgugaccugguuccacgccauccacguguccggcaccaauggcaccaagagauucgacaaccccgugcugcccuucaacgacgggguguacuuugccagcaccgagaaguccaacaucaucagaggcuggaucuucggcaccacacuggacagcaagacccagagccugcugaucgugaacaacgccaccaacguggucaucaaagugugcgaguuccaguucugcaacgaccccuuccugggcgucuacuaccacaagaacaacaagagcuggauggaaagcgaguuccggguguacagcagcgccaacaacugcaccuucgaguacgugucccagccuuuccugauggaccuggaaggcaagcagggcaacuucaagaaccugcgcgaguucguguuuaagaacaucgacggcuacuucaagaucuacagcaagcacaccccuaucaaccucgugcgggaucugccucagggcuucucugcucuggaaccccugguggaucugcccaucggcaucaacaucacccgguuucagacacugcuggcccugcacagaagcuaccugacaccuggcgauagcagcagcggauggacagcuggugccgccgcuuacuaugugggcuaccugcagccuagaaccuuccugcugaaguacaacgagaacggcaccaucaccgacgccguggauugugcucuggauccucugagcgagacaaagugcacccugaaguccuucaccguggaaaagggcaucuaccagaccagcaacuuccgggugcagcccaccgaauccaucgugcgguuccccaauaucaccaaucugugccccuucggcgagguguucaaugccaccagauucgccucuguguacgccuggaaccggaagcggaucagcaauugcguggccgacuacuccgugcuguacaacuccgccagcuucagcaccuucaagugcuacggcguguccccuaccaagcugaacgaccugugcuucacaaacguguacgccgacagcuucgugauccggggagaugaagugcggcagauugccccuggacagacaggcaagaucgccgacuacaacuacaagcugcccgacgacuucaccggcugugugauugccuggaacagcaacaaccuggacuccaaagucggcggcaacuacaauuaccuguaccggcuguuccggaaguccaaucugaagcccuucgagcgggacaucuccaccgagaucuaucaggccggcagcaccccuuguaacggcguggaaggcuucaacugcuacuucccacugcaguccuacggcuuucagcccacauacggcgugggcuaucagcccuacagagugguggugcugagcuucgaacugcugcaugccccugccacagugugcggcccuaagaaaagcaccaaucucgugaagaacaaaugcgugaacuucaacuucaacggccugaccggcaccggcgugcugacagagagcaacaagaaguuccugccauuccagcaguuuggccgggauaucgccgauaccacagacgccguuagagauccccagacacuggaaauccuggacaucaccccuugcagcuucggcggagugucugugaucaccccuggcaccaacaccagcaaucagguggcagugcuguaccagggcgugaacuguaccgaagugcccguggccauucacgccgaucagcugacaccuacauggcggguguacuccaccggcagcaauguguuucagaccagagccggcugucugaucggagccgagcacgugaacaauagcuacgagugcgacauccccaucggcgcuggaaucugcgccagcuaccagacacagacaaacagcccucggagagccagaagcguggccagccagagcaucauugccuacacaaugucucugggcgccgagaacagcguggccuacuccaacaacucuaucgcuauccccaccaacuucaccaucagcgugaccacagagauccugccuguguccaugaccaagaccagcguggacugcaccauguacaucugcggcgauuccaccgagugcuccaaccugcugcugcaguacggcagcuucugcacccagcugaauagagcccugacagggaucgccguggaacaggacaagaacacccaagagguguucgcccaagugaagcagaucuacaagaccccuccuaucaaggacuucggcggcuucaauuucagccagauucugcccgauccuagcaagcccagcaagcggagcuucaucgaggaccugcuguucaacaaagugacacuggccgacgccggcuucaucaagcaguauggcgauugucugggcgacauugccgccagggaucugauuugcgcccagaaguuuaacggacugacagugcugccuccucugcugaccgaugagaugaucgcccaguacacaucugcccugcuggccggcacaaucacaagcggcuggacauuuggagcaggcgccgcucugcagauccccuuugcuaugcagauggccuaccgguucaacggcaucggagugacccagaaugugcuguacgagaaccagaagcugaucgccaaccaguucaacagcgccaucggcaagauccaggacagccugagcagcacagcaagcgcccugggaaagcugcaggacguggucaaccagaaugcccaggcacugaacacccuggucaagcagcuguccuccaacuucggcgccaucagcucugugcugaacgauauccugagcagacuggacccuccugaggccgaggugcagaucgacagacugaucacaggcagacugcagagccuccagacauacgugacccagcagcugaucagagccgccgagauuagagccucugccaaucuggccgccaccaagaugucugagugugugcugggccagagcaagagaguggacuuuugcggcaagggcuaccaccugaugagcuucccucagucugccccucacggcgugguguuucugcacgugacauaugugcccgcucaagagaagaauuucaccaccgcuccagccaucugccacgacggcaaagcccacuuuccuagagaaggcguguucguguccaacggcacccauugguucgugacacagcggaacuucuacgagccccagaucaucaccaccgacaacaccuucgugucuggcaacugcgacgucgugaucggcauugugaacaauaccguguacgacccucugcagcccgagcuggacagcuucaaagaggaacuggacaaguacuuuaagaaccacacaagccccgacguggaccugggcgauaucagcggaaucaaugccagcgucgugaacauccagaaagagaucgaccggcugaacgagguggccaagaaucugaacgagagccugaucgaccugcaagaacuggggaaguacgagcaguacaucaaguggcccugguacaucuggcugggcuuuaucgccggacugauugccaucgugauggucacaaucaugcuguguugcaugaccagcugcuguagcugccugaagggcuguuguagcuguggcagcugcugcaaguucgacgaggacgauucugagcccgugcugaagggcgugaaacugcacuacacaugaggacuagucccuguucccagagcccacuuuuuuuucuuuuuuugaaauaaaauagccugucuuucagaucucaaaggcucuuuucagagccaccaaaaaaaaaaaaaaaaaaaaaaaaaaaaaaaaaaaaaaaaaaaaaaaaaaaaaaaaaaaaaaaaaaaaaaaaaaaaaaaaaaaaaaaaaaaaaaaaaaaaa

SEQ ID NO: 23833 - RNA, 4185 nt, Artificial Sequence
  SARS-CoV-2/Wuhan/WIV05/2019__EPI_ISL_402128 spike protein mRNA gc mod (1-1273)(K986P_V987P_H69del_V70del_D614G)
aggagagggcgcuuggcuugcaaggacccugagcugcggcauugaagcacacccaacccaacucgacugaagucagccucacugaaccggaucugagaaucuucucucucugggcuugccagggcucuccgaaccuagcuagcauccucuucaauuccaacuagaaagcuuaccauguucguguuccuggugcugcugccucugguguccagccagugugugaaccugaccaccagaacacagcugccuccagccuacaccaacagcuuuaccagaggcguguacuaccccgacaagguguucagauccagcgugcugcacucuacccaggaccuguuccugccuuucuucagcaacgugaccugguuccacgccaucuccggcaccaauggcaccaagagauucgacaaccccgugcugcccuucaacgacgggguguacuuugccagcaccgagaaguccaacaucaucagaggcuggaucuucggcaccacacuggacagcaagacccagagccugcugaucgugaacaacgccaccaacguggucaucaaagugugcgaguuccaguucugcaacgaccccuuccugggcgucuacuaccacaagaacaacaagagcuggauggaaagcgaguuccggguguacagcagcgccaacaacugcaccuucgaguacgugucccagccuuuccugauggaccuggaaggcaagcagggcaacuucaagaaccugcgcgaguucguguuuaagaacaucgacggcuacuucaagaucuacagcaagcacaccccuaucaaccucgugcgggaucugccucagggcuucucugcucuggaaccccugguggaucugcccaucggcaucaacaucacccgguuucagacacugcuggcccugcacagaagcuaccugacaccuggcgauagcagcagcggauggacagcuggugccgccgcuuacuaugugggcuaccugcagccuagaaccuuccugcugaaguacaacgagaacggcaccaucaccgacgccguggauugugcucuggauccucugagcgagacaaagugcacccugaaguccuucaccguggaaaagggcaucuaccagaccagcaacuuccgggugcagcccaccgaauccaucgugcgguuccccaauaucaccaaucugugccccuucggcgagguguucaaugccaccagauucgccucuguguacgccuggaaccggaagcggaucagcaauugcguggccgacuacuccgugcuguacaacuccgccagcuucagcaccuucaagugcuacggcguguccccuaccaagcugaacgaccugugcuucacaaacguguacgccgacagcuucgugauccggggagaugaagugcggcagauugccccuggacagacaggcaagaucgccgacuacaacuacaagcugcccgacgacuucaccggcugugugauugccuggaacagcaacaaccuggacuccaaagucggcggcaacuacaauuaccuguaccggcuguuccggaaguccaaucugaagcccuucgagcgggacaucuccaccgagaucuaucaggccggcagcaccccuuguaacggcguggaaggcuucaacugcuacuucccacugcaguccuacggcuuucagcccacaaauggcgugggcuaucagcccuacagagugguggugcugagcuucgaacugcugcaugccccugccacagugugcggcccuaagaaaagcaccaaucucgugaagaacaaaugcgugaacuucaacuucaacggccugaccggcaccggcgugcugacagagagcaacaagaaguuccugccauuccagcaguuuggccgggauaucgccgauaccacagacgccguuagagauccccagacacuggaaauccuggacaucaccccuugcagcuucggcggagugucugugaucaccccuggcaccaacaccagcaaucagguggcagugcuguaccagggcgugaacuguaccgaagugcccguggccauucacgccgaucagcugacaccuacauggcggguguacuccaccggcagcaauguguuucagaccagagccggcugucugaucggagccgagcacgugaacaauagcuacgagugcgacauccccaucggcgcuggaaucugcgccagcuaccagacacagacaaacagcccucggagagccagaagcguggccagccagagcaucauugccuacacaaugucucugggcgccgagaacagcguggccuacuccaacaacucuaucgcuauccccaccaacuucaccaucagcgugaccacagagauccugccuguguccaugaccaagaccagcguggacugcaccauguacaucugcggcgauuccaccgagugcuccaaccugcugcugcaguacggcagcuucugcacccagcugaauagagcccugacagggaucgccguggaacaggacaagaacacccaagagguguucgcccaagugaagcagaucuacaagaccccuccuaucaaggacuucggcggcuucaauuucagccagauucugcccgauccuagcaagcccagcaagcggagcuucaucgaggaccugcuguucaacaaagugacacuggccgacgccggcuucaucaagcaguauggcgauugucugggcgacauugccgccagggaucugauuugcgcccagaaguuuaacggacugacagugcugccuccucugcugaccgaugagaugaucgcccaguacacaucugcccugcuggccggcacaaucacaagcggcuggacauuuggagcaggcgccgcucugcagauccccuuugcuaugcagauggccuaccgguucaacggcaucggagugacccagaaugugcuguacgagaaccagaagcugaucgccaaccaguucaacagcgccaucggcaagauccaggacagccugagcagcacagcaagcgcccugggaaagcugcaggacguggucaaccagaaugcccaggcacugaacacccuggucaagcagcuguccuccaacuucggcgccaucagcucugugcugaacgauauccugagcagacuggacccuccugaggccgaggugcagaucgacagacugaucacaggcagacugcagagccuccagacauacgugacccagcagcugaucagagccgccgagauuagagccucugccaaucuggccgccaccaagaugucugagugugugcugggccagagcaagagaguggacuuuugcggcaagggcuaccaccugaugagcuucccucagucugccccucacggcgugguguuucugcacgugacauaugugcccgcucaagagaagaauuucaccaccgcuccagccaucugccacgacggcaaagcccacuuuccuagagaaggcguguucguguccaacggcacccauugguucgugacacagcggaacuucuacgagccccagaucaucaccaccgacaacaccuucgugucuggcaacugcgacgucgugaucggcauugugaacaauaccguguacgacccucugcagcccgagcuggacagcuucaaagaggaacuggacaaguacuuuaagaaccacacaagccccgacguggaccugggcgauaucagcggaaucaaugccagcgucgugaacauccagaaagagaucgaccggcugaacgagguggccaagaaucugaacgagagccugaucgaccugcaagaacuggggaaguacgagcaguacaucaaguggcccugguacaucuggcugggcuuuaucgccggacugauugccaucgugauggucacaaucaugcuguguugcaugaccagcugcuguagcugccugaagggcuguuguagcuguggcagcugcugcaaguucgacgaggacgauucugagcccgugcugaagggcgugaaacugcacuacacaugaggacuagucccuguucccagagcccacuuuuuuuucuuuuuuugaaauaaaauagccugucuuucagaucucaaaggcucuuuucagagccaccaaaaaaaaaaaaaaaaaaaaaaaaaaaaaaaaaaaaaaaaaaaaaaaaaaaaaaaaaaaaaaaaaaaaaaaaaaaaaaaaaaaaaaaaaaaaaaaaaaaaa

SEQ ID NO: 23834 - RNA, 4191 nt, Artificial Sequence
  SARS-CoV-2/Wuhan/WIV05/2019__EPI_ISL_402128 spike protein mRNA gc mod (1-1273)(K986P_V987P_Y453F_D614G)
aggagagggcgcuuggcuugcaaggacccugagcugcggcauugaagcacacccaacccaacucgacugaagucagccucacugaaccggaucugagaaucuucucucucugggcuugccagggcucuccgaaccuagcuagcauccucuucaauuccaacuagaaagcuuaccauguucguguuccuggugcugcugccucugguguccagccagugugugaaccugaccaccagaacacagcugccuccagccuacaccaacagcuuuaccagaggcguguacuaccccgacaagguguucagauccagcgugcugcacucuacccaggaccuguuccugccuuucuucagcaacgugaccugguuccacgccauccacguguccggcaccaauggcaccaagagauucgacaaccccgugcugcccuucaacgacgggguguacuuugccagcaccgagaaguccaacaucaucagaggcuggaucuucggcaccacacuggacagcaagacccagagccugcugaucgugaacaacgccaccaacguggucaucaaagugugcgaguuccaguucugcaacgaccccuuccugggcgucuacuaccacaagaacaacaagagcuggauggaaagcgaguuccggguguacagcagcgccaacaacugcaccuucgaguacgugucccagccuuuccugauggaccuggaaggcaagcagggcaacuucaagaaccugcgcgaguucguguuuaagaacaucgacggcuacuucaagaucuacagcaagcacaccccuaucaaccucgugcgggaucugccucagggcuucucugcucuggaaccccugguggaucugcccaucggcaucaacaucacccgguuucagacacugcuggcccugcacagaagcuaccugacaccuggcgauagcagcagcggauggacagcuggugccgccgcuuacuaugugggcuaccugcagccuagaaccuuccugcugaaguacaacgagaacggcaccaucaccgacgccguggauugugcucuggauccucugagcgagacaaagugcacccugaaguccuucaccguggaaaagggcaucuaccagaccagcaacuuccgggugcagcccaccgaauccaucgugcgguuccccaauaucaccaaucugugccccuucggcgagguguucaaugccaccagauucgccucuguguacgccuggaaccggaagcggaucagcaauugcguggccgacuacuccgugcuguacaacuccgccagcuucagcaccuucaagugcuacggcguguccccuaccaagcugaacgaccugugcuucacaaacguguacgccgacagcuucgugauccggggagaugaagugcggcagauugccccuggacagacaggcaagaucgccgacuacaacuacaagcugcccgacgacuucaccggcugugugauugccuggaacagcaacaaccuggacuccaaagucggcggcaacuacaauuaccuguuccggcuguuccggaaguccaaucugaagcccuucgagcgggacaucuccaccgagaucuaucaggccggcagcaccccuuguaacggcguggaaggcuucaacugcuacuucccacugcaguccuacggcuuucagcccacaaauggcgugggcuaucagcccuacagagugguggugcugagcuucgaacugcugcaugccccugccacagugugcggcccuaagaaaagcaccaaucucgugaagaacaaaugcgugaacuucaacuucaacggccugaccggcaccggcgugcugacagagagcaacaagaaguuccugccauuccagcaguuuggccgggauaucgccgauaccacagacgccguuagagauccccagacacuggaaauccuggacaucaccccuugcagcuucggcggagugucugugaucaccccuggcaccaacaccagcaaucagguggcagugcuguaccagggcgugaacuguaccgaagugcccguggccauucacgccgaucagcugacaccuacauggcggguguacuccaccggcagcaauguguuucagaccagagccggcugucugaucggagccgagcacgugaacaauagcuacgagugcgacauccccaucggcgcuggaaucugcgccagcuaccagacacagacaaacagcccucggagagccagaagcguggccagccagagcaucauugccuacacaaugucucugggcgccgagaacagcguggccuacuccaacaacucuaucgcuauccccaccaacuucaccaucagcgugaccacagagauccugccuguguccaugaccaagaccagcguggacugcaccauguacaucugcggcgauuccaccgagugcuccaaccugcugcugcaguacggcagcuucugcacccagcugaauagagcccugacagggaucgccguggaacaggacaagaacacccaagagguguucgcccaagugaagcagaucuacaagaccccuccuaucaaggacuucggcggcuucaauuucagccagauucugcccgauccuagcaagcccagcaagcggagcuucaucgaggaccugcuguucaacaaagugacacuggccgacgccggcuucaucaagcaguauggcgauugucugggcgacauugccgccagggaucugauuugcgcccagaaguuuaacggacugacagugcugccuccucugcugaccgaugagaugaucgcccaguacacaucugcccugcuggccggcacaaucacaagcggcuggacauuuggagcaggcgccgcucugcagauccccuuugcuaugcagauggccuaccgguucaacggcaucggagugacccagaaugugcuguacgagaaccagaagcugaucgccaaccaguucaacagcgccaucggcaagauccaggacagccugagcagcacagcaagcgcccugggaaagcugcaggacguggucaaccagaaugcccaggcacugaacacccuggucaagcagcuguccuccaacuucggcgccaucagcucugugcugaacgauauccugagcagacuggacccuccugaggccgaggugcagaucgacagacugaucacaggcagacugcagagccuccagacauacgugacccagcagcugaucagagccgccgagauuagagccucugccaaucuggccgccaccaagaugucugagugugugcugggccagagcaagagaguggacuuuugcggcaagggcuaccaccugaugagcuucccucagucugccccucacggcgugguguuucugcacgugacauaugugcccgcucaagagaagaauuucaccaccgcuccagccaucugccacgacggcaaagcccacuuuccuagagaaggcguguucguguccaacggcacccauugguucgugacacagcggaacuucuacgagccccagaucaucaccaccgacaacaccuucgugucuggcaacugcgacgucgugaucggcauugugaacaauaccguguacgacccucugcagcccgagcuggacagcuucaaagaggaacuggacaaguacuuuaagaaccacacaagccccgacguggaccugggcgauaucagcggaaucaaugccagcgucgugaacauccagaaagagaucgaccggcugaacgagguggccaagaaucugaacgagagccugaucgaccugcaagaacuggggaaguacgagcaguacaucaaguggcccugguacaucuggcugggcuuuaucgccggacugauugccaucgugauggucacaaucaugcuguguugcaugaccagcugcuguagcugccugaagggcuguuguagcuguggcagcugcugcaaguucgacgaggacgauucugagcccgugcugaagggcgugaaacugcacuacacaugaggacuagucccuguucccagagcccacuuuuuuuucuuuuuuugaaauaaaauagccugucuuucagaucucaaaggcucuuuucagagccaccaaaaaaaaaaaaaaaaaaaaaaaaaaaaaaaaaaaaaaaaaaaaaaaaaaaaaaaaaaaaaaaaaaaaaaaaaaaaaaaaaaaaaaaaaaaaaaaaaaaaa

SEQ ID NO: 23835 - RNA, 4191 nt, Artificial Sequence
  SARS-CoV-2/Wuhan/WIV05/2019__EPI_ISL_402128 spike protein mRNA gc mod (1-1273)(K986P_V987P_D614G_I692V)
aggagagggcgcuuggcuugcaaggacccugagcugcggcauugaagcacacccaacccaacucgacugaagucagccucacugaaccggaucugagaaucuucucucucugggcuugccagggcucuccgaaccuagcuagcauccucuucaauuccaacuagaaagcuuaccauguucguguuccuggugcugcugccucugguguccagccagugugugaaccugaccaccagaacacagcugccuccagccuacaccaacagcuuuaccagaggcguguacuaccccgacaagguguucagauccagcgugcugcacucuacccaggaccuguuccugccuuucuucagcaacgugaccugguuccacgccauccacguguccggcaccaauggcaccaagagauucgacaaccccgugcugcccuucaacgacgggguguacuuugccagcaccgagaaguccaacaucaucagaggcuggaucuucggcaccacacuggacagcaagacccagagccugcugaucgugaacaacgccaccaacguggucaucaaagugugcgaguuccaguucugcaacgaccccuuccugggcgucuacuaccacaagaacaacaagagcuggauggaaagcgaguuccggguguacagcagcgccaacaacugcaccuucgaguacgugucccagccuuuccugauggaccuggaaggcaagcagggcaacuucaagaaccugcgcgaguucguguuuaagaacaucgacggcuacuucaagaucuacagcaagcacaccccuaucaaccucgugcgggaucugccucagggcuucucugcucuggaaccccugguggaucugcccaucggcaucaacaucacccgguuucagacacugcuggcccugcacagaagcuaccugacaccuggcgauagcagcagcggauggacagcuggugccgccgcuuacuaugugggcuaccugcagccuagaaccuuccugcugaaguacaacgagaacggcaccaucaccgacgccguggauugugcucuggauccucugagcgagacaaagugcacccugaaguccuucaccguggaaaagggcaucuaccagaccagcaacuuccgggugcagcccaccgaauccaucgugcgguuccccaauaucaccaaucugugccccuucggcgagguguucaaugccaccagauucgccucuguguacgccuggaaccggaagcggaucagcaauugcguggccgacuacuccgugcuguacaacuccgccagcuucagcaccuucaagugcuacggcguguccccuaccaagcugaacgaccugugcuucacaaacguguacgccgacagcuucgugauccggggagaugaagugcggcagauugccccuggacagacaggcaagaucgccgacuacaacuacaagcugcccgacgacuucaccggcugugugauugccuggaacagcaacaaccuggacuccaaagucggcggcaacuacaauuaccuguaccggcuguuccggaaguccaaucugaagcccuucgagcgggacaucuccaccgagaucuaucaggccggcagcaccccuuguaacggcguggaaggcuucaacugcuacuucccacugcaguccuacggcuuucagcccacaaauggcgugggcuaucagcccuacagagugguggugcugagcuucgaacugcugcaugccccugccacagugugcggcccuaagaaaagcaccaaucucgugaagaacaaaugcgugaacuucaacuucaacggccugaccggcaccggcgugcugacagagagcaacaagaaguuccugccauuccagcaguuuggccgggauaucgccgauaccacagacgccguuagagauccccagacacuggaaauccuggacaucaccccuugcagcuucggcggagugucugugaucaccccuggcaccaacaccagcaaucagguggcagugcuguaccagggcgugaacuguaccgaagugcccguggccauucacgccgaucagcugacaccuacauggcggguguacuccaccggcagcaauguguuucagaccagagccggcugucugaucggagccgagcacgugaacaauagcuacgagugcgacauccccaucggcgcuggaaucugcgccagcuaccagacacagacaaacagcccucggagagccagaagcguggccagccagagcgugauugccuacacaaugucucugggcgccgagaacagcguggccuacuccaacaacucuaucgcuauccccaccaacuucaccaucagcgugaccacagagauccugccuguguccaugaccaagaccagcguggacugcaccauguacaucugcggcgauuccaccgagugcuccaaccugcugcugcaguacggcagcuucugcacccagcugaauagagcccugacagggaucgccguggaacaggacaagaacacccaagagguguucgcccaagugaagcagaucuacaagaccccuccuaucaaggacuucggcggcuucaauuucagccagauucugcccgauccuagcaagcccagcaagcggagcuucaucgaggaccugcuguucaacaaagugacacuggccgacgccggcuucaucaagcaguauggcgauugucugggcgacauugccgccagggaucugauuugcgcccagaaguuuaacggacugacagugcugccuccucugcugaccgaugagaugaucgcccaguacacaucugcccugcuggccggcacaaucacaagcggcuggacauuuggagcaggcgccgcucugcagauccccuuugcuaugcagauggccuaccgguucaacggcaucggagugacccagaaugugcuguacgagaaccagaagcugaucgccaaccaguucaacagcgccaucggcaagauccaggacagccugagcagcacagcaagcgcccugggaaagcugcaggacguggucaaccagaaugcccaggcacugaacacccuggucaagcagcuguccuccaacuucggcgccaucagcucugugcugaacgauauccugagcagacuggacccuccugaggccgaggugcagaucgacagacugaucacaggcagacugcagagccuccagacauacgugacccagcagcugaucagagccgccgagauuagagccucugccaaucuggccgccaccaagaugucugagugugugcugggccagagcaagagaguggacuuuugcggcaagggcuaccaccugaugagcuucccucagucugccccucacggcgugguguuucugcacgugacauaugugcccgcucaagagaagaauuucaccaccgcuccagccaucugccacgacggcaaagcccacuuuccuagagaaggcguguucguguccaacggcacccauugguucgugacacagcggaacuucuacgagccccagaucaucaccaccgacaacaccuucgugucuggcaacugcgacgucgugaucggcauugugaacaauaccguguacgacccucugcagcccgagcuggacagcuucaaagaggaacuggacaaguacuuuaagaaccacacaagccccgacguggaccugggcgauaucagcggaaucaaugccagcgucgugaacauccagaaagagaucgaccggcugaacgagguggccaagaaucugaacgagagccugaucgaccugcaagaacuggggaaguacgagcaguacaucaaguggcccugguacaucuggcugggcuuuaucgccggacugauugccaucgugauggucacaaucaugcuguguugcaugaccagcugcuguagcugccugaagggcuguuguagcuguggcagcugcugcaaguucgacgaggacgauucugagcccgugcugaagggcgugaaacugcacuacacaugaggacuagucccuguucccagagcccacuuuuuuuucuuuuuuugaaauaaaauagccugucuuucagaucucaaaggcucuuuucagagccaccaaaaaaaaaaaaaaaaaaaaaaaaaaaaaaaaaaaaaaaaaaaaaaaaaaaaaaaaaaaaaaaaaaaaaaaaaaaaaaaaaaaaaaaaaaaaaaaaaaaaa

SEQ ID NO: 23836 - RNA, 4191 nt, Artificial Sequence
  SARS-CoV-2/Wuhan/WIV05/2019__EPI_ISL_402128 spike protein mRNA gc mod (1-1273)(K986P_V987P_D614G_M1229I)
aggagagggcgcuuggcuugcaaggacccugagcugcggcauugaagcacacccaacccaacucgacugaagucagccucacugaaccggaucugagaaucuucucucucugggcuugccagggcucuccgaaccuagcuagcauccucuucaauuccaacuagaaagcuuaccauguucguguuccuggugcugcugccucugguguccagccagugugugaaccugaccaccagaacacagcugccuccagccuacaccaacagcuuuaccagaggcguguacuaccccgacaagguguucagauccagcgugcugcacucuacccaggaccuguuccugccuuucuucagcaacgugaccugguuccacgccauccacguguccggcaccaauggcaccaagagauucgacaaccccgugcugcccuucaacgacgggguguacuuugccagcaccgagaaguccaacaucaucagaggcuggaucuucggcaccacacuggacagcaagacccagagccugcugaucgugaacaacgccaccaacguggucaucaaagugugcgaguuccaguucugcaacgaccccuuccugggcgucuacuaccacaagaacaacaagagcuggauggaaagcgaguuccggguguacagcagcgccaacaacugcaccuucgaguacgugucccagccuuuccugauggaccuggaaggcaagcagggcaacuucaagaaccugcgcgaguucguguuuaagaacaucgacggcuacuucaagaucuacagcaagcacaccccuaucaaccucgugcgggaucugccucagggcuucucugcucuggaaccccugguggaucugcccaucggcaucaacaucacccgguuucagacacugcuggcccugcacagaagcuaccugacaccuggcgauagcagcagcggauggacagcuggugccgccgcuuacuaugugggcuaccugcagccuagaaccuuccugcugaaguacaacgagaacggcaccaucaccgacgccguggauugugcucuggauccucugagcgagacaaagugcacccugaaguccuucaccguggaaaagggcaucuaccagaccagcaacuuccgggugcagcccaccgaauccaucgugcgguuccccaauaucaccaaucugugccccuucggcgagguguucaaugccaccagauucgccucuguguacgccuggaaccggaagcggaucagcaauugcguggccgacuacuccgugcuguacaacuccgccagcuucagcaccuucaagugcuacggcguguccccuaccaagcugaacgaccugugcuucacaaacguguacgccgacagcuucgugauccggggagaugaagugcggcagauugccccuggacagacaggcaagaucgccgacuacaacuacaagcugcccgacgacuucaccggcugugugauugccuggaacagcaacaaccuggacuccaaagucggcggcaacuacaauuaccuguaccggcuguuccggaaguccaaucugaagcccuucgagcgggacaucuccaccgagaucuaucaggccggcagcaccccuuguaacggcguggaaggcuucaacugcuacuucccacugcaguccuacggcuuucagcccacaaauggcgugggcuaucagcccuacagagugguggugcugagcuucgaacugcugcaugccccugccacagugugcggcccuaagaaaagcaccaaucucgugaagaacaaaugcgugaacuucaacuucaacggccugaccggcaccggcgugcugacagagagcaacaagaaguuccugccauuccagcaguuuggccgggauaucgccgauaccacagacgccguuagagauccccagacacuggaaauccuggacaucaccccuugcagcuucggcggagugucugugaucaccccuggcaccaacaccagcaaucagguggcagugcuguaccagggcgugaacuguaccgaagugcccguggccauucacgccgaucagcugacaccuacauggcggguguacuccaccggcagcaauguguuucagaccagagccggcugucugaucggagccgagcacgugaacaauagcuacgagugcgacauccccaucggcgcuggaaucugcgccagcuaccagacacagacaaacagcccucggagagccagaagcguggccagccagagcaucauugccuacacaaugucucugggcgccgagaacagcguggccuacuccaacaacucuaucgcuauccccaccaacuucaccaucagcgugaccacagagauccugccuguguccaugaccaagaccagcguggacugcaccauguacaucugcggcgauuccaccgagugcuccaaccugcugcugcaguacggcagcuucugcacccagcugaauagagcccugacagggaucgccguggaacaggacaagaacacccaagagguguucgcccaagugaagcagaucuacaagaccccuccuaucaaggacuucggcggcuucaauuucagccagauucugcccgauccuagcaagcccagcaagcggagcuucaucgaggaccugcuguucaacaaagugacacuggccgacgccggcuucaucaagcaguauggcgauugucugggcgacauugccgccagggaucugauuugcgcccagaaguuuaacggacugacagugcugccuccucugcugaccgaugagaugaucgcccaguacacaucugcccugcuggccggcacaaucacaagcggcuggacauuuggagcaggcgccgcucugcagauccccuuugcuaugcagauggccuaccgguucaacggcaucggagugacccagaaugugcuguacgagaaccagaagcugaucgccaaccaguucaacagcgccaucggcaagauccaggacagccugagcagcacagcaagcgcccugggaaagcugcaggacguggucaaccagaaugcccaggcacugaacacccuggucaagcagcuguccuccaacuucggcgccaucagcucugugcugaacgauauccugagcagacuggacccuccugaggccgaggugcagaucgacagacugaucacaggcagacugcagagccuccagacauacgugacccagcagcugaucagagccgccgagauuagagccucugccaaucuggccgccaccaagaugucugagugugugcugggccagagcaagagaguggacuuuugcggcaagggcuaccaccugaugagcuucccucagucugccccucacggcgugguguuucugcacgugacauaugugcccgcucaagagaagaauuucaccaccgcuccagccaucugccacgacggcaaagcccacuuuccuagagaaggcguguucguguccaacggcacccauugguucgugacacagcggaacuucuacgagccccagaucaucaccaccgacaacaccuucgugucuggcaacugcgacgucgugaucggcauugugaacaauaccguguacgacccucugcagcccgagcuggacagcuucaaagaggaacuggacaaguacuuuaagaaccacacaagccccgacguggaccugggcgauaucagcggaaucaaugccagcgucgugaacauccagaaagagaucgaccggcugaacgagguggccaagaaucugaacgagagccugaucgaccugcaagaacuggggaaguacgagcaguacaucaaguggcccugguacaucuggcugggcuuuaucgccggacugauugccaucgugaucgucacaaucaugcuguguugcaugaccagcugcuguagcugccugaagggcuguuguagcuguggcagcugcugcaaguucgacgaggacgauucugagcccgugcugaagggcgugaaacugcacuacacaugaggacuagucccuguucccagagcccacuuuuuuuucuuuuuuugaaauaaaauagccugucuuucagaucucaaaggcucuuuucagagccaccaaaaaaaaaaaaaaaaaaaaaaaaaaaaaaaaaaaaaaaaaaaaaaaaaaaaaaaaaaaaaaaaaaaaaaaaaaaaaaaaaaaaaaaaaaaaaaaaaaaaa

SEQ ID NO: 23837 - RNA, 4185 nt, Artificial Sequence
  SARS-CoV-2/Wuhan/WIV05/2019__EPI_ISL_402128 spike protein mRNA gc mod (1-1273)(K986P_V987P_H69del_V70del_A222V_Y453F_S477N_D614G_I692V)
aggagagggcgcuuggcuugcaaggacccugagcugcggcauugaagcacacccaacccaacucgacugaagucagccucacugaaccggaucugagaaucuucucucucugggcuugccagggcucuccgaaccuagcuagcauccucuucaauuccaacuagaaagcuuaccauguucguguuccuggugcugcugccucugguguccagccagugugugaaccugaccaccagaacacagcugccuccagccuacaccaacagcuuuaccagaggcguguacuaccccgacaagguguucagauccagcgugcugcacucuacccaggaccuguuccugccuuucuucagcaacgugaccugguuccacgccaucuccggcaccaauggcaccaagagauucgacaaccccgugcugcccuucaacgacgggguguacuuugccagcaccgagaaguccaacaucaucagaggcuggaucuucggcaccacacuggacagcaagacccagagccugcugaucgugaacaacgccaccaacguggucaucaaagugugcgaguuccaguucugcaacgaccccuuccugggcgucuacuaccacaagaacaacaagagcuggauggaaagcgaguuccggguguacagcagcgccaacaacugcaccuucgaguacgugucccagccuuuccugauggaccuggaaggcaagcagggcaacuucaagaaccugcgcgaguucguguuuaagaacaucgacggcuacuucaagaucuacagcaagcacaccccuaucaaccucgugcgggaucugccucagggcuucucugugcuggaaccccugguggaucugcccaucggcaucaacaucacccgguuucagacacugcuggcccugcacagaagcuaccugacaccuggcgauagcagcagcggauggacagcuggugccgccgcuuacuaugugggcuaccugcagccuagaaccuuccugcugaaguacaacgagaacggcaccaucaccgacgccguggauugugcucuggauccucugagcgagacaaagugcacccugaaguccuucaccguggaaaagggcaucuaccagaccagcaacuuccgggugcagcccaccgaauccaucgugcgguuccccaauaucaccaaucugugccccuucggcgagguguucaaugccaccagauucgccucuguguacgccuggaaccggaagcggaucagcaauugcguggccgacuacuccgugcuguacaacuccgccagcuucagcaccuucaagugcuacggcguguccccuaccaagcugaacgaccugugcuucacaaacguguacgccgacagcuucgugauccggggagaugaagugcggcagauugccccuggacagacaggcaagaucgccgacuacaacuacaagcugcccgacgacuucaccggcugugugauugccuggaacagcaacaaccuggacuccaaagucggcggcaacuacaauuaccuguuccggcuguuccggaaguccaaucugaagcccuucgagcgggacaucuccaccgagaucuaucaggccggcaacaccccuuguaacggcguggaaggcuucaacugcuacuucccacugcaguccuacggcuuucagcccacaaauggcgugggcuaucagcccuacagagugguggugcugagcuucgaacugcugcaugccccugccacagugugcggcccuaagaaaagcaccaaucucgugaagaacaaaugcgugaacuucaacuucaacggccugaccggcaccggcgugcugacagagagcaacaagaaguuccugccauuccagcaguuuggccgggauaucgccgauaccacagacgccguuagagauccccagacacuggaaauccuggacaucaccccuugcagcuucggcggagugucugugaucaccccuggcaccaacaccagcaaucagguggcagugcuguaccagggcgugaacuguaccgaagugcccguggccauucacgccgaucagcugacaccuacauggcggguguacuccaccggcagcaauguguuucagaccagagccggcugucugaucggagccgagcacgugaacaauagcuacgagugcgacauccccaucggcgcuggaaucugcgccagcuaccagacacagacaaacagcccucggagagccagaagcguggccagccagagcgugauugccuacacaaugucucugggcgccgagaacagcguggccuacuccaacaacucuaucgcuauccccaccaacuucaccaucagcgugaccacagagauccugccuguguccaugaccaagaccagcguggacugcaccauguacaucugcggcgauuccaccgagugcuccaaccugcugcugcaguacggcagcuucugcacccagcugaauagagcccugacagggaucgccguggaacaggacaagaacacccaagagguguucgcccaagugaagcagaucuacaagaccccuccuaucaaggacuucggcggcuucaauuucagccagauucugcccgauccuagcaagcccagcaagcggagcuucaucgaggaccugcuguucaacaaagugacacuggccgacgccggcuucaucaagcaguauggcgauugucugggcgacauugccgccagggaucugauuugcgcccagaaguuuaacggacugacagugcugccuccucugcugaccgaugagaugaucgcccaguacacaucugcccugcuggccggcacaaucacaagcggcuggacauuuggagcaggcgccgcucugcagauccccuuugcuaugcagauggccuaccgguucaacggcaucggagugacccagaaugugcuguacgagaaccagaagcugaucgccaaccaguucaacagcgccaucggcaagauccaggacagccugagcagcacagcaagcgcccugggaaagcugcaggacguggucaaccagaaugcccaggcacugaacacccuggucaagcagcuguccuccaacuucggcgccaucagcucugugcugaacgauauccugagcagacuggacccuccugaggccgaggugcagaucgacagacugaucacaggcagacugcagagccuccagacauacgugacccagcagcugaucagagccgccgagauuagagccucugccaaucuggccgccaccaagaugucugagugugugcugggccagagcaagagaguggacuuuugcggcaagggcuaccaccugaugagcuucccucagucugccccucacggcgugguguuucugcacgugacauaugugcccgcucaagagaagaauuucaccaccgcuccagccaucugccacgacggcaaagcccacuuuccuagagaaggcguguucguguccaacggcacccauugguucgugacacagcggaacuucuacgagccccagaucaucaccaccgacaacaccuucgugucuggcaacugcgacgucgugaucggcauugugaacaauaccguguacgacccucugcagcccgagcuggacagcuucaaagaggaacuggacaaguacuuuaagaaccacacaagccccgacguggaccugggcgauaucagcggaaucaaugccagcgucgugaacauccagaaagagaucgaccggcugaacgagguggccaagaaucugaacgagagccugaucgaccugcaagaacuggggaaguacgagcaguacaucaaguggcccugguacaucuggcugggcuuuaucgccggacugauugccaucgugauggucacaaucaugcuguguugcaugaccagcugcuguagcugccugaagggcuguuguagcuguggcagcugcugcaaguucgacgaggacgauucugagcccgugcugaagggcgugaaacugcacuacacaugaggacuagucccuguucccagagcccacuuuuuuuucuuuuuuugaaauaaaauagccugucuuucagaucucaaaggcucuuuucagagccaccaaaaaaaaaaaaaaaaaaaaaaaaaaaaaaaaaaaaaaaaaaaaaaaaaaaaaaaaaaaaaaaaaaaaaaaaaaaaaaaaaaaaaaaaaaaaaaaaaaaaa

SEQ ID NO: 23838 - RNA, 4185 nt, Artificial Sequence
  SARS-CoV-2/Wuhan/WIV05/2019__EPI_ISL_402128 spike protein mRNA gc mod (1-1273)(K986P_V987P_H69del_V70del_Y453F_D614G_I692V_M1229I)
aggagagggcgcuuggcuugcaaggacccugagcugcggcauugaagcacacccaacccaacucgacugaagucagccucacugaaccggaucugagaaucuucucucucugggcuugccagggcucuccgaaccuagcuagcauccucuucaauuccaacuagaaagcuuaccauguucguguuccuggugcugcugccucugguguccagccagugugugaaccugaccaccagaacacagcugccuccagccuacaccaacagcuuuaccagaggcguguacuaccccgacaagguguucagauccagcgugcugcacucuacccaggaccuguuccugccuuucuucagcaacgugaccugguuccacgccaucuccggcaccaauggcaccaagagauucgacaaccccgugcugcccuucaacgacgggguguacuuugccagcaccgagaaguccaacaucaucagaggcuggaucuucggcaccacacuggacagcaagacccagagccugcugaucgugaacaacgccaccaacguggucaucaaagugugcgaguuccaguucugcaacgaccccuuccugggcgucuacuaccacaagaacaacaagagcuggauggaaagcgaguuccggguguacagcagcgccaacaacugcaccuucgaguacgugucccagccuuuccugauggaccuggaaggcaagcagggcaacuucaagaaccugcgcgaguucguguuuaagaacaucgacggcuacuucaagaucuacagcaagcacaccccuaucaaccucgugcgggaucugccucagggcuucucugcucuggaaccccugguggaucugcccaucggcaucaacaucacccgguuucagacacugcuggcccugcacagaagcuaccugacaccuggcgauagcagcagcggauggacagcuggugccgccgcuuacuaugugggcuaccugcagccuagaaccuuccugcugaaguacaacgagaacggcaccaucaccgacgccguggauugugcucuggauccucugagcgagacaaagugcacccugaaguccuucaccguggaaaagggcaucuaccagaccagcaacuuccgggugcagcccaccgaauccaucgugcgguuccccaauaucaccaaucugugccccuucggcgagguguucaaugccaccagauucgccucuguguacgccuggaaccggaagcggaucagcaauugcguggccgacuacuccgugcuguacaacuccgccagcuucagcaccuucaagugcuacggcguguccccuaccaagcugaacgaccugugcuucacaaacguguacgccgacagcuucgugauccggggagaugaagugcggcagauugccccuggacagacaggcaagaucgccgacuacaacuacaagcugcccgacgacuucaccggcugugugauugccuggaacagcaacaaccuggacuccaaagucggcggcaacuacaauuaccuguuccggcuguuccggaaguccaaucugaagcccuucgagcgggacaucuccaccgagaucuaucaggccggcagcaccccuuguaacggcguggaaggcuucaacugcuacuucccacugcaguccuacggcuuucagcccacaaauggcgugggcuaucagcccuacagagugguggugcugagcuucgaacugcugcaugccccugccacagugugcggcccuaagaaaagcaccaaucucgugaagaacaaaugcgugaacuucaacuucaacggccugaccggcaccggcgugcugacagagagcaacaagaaguuccugccauuccagcaguuuggccgggauaucgccgauaccacagacgccguuagagauccccagacacuggaaauccuggacaucaccccuugcagcuucggcggagugucugugaucaccccuggcaccaacaccagcaaucagguggcagugcuguaccagggcgugaacuguaccgaagugcccguggccauucacgccgaucagcugacaccuacauggcggguguacuccaccggcagcaauguguuucagaccagagccggcugucugaucggagccgagcacgugaacaauagcuacgagugcgacauccccaucggcgcuggaaucugcgccagcuaccagacacagacaaacagcccucggagagccagaagcguggccagccagagcgugauugccuacacaaugucucugggcgccgagaacagcguggccuacuccaacaacucuaucgcuauccccaccaacuucaccaucagcgugaccacagagauccugccuguguccaugaccaagaccagcguggacugcaccauguacaucugcggcgauuccaccgagugcuccaaccugcugcugcaguacggcagcuucugcacccagcugaauagagcccugacagggaucgccguggaacaggacaagaacacccaagagguguucgcccaagugaagcagaucuacaagaccccuccuaucaaggacuucggcggcuucaauuucagccagauucugcccgauccuagcaagcccagcaagcggagcuucaucgaggaccugcuguucaacaaagugacacuggccgacgccggcuucaucaagcaguauggcgauugucugggcgacauugccgccagggaucugauuugcgcccagaaguuuaacggacugacagugcugccuccucugcugaccgaugagaugaucgcccaguacacaucugcccugcuggccggcacaaucacaagcggcuggacauuuggagcaggcgccgcucugcagauccccuuugcuaugcagauggccuaccgguucaacggcaucggagugacccagaaugugcuguacgagaaccagaagcugaucgccaaccaguucaacagcgccaucggcaagauccaggacagccugagcagcacagcaagcgcccugggaaagcugcaggacguggucaaccagaaugcccaggcacugaacacccuggucaagcagcuguccuccaacuucggcgccaucagcucugugcugaacgauauccugagcagacuggacccuccugaggccgaggugcagaucgacagacugaucacaggcagacugcagagccuccagacauacgugacccagcagcugaucagagccgccgagauuagagccucugccaaucuggccgccaccaagaugucugagugugugcugggccagagcaagagaguggacuuuugcggcaagggcuaccaccugaugagcuucccucagucugccccucacggcgugguguuucugcacgugacauaugugcccgcucaagagaagaauuucaccaccgcuccagccaucugccacgacggcaaagcccacuuuccuagagaaggcguguucguguccaacggcacccauugguucgugacacagcggaacuucuacgagccccagaucaucaccaccgacaacaccuucgugucuggcaacugcgacgucgugaucggcauugugaacaauaccguguacgacccucugcagcccgagcuggacagcuucaaagaggaacuggacaaguacuuuaagaaccacacaagccccgacguggaccugggcgauaucagcggaaucaaugccagcgucgugaacauccagaaagagaucgaccggcugaacgagguggccaagaaucugaacgagagccugaucgaccugcaagaacuggggaaguacgagcaguacaucaaguggcccugguacaucuggcugggcuuuaucgccggacugauugccaucgugaucgucacaaucaugcuguguugcaugaccagcugcuguagcugccugaagggcuguuguagcuguggcagcugcugcaaguucgacgaggacgauucugagcccgugcugaagggcgugaaacugcacuacacaugaggacuagucccuguucccagagcccacuuuuuuuucuuuuuuugaaauaaaauagccugucuuucagaucucaaaggcucuuuucagagccaccaaaaaaaaaaaaaaaaaaaaaaaaaaaaaaaaaaaaaaaaaaaaaaaaaaaaaaaaaaaaaaaaaaaaaaaaaaaaaaaaaaaaaaaaaaaaaaaaaaaaa

SEQ ID NO: 23839 - RNA, 4182 nt, Artificial Sequence
  SARS-CoV-2/Wuhan/WIV05/2019__EPI_ISL_402128 spike protein mRNA gc mod (1-1273)(K986P_V987P_K986P_V987P_H69del_V70del_Y144del_N501Y_A570 D_D614G_P681H_T716I_S982A_D1118H)
aggagagggcgcuuggcuugcaaggacccugagcugcggcauugaagcacacccaacccaacucgacugaagucagccucacugaaccggaucugagaaucuucucucucugggcuugccagggcucuccgaaccuagcuagcauccucuucaauuccaacuagaaagcuuaccauguucguguuccuggugcugcugccucugguguccagccagugugugaaccugaccaccagaacacagcugccuccagccuacaccaacagcuuuaccagaggcguguacuaccccgacaagguguucagauccagcgugcugcacucuacccaggaccuguuccugccuuucuucagcaacgugaccugguuccacgccaucuccggcaccaauggcaccaagagauucgacaaccccgugcugcccuucaacgacgggguguacuuugccagcaccgagaaguccaacaucaucagaggcuggaucuucggcaccacacuggacagcaagacccagagccugcugaucgugaacaacgccaccaacguggucaucaaagugugcgaguuccaguucugcaacgaccccuuccugggcgucuaccacaagaacaacaagagcuggauggaaagcgaguuccggguguacagcagcgccaacaacugcaccuucgaguacgugucccagccuuuccugauggaccuggaaggcaagcagggcaacuucaagaaccugcgcgaguucguguuuaagaacaucgacggcuacuucaagaucuacagcaagcacaccccuaucaaccucgugcgggaucugccucagggcuucucugcucuggaaccccugguggaucugcccaucggcaucaacaucacccgguuucagacacugcuggcccugcacagaagcuaccugacaccuggcgauagcagcagcggauggacagcuggugccgccgcuuacuaugugggcuaccugcagccuagaaccuuccugcugaaguacaacgagaacggcaccaucaccgacgccguggauugugcucuggauccucugagcgagacaaagugcacccugaaguccuucaccguggaaaagggcaucuaccagaccagcaacuuccgggugcagcccaccgaauccaucgugcgguuccccaauaucaccaaucugugccccuucggcgagguguucaaugccaccagauucgccucuguguacgccuggaaccggaagcggaucagcaauugcguggccgacuacuccgugcuguacaacuccgccagcuucagcaccuucaagugcuacggcguguccccuaccaagcugaacgaccugugcuucacaaacguguacgccgacagcuucgugauccggggagaugaagugcggcagauugccccuggacagacaggcaagaucgccgacuacaacuacaagcugcccgacgacuucaccggcugugugauugccuggaacagcaacaaccuggacuccaaagucggcggcaacuacaauuaccuguaccggcuguuccggaaguccaaucugaagcccuucgagcgggacaucuccaccgagaucuaucaggccggcagcaccccuuguaacggcguggaaggcuucaacugcuacuucccacugcaguccuacggcuuucagcccacauacggcgugggcuaucagcccuacagagugguggugcugagcuucgaacugcugcaugccccugccacagugugcggcccuaagaaaagcaccaaucucgugaagaacaaaugcgugaacuucaacuucaacggccugaccggcaccggcgugcugacagagagcaacaagaaguuccugccauuccagcaguuuggccgggauaucgacgauaccacagacgccguuagagauccccagacacuggaaauccuggacaucaccccuugcagcuucggcggagugucugugaucaccccuggcaccaacaccagcaaucagguggcagugcuguaccagggcgugaacuguaccgaagugcccguggccauucacgccgaucagcugacaccuacauggcggguguacuccaccggcagcaauguguuucagaccagagccggcugucugaucggagccgagcacgugaacaauagcuacgagugcgacauccccaucggcgcuggaaucugcgccagcuaccagacacagacaaacagccaccggagagccagaagcguggccagccagagcaucauugccuacacaaugucucugggcgccgagaacagcguggccuacuccaacaacucuaucgcuauccccaucaacuucaccaucagcgugaccacagagauccugccuguguccaugaccaagaccagcguggacugcaccauguacaucugcggcgauuccaccgagugcuccaaccugcugcugcaguacggcagcuucugcacccagcugaauagagcccugacagggaucgccguggaacaggacaagaacacccaagagguguucgcccaagugaagcagaucuacaagaccccuccuaucaaggacuucggcggcuucaauuucagccagauucugcccgauccuagcaagcccagcaagcggagcuucaucgaggaccugcuguucaacaaagugacacuggccgacgccggcuucaucaagcaguauggcgauugucugggcgacauugccgccagggaucugauuugcgcccagaaguuuaacggacugacagugcugccuccucugcugaccgaugagaugaucgcccaguacacaucugcccugcuggccggcacaaucacaagcggcuggacauuuggagcaggcgccgcucugcagauccccuuugcuaugcagauggccuaccgguucaacggcaucggagugacccagaaugugcuguacgagaaccagaagcugaucgccaaccaguucaacagcgccaucggcaagauccaggacagccugagcagcacagcaagcgcccugggaaagcugcaggacguggucaaccagaaugcccaggcacugaacacccuggucaagcagcuguccuccaacuucggcgccaucagcucugugcugaacgauauccuggccagacuggacccuccugaggccgaggugcagaucgacagacugaucacaggcagacugcagagccuccagacauacgugacccagcagcugaucagagccgccgagauuagagccucugccaaucuggccgccaccaagaugucugagugugugcugggccagagcaagagaguggacuuuugcggcaagggcuaccaccugaugagcuucccucagucugccccucacggcgugguguuucugcacgugacauaugugcccgcucaagagaagaauuucaccaccgcuccagccaucugccacgacggcaaagcccacuuuccuagagaaggcguguucguguccaacggcacccauugguucgugacacagcggaacuucuacgagccccagaucaucaccacccacaacaccuucgugucuggcaacugcgacgucgugaucggcauugugaacaauaccguguacgacccucugcagcccgagcuggacagcuucaaagaggaacuggacaaguacuuuaagaaccacacaagccccgacguggaccugggcgauaucagcggaaucaaugccagcgucgugaacauccagaaagagaucgaccggcugaacgagguggccaagaaucugaacgagagccugaucgaccugcaagaacuggggaaguacgagcaguacaucaaguggcccugguacaucuggcugggcuuuaucgccggacugauugccaucgugauggucacaaucaugcuguguugcaugaccagcugcuguagcugccugaagggcuguuguagcuguggcagcugcugcaaguucgacgaggacgauucugagcccgugcugaagggcgugaaacugcacuacacaugaggacuagucccuguucccagagcccacuuuuuuuucuuuuuuugaaauaaaauagccugucuuucagaucucaaaggcucuuuucagagccaccaaaaaaaaaaaaaaaaaaaaaaaaaaaaaaaaaaaaaaaaaaaaaaaaaaaaaaaaaaaaaaaaaaaaaaaaaaaaaaaaaaaaaaaaaaaaaaaaaaaaa

SEQ ID NO: 23840 - RNA, 4191 nt, Artificial Sequence
  SARS-CoV-2/Wuhan/WIV05/2019__EPI_ISL_402128 spike protein mRNA gc mod (1-1273)(K986P_V987P_K986P_V987P_K417N_E484K_N501Y_D614G)
aggagagggcgcuuggcuugcaaggacccugagcugcggcauugaagcacacccaacccaacucgacugaagucagccucacugaaccggaucugagaaucuucucucucugggcuugccagggcucuccgaaccuagcuagcauccucuucaauuccaacuagaaagcuuaccauguucguguuccuggugcugcugccucugguguccagccagugugugaaccugaccaccagaacacagcugccuccagccuacaccaacagcuuuaccagaggcguguacuaccccgacaagguguucagauccagcgugcugcacucuacccaggaccuguuccugccuuucuucagcaacgugaccugguuccacgccauccacguguccggcaccaauggcaccaagagauucgacaaccccgugcugcccuucaacgacgggguguacuuugccagcaccgagaaguccaacaucaucagaggcuggaucuucggcaccacacuggacagcaagacccagagccugcugaucgugaacaacgccaccaacguggucaucaaagugugcgaguuccaguucugcaacgaccccuuccugggcgucuacuaccacaagaacaacaagagcuggauggaaagcgaguuccggguguacagcagcgccaacaacugcaccuucgaguacgugucccagccuuuccugauggaccuggaaggcaagcagggcaacuucaagaaccugcgcgaguucguguuuaagaacaucgacggcuacuucaagaucuacagcaagcacaccccuaucaaccucgugcgggaucugccucagggcuucucugcucuggaaccccugguggaucugcccaucggcaucaacaucacccgguuucagacacugcuggcccugcacagaagcuaccugacaccuggcgauagcagcagcggauggacagcuggugccgccgcuuacuaugugggcuaccugcagccuagaaccuuccugcugaaguacaacgagaacggcaccaucaccgacgccguggauugugcucuggauccucugagcgagacaaagugcacccugaaguccuucaccguggaaaagggcaucuaccagaccagcaacuuccgggugcagcccaccgaauccaucgugcgguuccccaauaucaccaaucugugccccuucggcgagguguucaaugccaccagauucgccucuguguacgccuggaaccggaagcggaucagcaauugcguggccgacuacuccgugcuguacaacuccgccagcuucagcaccuucaagugcuacggcguguccccuaccaagcugaacgaccugugcuucacaaacguguacgccgacagcuucgugauccggggagaugaagugcggcagauugccccuggacagacaggcaacaucgccgacuacaacuacaagcugcccgacgacuucaccggcugugugauugccuggaacagcaacaaccuggacuccaaagucggcggcaacuacaauuaccuguaccggcuguuccggaaguccaaucugaagcccuucgagcgggacaucuccaccgagaucuaucaggccggcagcaccccuuguaacggcgugaagggcuucaacugcuacuucccacugcaguccuacggcuuucagcccacauacggcgugggcuaucagcccuacagagugguggugcugagcuucgaacugcugcaugccccugccacagugugcggcccuaagaaaagcaccaaucucgugaagaacaaaugcgugaacuucaacuucaacggccugaccggcaccggcgugcugacagagagcaacaagaaguuccugccauuccagcaguuuggccgggauaucgccgauaccacagacgccguuagagauccccagacacuggaaauccuggacaucaccccuugcagcuucggcggagugucugugaucaccccuggcaccaacaccagcaaucagguggcagugcuguaccagggcgugaacuguaccgaagugcccguggccauucacgccgaucagcugacaccuacauggcggguguacuccaccggcagcaauguguuucagaccagagccggcugucugaucggagccgagcacgugaacaauagcuacgagugcgacauccccaucggcgcuggaaucugcgccagcuaccagacacagacaaacagcccucggagagccagaagcguggccagccagagcaucauugccuacacaaugucucugggcgccgagaacagcguggccuacuccaacaacucuaucgcuauccccaccaacuucaccaucagcgugaccacagagauccugccuguguccaugaccaagaccagcguggacugcaccauguacaucugcggcgauuccaccgagugcuccaaccugcugcugcaguacggcagcuucugcacccagcugaauagagcccugacagggaucgccguggaacaggacaagaacacccaagagguguucgcccaagugaagcagaucuacaagaccccuccuaucaaggacuucggcggcuucaauuucagccagauucugcccgauccuagcaagcccagcaagcggagcuucaucgaggaccugcuguucaacaaagugacacuggccgacgccggcuucaucaagcaguauggcgauugucugggcgacauugccgccagggaucugauuugcgcccagaaguuuaacggacugacagugcugccuccucugcugaccgaugagaugaucgcccaguacacaucugcccugcuggccggcacaaucacaagcggcuggacauuuggagcaggcgccgcucugcagauccccuuugcuaugcagauggccuaccgguucaacggcaucggagugacccagaaugugcuguacgagaaccagaagcugaucgccaaccaguucaacagcgccaucggcaagauccaggacagccugagcagcacagcaagcgcccugggaaagcugcaggacguggucaaccagaaugcccaggcacugaacacccuggucaagcagcuguccuccaacuucggcgccaucagcucugugcugaacgauauccugagcagacuggacccuccugaggccgaggugcagaucgacagacugaucacaggcagacugcagagccuccagacauacgugacccagcagcugaucagagccgccgagauuagagccucugccaaucuggccgccaccaagaugucugagugugugcugggccagagcaagagaguggacuuuugcggcaagggcuaccaccugaugagcuucccucagucugccccucacggcgugguguuucugcacgugacauaugugcccgcucaagagaagaauuucaccaccgcuccagccaucugccacgacggcaaagcccacuuuccuagagaaggcguguucguguccaacggcacccauugguucgugacacagcggaacuucuacgagccccagaucaucaccaccgacaacaccuucgugucuggcaacugcgacgucgugaucggcauugugaacaauaccguguacgacccucugcagcccgagcuggacagcuucaaagaggaacuggacaaguacuuuaagaaccacacaagccccgacguggaccugggcgauaucagcggaaucaaugccagcgucgugaacauccagaaagagaucgaccggcugaacgagguggccaagaaucugaacgagagccugaucgaccugcaagaacuggggaaguacgagcaguacaucaaguggcccugguacaucuggcugggcuuuaucgccggacugauugccaucgugauggucacaaucaugcuguguugcaugaccagcugcuguagcugccugaagggcuguuguagcuguggcagcugcugcaaguucgacgaggacgauucugagcccgugcugaagggcgugaaacugcacuacacaugaggacuagucccuguucccagagcccacuuuuuuuucuuuuuuugaaauaaaauagccugucuuucagaucucaaaggcucuuuucagagccaccaaaaaaaaaaaaaaaaaaaaaaaaaaaaaaaaaaaaaaaaaaaaaaaaaaaaaaaaaaaaaaaaaaaaaaaaaaaaaaaaaaaaaaaaaaaaaaaaaaaaa

SEQ ID NO: 23841 - RNA, 4182 nt, Artificial Sequence
  SARS-CoV-2/Wuhan/WIV05/2019__EPI_ISL_402128 spike protein mRNA gc mod (1-1273)(K986P_V987P_K986P_V987P_L18F_D80A_D215G_L242del_A243del_ L244del_R246I_K417N_E484K_N501Y_D614G_A701V)
aggagagggcgcuuggcuugcaaggacccugagcugcggcauugaagcacacccaacccaacucgacugaagucagccucacugaaccggaucugagaaucuucucucucugggcuugccagggcucuccgaaccuagcuagcauccucuucaauuccaacuagaaagcuuaccauguucguguuccuggugcugcugccucugguguccagccagugugugaacuucaccaccagaacacagcugccuccagccuacaccaacagcuuuaccagaggcguguacuaccccgacaagguguucagauccagcgugcugcacucuacccaggaccuguuccugccuuucuucagcaacgugaccugguuccacgccauccacguguccggcaccaauggcaccaagagauucgccaaccccgugcugcccuucaacgacgggguguacuuugccagcaccgagaaguccaacaucaucagaggcuggaucuucggcaccacacuggacagcaagacccagagccugcugaucgugaacaacgccaccaacguggucaucaaagugugcgaguuccaguucugcaacgaccccuuccugggcgucuacuaccacaagaacaacaagagcuggauggaaagcgaguuccggguguacagcagcgccaacaacugcaccuucgaguacgugucccagccuuuccugauggaccuggaaggcaagcagggcaacuucaagaaccugcgcgaguucguguuuaagaacaucgacggcuacuucaagaucuacagcaagcacaccccuaucaaccucgugcggggccugccucagggcuucucugcucuggaaccccugguggaucugcccaucggcaucaacaucacccgguuucagacacugcacaucagcuaccugacaccuggcgauagcagcagcggauggacagcuggugccgccgcuuacuaugugggcuaccugcagccuagaaccuuccugcugaaguacaacgagaacggcaccaucaccgacgccguggauugugcucuggauccucugagcgagacaaagugcacccugaaguccuucaccguggaaaagggcaucuaccagaccagcaacuuccgggugcagcccaccgaauccaucgugcgguuccccaauaucaccaaucugugccccuucggcgagguguucaaugccaccagauucgccucuguguacgccuggaaccggaagcggaucagcaauugcguggccgacuacuccgugcuguacaacuccgccagcuucagcaccuucaagugcuacggcguguccccuaccaagcugaacgaccugugcuucacaaacguguacgccgacagcuucgugauccggggagaugaagugcggcagauugccccuggacagacaggcaacaucgccgacuacaacuacaagcugcccgacgacuucaccggcugugugauugccuggaacagcaacaaccuggacuccaaagucggcggcaacuacaauuaccuguaccggcuguuccggaaguccaaucugaagcccuucgagcgggacaucuccaccgagaucuaucaggccggcagcaccccuuguaacggcgugaagggcuucaacugcuacuucccacugcaguccuacggcuuucagcccacauacggcgugggcuaucagcccuacagagugguggugcugagcuucgaacugcugcaugccccugccacagugugcggcccuaagaaaagcaccaaucucgugaagaacaaaugcgugaacuucaacuucaacggccugaccggcaccggcgugcugacagagagcaacaagaaguuccugccauuccagcaguuuggccgggauaucgccgauaccacagacgccguuagagauccccagacacuggaaauccuggacaucaccccuugcagcuucggcggagugucugugaucaccccuggcaccaacaccagcaaucagguggcagugcuguaccagggcgugaacuguaccgaagugcccguggccauucacgccgaucagcugacaccuacauggcggguguacuccaccggcagcaauguguuucagaccagagccggcugucugaucggagccgagcacgugaacaauagcuacgagugcgacauccccaucggcgcuggaaucugcgccagcuaccagacacagacaaacagcccucggagagccagaagcguggccagccagagcaucauugccuacacaaugucucugggcguggagaacagcguggccuacuccaacaacucuaucgcuauccccaccaacuucaccaucagcgugaccacagagauccugccuguguccaugaccaagaccagcguggacugcaccauguacaucugcggcgauuccaccgagugcuccaaccugcugcugcaguacggcagcuucugcacccagcugaauagagcccugacagggaucgccguggaacaggacaagaacacccaagagguguucgcccaagugaagcagaucuacaagaccccuccuaucaaggacuucggcggcuucaauuucagccagauucugcccgauccuagcaagcccagcaagcggagcuucaucgaggaccugcuguucaacaaagugacacuggccgacgccggcuucaucaagcaguauggcgauugucugggcgacauugccgccagggaucugauuugcgcccagaaguuuaacggacugacagugcugccuccucugcugaccgaugagaugaucgcccaguacacaucugcccugcuggccggcacaaucacaagcggcuggacauuuggagcaggcgccgcucugcagauccccuuugcuaugcagauggccuaccgguucaacggcaucggagugacccagaaugugcuguacgagaaccagaagcugaucgccaaccaguucaacagcgccaucggcaagauccaggacagccugagcagcacagcaagcgcccugggaaagcugcaggacguggucaaccagaaugcccaggcacugaacacccuggucaagcagcuguccuccaacuucggcgccaucagcucugugcugaacgauauccugagcagacuggacccuccugaggccgaggugcagaucgacagacugaucacaggcagacugcagagccuccagacauacgugacccagcagcugaucagagccgccgagauuagagccucugccaaucuggccgccaccaagaugucugagugugugcugggccagagcaagagaguggacuuuugcggcaagggcuaccaccugaugagcuucccucagucugccccucacggcgugguguuucugcacgugacauaugugcccgcucaagagaagaauuucaccaccgcuccagccaucugccacgacggcaaagcccacuuuccuagagaaggcguguucguguccaacggcacccauugguucgugacacagcggaacuucuacgagccccagaucaucaccaccgacaacaccuucgugucuggcaacugcgacgucgugaucggcauugugaacaauaccguguacgacccucugcagcccgagcuggacagcuucaaagaggaacuggacaaguacuuuaagaaccacacaagccccgacguggaccugggcgauaucagcggaaucaaugccagcgucgugaacauccagaaagagaucgaccggcugaacgagguggccaagaaucugaacgagagccugaucgaccugcaagaacuggggaaguacgagcaguacaucaaguggcccugguacaucuggcugggcuuuaucgccggacugauugccaucgugauggucacaaucaugcuguguugcaugaccagcugcuguagcugccugaagggcuguuguagcuguggcagcugcugcaaguucgacgaggacgauucugagcccgugcugaagggcgugaaacugcacuacacaugaggacuagucccuguucccagagcccacuuuuuuuucuuuuuuugaaauaaaauagccugucuuucagaucucaaaggcucuuuucagagccaccaaaaaaaaaaaaaaaaaaaaaaaaaaaaaaaaaaaaaaaaaaaaaaaaaaaaaaaaaaaaaaaaaaaaaaaaaaaaaaaaaaaaaaaaaaaaaaaaaaaaa

SEQ ID NO: 23842 - RNA, 4191 nt, Artificial Sequence
  SARS-CoV-2/Wuhan/WIV05/2019__EPI_ISL_402128 spike protein mRNA gc mod (1-1273)(K986P_V987P_K986P_V987P_E484K_D614G)
aggagagggcgcuuggcuugcaaggacccugagcugcggcauugaagcacacccaacccaacucgacugaagucagccucacugaaccggaucugagaaucuucucucucugggcuugccagggcucuccgaaccuagcuagcauccucuucaauuccaacuagaaagcuuaccauguucguguuccuggugcugcugccucugguguccagccagugugugaaccugaccaccagaacacagcugccuccagccuacaccaacagcuuuaccagaggcguguacuaccccgacaagguguucagauccagcgugcugcacucuacccaggaccuguuccugccuuucuucagcaacgugaccugguuccacgccauccacguguccggcaccaauggcaccaagagauucgacaaccccgugcugcccuucaacgacgggguguacuuugccagcaccgagaaguccaacaucaucagaggcuggaucuucggcaccacacuggacagcaagacccagagccugcugaucgugaacaacgccaccaacguggucaucaaagugugcgaguuccaguucugcaacgaccccuuccugggcgucuacuaccacaagaacaacaagagcuggauggaaagcgaguuccggguguacagcagcgccaacaacugcaccuucgaguacgugucccagccuuuccugauggaccuggaaggcaagcagggcaacuucaagaaccugcgcgaguucguguuuaagaacaucgacggcuacuucaagaucuacagcaagcacaccccuaucaaccucgugcgggaucugccucagggcuucucugcucuggaaccccugguggaucugcccaucggcaucaacaucacccgguuucagacacugcuggcccugcacagaagcuaccugacaccuggcgauagcagcagcggauggacagcuggugccgccgcuuacuaugugggcuaccugcagccuagaaccuuccugcugaaguacaacgagaacggcaccaucaccgacgccguggauugugcucuggauccucugagcgagacaaagugcacccugaaguccuucaccguggaaaagggcaucuaccagaccagcaacuuccgggugcagcccaccgaauccaucgugcgguuccccaauaucaccaaucugugccccuucggcgagguguucaaugccaccagauucgccucuguguacgccuggaaccggaagcggaucagcaauugcguggccgacuacuccgugcuguacaacuccgccagcuucagcaccuucaagugcuacggcguguccccuaccaagcugaacgaccugugcuucacaaacguguacgccgacagcuucgugauccggggagaugaagugcggcagauugccccuggacagacaggcaagaucgccgacuacaacuacaagcugcccgacgacuucaccggcugugugauugccuggaacagcaacaaccuggacuccaaagucggcggcaacuacaauuaccuguaccggcuguuccggaaguccaaucugaagcccuucgagcgggacaucuccaccgagaucuaucaggccggcagcaccccuuguaacggcgugaagggcuucaacugcuacuucccacugcaguccuacggcuuucagcccacaaauggcgugggcuaucagcccuacagagugguggugcugagcuucgaacugcugcaugccccugccacagugugcggcccuaagaaaagcaccaaucucgugaagaacaaaugcgugaacuucaacuucaacggccugaccggcaccggcgugcugacagagagcaacaagaaguuccugccauuccagcaguuuggccgggauaucgccgauaccacagacgccguuagagauccccagacacuggaaauccuggacaucaccccuugcagcuucggcggagugucugugaucaccccuggcaccaacaccagcaaucagguggcagugcuguaccagggcgugaacuguaccgaagugcccguggccauucacgccgaucagcugacaccuacauggcggguguacuccaccggcagcaauguguuucagaccagagccggcugucugaucggagccgagcacgugaacaauagcuacgagugcgacauccccaucggcgcuggaaucugcgccagcuaccagacacagacaaacagcccucggagagccagaagcguggccagccagagcaucauugccuacacaaugucucugggcgccgagaacagcguggccuacuccaacaacucuaucgcuauccccaccaacuucaccaucagcgugaccacagagauccugccuguguccaugaccaagaccagcguggacugcaccauguacaucugcggcgauuccaccgagugcuccaaccugcugcugcaguacggcagcuucugcacccagcugaauagagcccugacagggaucgccguggaacaggacaagaacacccaagagguguucgcccaagugaagcagaucuacaagaccccuccuaucaaggacuucggcggcuucaauuucagccagauucugcccgauccuagcaagcccagcaagcggagcuucaucgaggaccugcuguucaacaaagugacacuggccgacgccggcuucaucaagcaguauggcgauugucugggcgacauugccgccagggaucugauuugcgcccagaaguuuaacggacugacagugcugccuccucugcugaccgaugagaugaucgcccaguacacaucugcccugcuggccggcacaaucacaagcggcuggacauuuggagcaggcgccgcucugcagauccccuuugcuaugcagauggccuaccgguucaacggcaucggagugacccagaaugugcuguacgagaaccagaagcugaucgccaaccaguucaacagcgccaucggcaagauccaggacagccugagcagcacagcaagcgcccugggaaagcugcaggacguggucaaccagaaugcccaggcacugaacacccuggucaagcagcuguccuccaacuucggcgccaucagcucugugcugaacgauauccugagcagacuggacccuccugaggccgaggugcagaucgacagacugaucacaggcagacugcagagccuccagacauacgugacccagcagcugaucagagccgccgagauuagagccucugccaaucuggccgccaccaagaugucugagugugugcugggccagagcaagagaguggacuuuugcggcaagggcuaccaccugaugagcuucccucagucugccccucacggcgugguguuucugcacgugacauaugugcccgcucaagagaagaauuucaccaccgcuccagccaucugccacgacggcaaagcccacuuuccuagagaaggcguguucguguccaacggcacccauugguucgugacacagcggaacuucuacgagccccagaucaucaccaccgacaacaccuucgugucuggcaacugcgacgucgugaucggcauugugaacaauaccguguacgacccucugcagcccgagcuggacagcuucaaagaggaacuggacaaguacuuuaagaaccacacaagccccgacguggaccugggcgauaucagcggaaucaaugccagcgucgugaacauccagaaagagaucgaccggcugaacgagguggccaagaaucugaacgagagccugaucgaccugcaagaacuggggaaguacgagcaguacaucaaguggcccugguacaucuggcugggcuuuaucgccggacugauugccaucgugauggucacaaucaugcuguguugcaugaccagcugcuguagcugccugaagggcuguuguagcuguggcagcugcugcaaguucgacgaggacgauucugagcccgugcugaagggcgugaaacugcacuacacaugaggacuagucccuguucccagagcccacuuuuuuuucuuuuuuugaaauaaaauagccugucuuucagaucucaaaggcucuuuucagagccaccaaaaaaaaaaaaaaaaaaaaaaaaaaaaaaaaaaaaaaaaaaaaaaaaaaaaaaaaaaaaaaaaaaaaaaaaaaaaaaaaaaaaaaaaaaaaaaaaaaaaa

SEQ ID NO: 23843 - RNA, 4191 nt, Artificial Sequence
  SARS-CoV-2/Wuhan/WIV05/2019__EPI_ISL_402128 spike protein mRNA gc mod (1-1273)(K986P_V987P_K986P_V987P_L18F_T20N_P26S_D138Y_R190S_K417T _E484K_N501Y_D614G_H655Y_T1027I)
aggagagggcgcuuggcuugcaaggacccugagcugcggcauugaagcacacccaacccaacucgacugaagucagccucacugaaccggaucugagaaucuucucucucugggcuugccagggcucuccgaaccuagcuagcauccucuucaauuccaacuagaaagcuuaccauguucguguuccuggugcugcugccucugguguccagccagugugugaacuucaccaacagaacacagcugccuagcgccuacaccaacagcuuuaccagaggcguguacuaccccgacaagguguucagauccagcgugcugcacucuacccaggaccuguuccugccuuucuucagcaacgugaccugguuccacgccauccacguguccggcaccaauggcaccaagagauucgacaaccccgugcugcccuucaacgacgggguguacuuugccagcaccgagaaguccaacaucaucagaggcuggaucuucggcaccacacuggacagcaagacccagagccugcugaucgugaacaacgccaccaacguggucaucaaagugugcgaguuccaguucugcaacuaccccuuccugggcgucuacuaccacaagaacaacaagagcuggauggaaagcgaguuccggguguacagcagcgccaacaacugcaccuucgaguacgugucccagccuuuccugauggaccuggaaggcaagcagggcaacuucaagaaccugagcgaguucguguuuaagaacaucgacggcuacuucaagaucuacagcaagcacaccccuaucaaccucgugcgggaucugccucagggcuucucugcucuggaaccccugguggaucugcccaucggcaucaacaucacccgguuucagacacugcuggcccugcacagaagcuaccugacaccuggcgauagcagcagcggauggacagcuggugccgccgcuuacuaugugggcuaccugcagccuagaaccuuccugcugaaguacaacgagaacggcaccaucaccgacgccguggauugugcucuggauccucugagcgagacaaagugcacccugaaguccuucaccguggaaaagggcaucuaccagaccagcaacuuccgggugcagcccaccgaauccaucgugcgguuccccaauaucaccaaucugugccccuucggcgagguguucaaugccaccagauucgccucuguguacgccuggaaccggaagcggaucagcaauugcguggccgacuacuccgugcuguacaacuccgccagcuucagcaccuucaagugcuacggcguguccccuaccaagcugaacgaccugugcuucacaaacguguacgccgacagcuucgugauccggggagaugaagugcggcagauugccccuggacagacaggcaccaucgccgacuacaacuacaagcugcccgacgacuucaccggcugugugauugccuggaacagcaacaaccuggacuccaaagucggcggcaacuacaauuaccuguaccggcuguuccggaaguccaaucugaagcccuucgagcgggacaucuccaccgagaucuaucaggccggcagcaccccuuguaacggcgugaagggcuucaacugcuacuucccacugcaguccuacggcuuucagcccacauacggcgugggcuaucagcccuacagagugguggugcugagcuucgaacugcugcaugccccugccacagugugcggcccuaagaaaagcaccaaucucgugaagaacaaaugcgugaacuucaacuucaacggccugaccggcaccggcgugcugacagagagcaacaagaaguuccugccauuccagcaguuuggccgggauaucgccgauaccacagacgccguuagagauccccagacacuggaaauccuggacaucaccccuugcagcuucggcggagugucugugaucaccccuggcaccaacaccagcaaucagguggcagugcuguaccagggcgugaacuguaccgaagugcccguggccauucacgccgaucagcugacaccuacauggcggguguacuccaccggcagcaauguguuucagaccagagccggcugucugaucggagccgaguacgugaacaauagcuacgagugcgacauccccaucggcgcuggaaucugcgccagcuaccagacacagacaaacagcccucggagagccagaagcguggccagccagagcaucauugccuacacaaugucucugggcgccgagaacagcguggccuacuccaacaacucuaucgcuauccccaccaacuucaccaucagcgugaccacagagauccugccuguguccaugaccaagaccagcguggacugcaccauguacaucugcggcgauuccaccgagugcuccaaccugcugcugcaguacggcagcuucugcacccagcugaauagagcccugacagggaucgccguggaacaggacaagaacacccaagagguguucgcccaagugaagcagaucuacaagaccccuccuaucaaggacuucggcggcuucaauuucagccagauucugcccgauccuagcaagcccagcaagcggagcuucaucgaggaccugcuguucaacaaagugacacuggccgacgccggcuucaucaagcaguauggcgauugucugggcgacauugccgccagggaucugauuugcgcccagaaguuuaacggacugacagugcugccuccucugcugaccgaugagaugaucgcccaguacacaucugcccugcuggccggcacaaucacaagcggcuggacauuuggagcaggcgccgcucugcagauccccuuugcuaugcagauggccuaccgguucaacggcaucggagugacccagaaugugcuguacgagaaccagaagcugaucgccaaccaguucaacagcgccaucggcaagauccaggacagccugagcagcacagcaagcgcccugggaaagcugcaggacguggucaaccagaaugcccaggcacugaacacccuggucaagcagcuguccuccaacuucggcgccaucagcucugugcugaacgauauccugagcagacuggacccuccugaggccgaggugcagaucgacagacugaucacaggcagacugcagagccuccagacauacgugacccagcagcugaucagagccgccgagauuagagccucugccaaucuggccgccaucaagaugucugagugugugcugggccagagcaagagaguggacuuuugcggcaagggcuaccaccugaugagcuucccucagucugccccucacggcgugguguuucugcacgugacauaugugcccgcucaagagaagaauuucaccaccgcuccagccaucugccacgacggcaaagcccacuuuccuagagaaggcguguucguguccaacggcacccauugguucgugacacagcggaacuucuacgagccccagaucaucaccaccgacaacaccuucgugucuggcaacugcgacgucgugaucggcauugugaacaauaccguguacgacccucugcagcccgagcuggacagcuucaaagaggaacuggacaaguacuuuaagaaccacacaagccccgacguggaccugggcgauaucagcggaaucaaugccagcgucgugaacauccagaaagagaucgaccggcugaacgagguggccaagaaucugaacgagagccugaucgaccugcaagaacuggggaaguacgagcaguacaucaaguggcccugguacaucuggcugggcuuuaucgccggacugauugccaucgugauggucacaaucaugcuguguugcaugaccagcugcuguagcugccugaagggcuguuguagcuguggcagcugcugcaaguucgacgaggacgauucugagcccgugcugaagggcgugaaacugcacuacacaugaggacuagucccuguucccagagcccacuuuuuuuucuuuuuuugaaauaaaauagccugucuuucagaucucaaaggcucuuuucagagccaccaaaaaaaaaaaaaaaaaaaaaaaaaaaaaaaaaaaaaaaaaaaaaaaaaaaaaaaaaaaaaaaaaaaaaaaaaaaaaaaaaaaaaaaaaaaaaaaaaaaaa

SEQ ID NO: 23844 - RNA, 4191 nt, Artificial Sequence
  SARS-CoV-2/Wuhan/WIV05/2019__EPI_ISL_402128 spike protein mRNA gc mod (1-1273)(K986P_V987P_K986P_V987P_S13I_W152C_L452R_D614G)
aggagagggcgcuuggcuugcaaggacccugagcugcggcauugaagcacacccaacccaacucgacugaagucagccucacugaaccggaucugagaaucuucucucucugggcuugccagggcucuccgaaccuagcuagcauccucuucaauuccaacuagaaagcuuaccauguucguguuccuggugcugcugccucugguguccauccagugugugaaccugaccaccagaacacagcugccuccagccuacaccaacagcuuuaccagaggcguguacuaccccgacaagguguucagauccagcgugcugcacucuacccaggaccuguuccugccuuucuucagcaacgugaccugguuccacgccauccacguguccggcaccaauggcaccaagagauucgacaaccccgugcugcccuucaacgacgggguguacuuugccagcaccgagaaguccaacaucaucagaggcuggaucuucggcaccacacuggacagcaagacccagagccugcugaucgugaacaacgccaccaacguggucaucaaagugugcgaguuccaguucugcaacgaccccuuccugggcgucuacuaccacaagaacaacaagagcugcauggaaagcgaguuccggguguacagcagcgccaacaacugcaccuucgaguacgugucccagccuuuccugauggaccuggaaggcaagcagggcaacuucaagaaccugcgcgaguucguguuuaagaacaucgacggcuacuucaagaucuacagcaagcacaccccuaucaaccucgugcgggaucugccucagggcuucucugcucuggaaccccugguggaucugcccaucggcaucaacaucacccgguuucagacacugcuggcccugcacagaagcuaccugacaccuggcgauagcagcagcggauggacagcuggugccgccgcuuacuaugugggcuaccugcagccuagaaccuuccugcugaaguacaacgagaacggcaccaucaccgacgccguggauugugcucuggauccucugagcgagacaaagugcacccugaaguccuucaccguggaaaagggcaucuaccagaccagcaacuuccgggugcagcccaccgaauccaucgugcgguuccccaauaucaccaaucugugccccuucggcgagguguucaaugccaccagauucgccucuguguacgccuggaaccggaagcggaucagcaauugcguggccgacuacuccgugcuguacaacuccgccagcuucagcaccuucaagugcuacggcguguccccuaccaagcugaacgaccugugcuucacaaacguguacgccgacagcuucgugauccggggagaugaagugcggcagauugccccuggacagacaggcaagaucgccgacuacaacuacaagcugcccgacgacuucaccggcugugugauugccuggaacagcaacaaccuggacuccaaagucggcggcaacuacaauuaccgcuaccggcuguuccggaaguccaaucugaagcccuucgagcgggacaucuccaccgagaucuaucaggccggcagcaccccuuguaacggcguggaaggcuucaacugcuacuucccacugcaguccuacggcuuucagcccacaaauggcgugggcuaucagcccuacagagugguggugcugagcuucgaacugcugcaugccccugccacagugugcggcccuaagaaaagcaccaaucucgugaagaacaaaugcgugaacuucaacuucaacggccugaccggcaccggcgugcugacagagagcaacaagaaguuccugccauuccagcaguuuggccgggauaucgccgauaccacagacgccguuagagauccccagacacuggaaauccuggacaucaccccuugcagcuucggcggagugucugugaucaccccuggcaccaacaccagcaaucagguggcagugcuguaccagggcgugaacuguaccgaagugcccguggccauucacgccgaucagcugacaccuacauggcggguguacuccaccggcagcaauguguuucagaccagagccggcugucugaucggagccgagcacgugaacaauagcuacgagugcgacauccccaucggcgcuggaaucugcgccagcuaccagacacagacaaacagcccucggagagccagaagcguggccagccagagcaucauugccuacacaaugucucugggcgccgagaacagcguggccuacuccaacaacucuaucgcuauccccaccaacuucaccaucagcgugaccacagagauccugccuguguccaugaccaagaccagcguggacugcaccauguacaucugcggcgauuccaccgagugcuccaaccugcugcugcaguacggcagcuucugcacccagcugaauagagcccugacagggaucgccguggaacaggacaagaacacccaagagguguucgcccaagugaagcagaucuacaagaccccuccuaucaaggacuucggcggcuucaauuucagccagauucugcccgauccuagcaagcccagcaagcggagcuucaucgaggaccugcuguucaacaaagugacacuggccgacgccggcuucaucaagcaguauggcgauugucugggcgacauugccgccagggaucugauuugcgcccagaaguuuaacggacugacagugcugccuccucugcugaccgaugagaugaucgcccaguacacaucugcccugcuggccggcacaaucacaagcggcuggacauuuggagcaggcgccgcucugcagauccccuuugcuaugcagauggccuaccgguucaacggcaucggagugacccagaaugugcuguacgagaaccagaagcugaucgccaaccaguucaacagcgccaucggcaagauccaggacagccugagcagcacagcaagcgcccugggaaagcugcaggacguggucaaccagaaugcccaggcacugaacacccuggucaagcagcuguccuccaacuucggcgccaucagcucugugcugaacgauauccugagcagacuggacccuccugaggccgaggugcagaucgacagacugaucacaggcagacugcagagccuccagacauacgugacccagcagcugaucagagccgccgagauuagagccucugccaaucuggccgccaccaagaugucugagugugugcugggccagagcaagagaguggacuuuugcggcaagggcuaccaccugaugagcuucccucagucugccccucacggcgugguguuucugcacgugacauaugugcccgcucaagagaagaauuucaccaccgcuccagccaucugccacgacggcaaagcccacuuuccuagagaaggcguguucguguccaacggcacccauugguucgugacacagcggaacuucuacgagccccagaucaucaccaccgacaacaccuucgugucuggcaacugcgacgucgugaucggcauugugaacaauaccguguacgacccucugcagcccgagcuggacagcuucaaagaggaacuggacaaguacuuuaagaaccacacaagccccgacguggaccugggcgauaucagcggaaucaaugccagcgucgugaacauccagaaagagaucgaccggcugaacgagguggccaagaaucugaacgagagccugaucgaccugcaagaacuggggaaguacgagcaguacaucaaguggcccugguacaucuggcugggcuuuaucgccggacugauugccaucgugauggucacaaucaugcuguguugcaugaccagcugcuguagcugccugaagggcuguuguagcuguggcagcugcugcaaguucgacgaggacgauucugagcccgugcugaagggcgugaaacugcacuacacaugaggacuagucccuguucccagagcccacuuuuuuuucuuuuuuugaaauaaaauagccugucuuucagaucucaaaggcucuuuucagagccaccaaaaaaaaaaaaaaaaaaaaaaaaaaaaaaaaaaaaaaaaaaaaaaaaaaaaaaaaaaaaaaaaaaaaaaaaaaaaaaaaaaaaaaaaaaaaaaaaaaaaa

SEQ ID NO: 23845 - RNA, 1459 nt, Artificial Sequence
  SARS-CoV-2/Wuhan/WIV05/2019__EPI_ISL_402128 spike protein mRNA gc (1-15,334-528) Ferritin construct
aggagacccgugacccggaaguuguacggcuacgcgacuuucccucccacaaacccucgcgcccuuccuuuccuacuugggcccggcagaaagcuuaccauguucguguuccugguccuccugccccuggugagcucccagugcaaccugugccccuucggcgagguguucaacgccacccgguucgccagcgucuacgccuggaaccgcaagcggaucuccaacugcguggcggacuacagcgugcuguacaacuccgccagcuucuccacguucaagugcuacggcgucagccccaccaagcucaacgaccugugcuucaccaacguguacgccgacuccuucgugauccgcggggacgagguccggcagaucgcccccggccagaccgggaagaucgccgacuacaacuacaagcugccggacgacuucacgggcugcgugaucgcguggaacagcaacaaccucgacuccaaggucgggggcaacuacaacuaccuguaccgccuguuccgcaagagcaaccucaagcccuucgagcgggacaucuccaccgagaucuaccaggccggcagcacccccugcaacgggguggagggcuucaacugcuacuucccccugcaguccuacggguuccagccgaccaacggcgugggguaccagcccuaccggguggucgugcugagcuucgagcuccugcacgcccccgccacggugugcggccccaagggcggggguggaagcggcggggguggaagugacaucaucaagcuccugaacgagcaggucaacaaggagaugcaguccagcaaccuguacauguccaugagcuccuggugcuacacccacagccucgacggcgccgggcuguuccuguucgaccacgccgcggaggaguacgagcacgccaagaagcucaucaucuuccugaacgagaacaacgugcccgugcagcugaccuccaucagcgccccggagcacaaguucgagggccucacgcagaucuuccagaaggccuacgagcacgagcagcacaucuccgagagcaucaacaacaucguggaccacgccaucaaguccaaggaccacgcgaccuucaacuuccugcagugguacgucgccgagcagcacgaggaggaggugcuguucaaggacauccucgacaagaucgagcugaucgggaacgagaaccacggccuguaccucgccgaccaguacgugaaggggaucgccaagagccgcaaguccugaggacuaguguccaccugucccuccugggcugcuggauugucucguuuuccugccaaauaaacaggaucagcgcuuuacagaucucaaaggcucuuuucagagccaccaaaaaaaaaaaaaaaaaaaaaaaaaaaaaaaaaaaaaaaaaaaaaaaaaaaaaaaaaaaaaaaaaaaaaaaaaaaaaaaaaaaaaaaaaaaaaaaaaaaaa

SEQ ID NO: 23846 - RNA, 1057 nt, Artificial Sequence
  SARS-CoV-2/Wuhan/WIV05/2019__EPI_ISL_402128 spike protein mRNA gc (334-528) Foldon construct
aggagacccgugacccggaaguuguacggcuacgcgacuuucccucccacaaacccucgcgcccuuccuuuccuacuugggcccggcagaaagcuuaccaugcccaugggcagccugcagccgcucgccacccuguaccugcucgggaugcugguggccuccguccuggcgaaccugugccccuucggcgagguguucaacgccacccgguucgccagcgucuacgccuggaaccgcaagcggaucuccaacugcguggcggacuacagcgugcuguacaacuccgccagcuucuccacguucaagugcuacggcgucagccccaccaagcucaacgaccugugcuucaccaacguguacgccgacuccuucgugauccgcggggacgagguccggcagaucgcccccggccagaccgggaagaucgccgacuacaacuacaagcugccggacgacuucacgggcugcgugaucgcguggaacagcaacaaccucgacuccaaggucgggggcaacuacaacuaccuguaccgccuguuccgcaagagcaaccucaagcccuucgagcgggacaucuccaccgagaucuaccaggccggcagcacccccugcaacgggguggagggcuucaacugcuacuucccccugcaguccuacggguuccagccgaccaacggcgugggguaccagcccuaccggguggucgugcugagcuucgagcuccugcacgcccccgccacggugugcggccccaagggcagcggcggguacauccccgaggccccgcgcgacggccaggccuacgugcggaaggacggcgaguggguccugcugagcaccuuccucugaggacuaguguccaccugucccuccugggcugcuggauugucucguuuuccugccaaauaaacaggaucagcgcuuuacagaucucaaaggcucuuuucagagccaccaaaaaaaaaaaaaaaaaaaaaaaaaaaaaaaaaaaaaaaaaaaaaaaaaaaaaaaaaaaaaaaaaaaaaaaaaaaaaaaaaaaaaaaaaaaaaaaaaaaaa

SEQ ID NO: 23847 - RNA, 1435 nt, Artificial Sequence
  SARS-CoV-2/Wuhan/WIV05/2019__EPI_ISL_402128 spike protein mRNA gc (1-15,334-528) LumSynth construct
aggagacccgugacccggaaguuguacggcuacgcgacuuucccucccacaaacccucgcgcccuuccuuuccuacuugggcccggcagaaagcuuaccauguucguguuccugguccuccugccccuggugagcucccagugcaaccugugccccuucggcgagguguucaacgccacccgguucgccagcgucuacgccuggaaccgcaagcggaucuccaacugcguggcggacuacagcgugcuguacaacuccgccagcuucuccacguucaagugcuacggcgucagccccaccaagcucaacgaccugugcuucaccaacguguacgccgacuccuucgugauccgcggggacgagguccggcagaucgcccccggccagaccgggaagaucgccgacuacaacuacaagcugccggacgacuucacgggcugcgugaucgcguggaacagcaacaaccucgacuccaaggucgggggcaacuacaacuaccuguaccgccuguuccgcaagagcaaccucaagcccuucgagcgggacaucuccaccgagaucuaccaggccggcagcacccccugcaacgggguggagggcuucaacugcuacuucccccugcaguccuacggguuccagccgaccaacggcgugggguaccagcccuaccggguggucgugcugagcuucgagcuccugcacgcccccgccacggugugcggccccaagggcggcggcggcuccggaggcggagguagcgggggacagaucuacgagggcaagcugaccgccgaggggcuccgcuucggcaucguggccagccgguucaaccacgcgcuggucgaccgccugguggagggggccaucgacgccaucgugcggcacggcgggcgcgaggaggacaucacccucguccgggugcccggcuccugggagaucccgguggccgccggcgagcuggcccgcaaggaggacaucgacgcggucaucgccaucggggugcugauccggggcgccacgccccacuucgacuacaucgccagcgagguguccaaggggcucgcggaccugagccuggagcuccgcaagcccaucaccuucggcgucaucaccgccgacacccuggagcaggccaucgagcgggccgggacgaagcacggcaacaagggcugggaggccgcgcuguccgccaucgagauggccaaccucuucaagagccugcgcugaggacuaguguccaccugucccuccugggcugcuggauugucucguuuuccugccaaauaaacaggaucagcgcuuuacagaucucaaaggcucuuuucagagccaccaaaaaaaaaaaaaaaaaaaaaaaaaaaaaaaaaaaaaaaaaaaaaaaaaaaaaaaaaaaaaaaaaaaaaaaaaaaaaaaaaaaaaaaaaaaaaaaaaaaaa

SEQ ID NO: 23848 - RNA, 1396 nt, Artificial Sequence
  SARS-CoV-2/Wuhan/WIV05/2019__EPI_ISL_402128 spike protein mRNA gc (334-528) LumSynth construct
aggagacccgugacccggaaguuguacggcuacgcgacuuucccucccacaaacccucgcgcccuuccuuuccuacuugggcccggcagaaagcuuaccaugcagaucuacgagggcaagcugaccgccgaggggcuccgcuucggcaucguggccagccgguucaaccacgcgcuggucgaccgccugguggagggggccaucgacgccaucgugcggcacggcgggcgcgaggaggacaucacccucguccgggugcccggcuccugggagaucccgguggccgccggcgagcuggcccgcaaggaggacaucgacgcggucaucgccaucggggugcugauccggggcgccacgccccacuucgacuacaucgccagcgagguguccaaggggcucgcggaccugagccuggagcuccgcaagcccaucaccuucggcgucaucaccgccgacacccuggagcaggccaucgagcgggccgggacgaagcacggcaacaagggcugggaggccgcgcuguccgccaucgagauggccaaccucuucaagagccugcgcggcgggggcgggagcggcgggggcggcuccgggggcgggaaccugugccccuucggcgagguguucaacgccacccgguucgccagcgucuacgccuggaaccgcaagcggaucuccaacugcguggcggacuacagcgugcuguacaacuccgccagcuucuccacguucaagugcuacggcgucagccccaccaagcucaacgaccugugcuucaccaacguguacgccgacuccuucgugauccgcggggacgagguccggcagaucgcccccggccagaccgggaagaucgccgacuacaacuacaagcugccggacgacuucacgggcugcgugaucgcguggaacagcaacaaccucgacuccaaggucgggggcaacuacaacuaccuguaccgccuguuccgcaagagcaaccucaagcccuucgagcgggacaucuccaccgagaucuaccaggccggcagcacccccugcaacgggguggagggcuucaacugcuacuucccccugcaguccuacggguuccagccgaccaacggcgugggguaccagcccuaccggguggucgugcugagcuucgagcuccugcacgcccccgccacggugugcggccccaagugaggacuaguguccaccugucccuccugggcugcuggauugucucguuuuccugccaaauaaacaggaucagcgcuuuacagaucucaaaggcucuuuucagagccaccaaaaaaaaaaaaaaaaaaaaaaaaaaaaaaaaaaaaaaaaaaaaaaaaaaaaaaaaaaaaaaaaaaaaaaaaaaaaaaaaaaaaaaaaaaaaaaaaaaaaa

SEQ ID NO: 23849 - RNA, 4129 nt, Artificial Sequence
  SARS-CoV-2/Wuhan/WIV05/2019__EPI_ISL_402128 spike protein mRNA gc (1-1273)
aggagacccgugacccggaaguuguacggcuacgcgacuuucccucccacaaacccucgcgcccuuccuuuccuacuugggcccggcagaaagcuuaccauguucguguuccugguccuccugccccuggugagcucccagugcgugaaccucaccacccgcacgcagcugccgcccgccuacaccaacagcuucacccggggcgucuacuaccccgacaagguguuccgcuccagcgugcugcacuccacccaggaccucuuccugcccuucuucagcaacgucacgugguuccacgccauccacguguccgggaccaacggcaccaagcgguucgacaacccggugcugcccuucaacgacggggucuacuucgcgagcaccgagaaguccaacaucauccgcggcuggaucuucgggacgacccucgacagcaagacccagucccugcugaucgugaacaacgccaccaacguggucaucaaggugugcgaguuccaguucugcaacgaccccuuccucggcguguacuaccacaagaacaacaagagcuggauggaguccgaguuccgggucuacagcuccgccaacaacugcacguucgaguacgugagccagcccuuccugauggaccuggagggcaagcaggggaacuucaagaaccuccgcgaguucguguucaagaacaucgacggcuacuucaagaucuacuccaagcacaccccgaucaaccugguccgggaccugccccagggguucagcgcccucgagccccugguggaccugcccaucggcaucaacaucacccgcuuccagacccuccuggcccugcaccgguccuaccucacgccgggggacagcagcuccggcuggaccgcgggcgccgccgccuacuacgugggguaccugcagccccgcaccuuccugcucaaguacaacgagaacggcaccaucacggacgcggucgacugcgcccuggacccccugagcgagaccaagugcacccucaaguccuucaccguggagaaggggaucuaccagacgagcaacuuccgggugcagcccaccgaguccaucguccgcuucccgaacaucaccaaccugugccccuucggcgagguguucaacgccacccgguucgccagcgucuacgccuggaaccgcaagcggaucuccaacugcguggcggacuacagcgugcuguacaacuccgccagcuucuccacguucaagugcuacggcgucagccccaccaagcucaacgaccugugcuucaccaacguguacgccgacuccuucgugauccgcggggacgagguccggcagaucgcccccggccagaccgggaagaucgccgacuacaacuacaagcugccggacgacuucacgggcugcgugaucgcguggaacagcaacaaccucgacuccaaggucgggggcaacuacaacuaccuguaccgccuguuccgcaagagcaaccucaagcccuucgagcgggacaucuccaccgagaucuaccaggccggcagcacccccugcaacgggguggagggcuucaacugcuacuucccccugcaguccuacggguuccagccgaccaacggcgugggguaccagcccuaccggguggucgugcugagcuucgagcuccugcacgcccccgccacggugugcggccccaagaaguccaccaaccuggucaagaacaagugcgugaacuucaacuucaacggccucaccgggaccggcgugcugaccgagagcaacaagaaguuccugccguuccagcaguucgggcgcgacaucgccgacacgaccgacgcgguccgcgacccccagacccuggagauccucgacaucacccccugcagcuucggcgggguguccgugaucacgccgggcaccaacaccagcaaccaggucgccgugcuguaccaggacgugaacugcaccgagguccccguggccauccacgccgaccagcugacgcccaccuggcggguguacuccaccggcagcaacgucuuccagacccgcgccgggugccucaucggcgcggagcacgugaacaacuccuacgagugcgacauccccaucggggccggcaucugcgccagcuaccagacgcagaccaacuccccgcggcgcgcccggagcguggcgucccagagcaucaucgccuacaccaugucccugggcgccgagaacagcgucgccuacuccaacaacagcaucgccauccccaccaacuucacgaucuccgugaccaccgagauccugcccgugagcaugaccaagacgagcgucgacugcaccauguacaucugcggggacuccaccgagugcagcaaccuccugcugcaguacggcuccuucugcacccagcucaaccgcgcgcugacggggaucgccguggagcaggacaagaacacccaggagguguucgcccaggucaagcagaucuacaagacgcccccgaucaaggacuucggcggguucaacuucagccagauccugcccgaccccuccaagcccagcaagcgguccuucaucgaggaccuccuguucaacaaggugacccuggccgacgccggcuucaucaagcaguacggcgacugccucggggacaucgcggcccgcgaccugaucugcgcccagaaguucaacggccugaccgugcucccgccccugcugaccgacgagaugaucgcccaguacaccagcgcccuccuggcggggaccaucacguccggcuggaccuucggggccggcgccgcccugcagauccccuucgcgaugcagauggccuaccgguucaacggcaucggggucacccagaacgugcucuacgagaaccagaagcugaucgccaaccaguucaacagcgccaucggcaagauccaggacucccugagcuccaccgccagcgcgcucgggaagcugcaggacguggucaaccagaacgcccaggcccugaacacgcucgugaagcagcuguccagcaacuucggcgccaucuccagcgugcugaacgacauccucucccgccuggacaaggucgaggccgaggugcagaucgaccggcugaucaccgggcgccuccagagccugcagaccuacgugacccagcagcugauccgggcggccgagauccgcgccagcgccaaccucgccgcgaccaagauguccgagugcguccugggccagagcaagcggguggacuucugcggcaagggguaccaccugauguccuucccccagagcgccccgcacggcguggucuuccuccacgugacguacguccccgcccaggagaagaacuucaccaccgcccccgcgaucugccacgacgggaaggcccacuucccccgcgagggcguguucguguccaacgggacccacugguucgucacgcagcggaacuucuacgagccgcagaucaucaccaccgacaacaccuucgugagcggcaacugcgacguggucaucggcaucgugaacaacacgguguacgacccccugcagcccgagcuggacuccuucaaggaggagcucgacaaguacuucaagaaccacaccagccccgacgucgaccugggggacaucuccggcaucaacgccagcguggugaacauccagaaggagaucgaccgccugaacgaggucgccaagaaccucaacgagucccugaucgaccugcaggagcucgggaaguacgagcaguacaucaaguggccgugguacaucuggcugggcuucaucgccggccugaucgcgaucgugauggugaccaucaugcucugcugcaugaccagcugcugcuccugccugaaggggugcugcagcugcggcuccugcugcaaguucgacgaggacgacagcgagcccguccugaagggggugaagcuccacuacacgugaggacuaguguccaccugucccuccugggcugcuggauugucucguuuuccugccaaauaaacaggaucagcgcuuuacagaucucaaaggcucuuuucagagccaccaaaaaaaaaaaaaaaaaaaaaaaaaaaaaaaaaaaaaaaaaaaaaaaaaaaaaaaaaaaaaaaaaaaaaaaaaaaaaaaaaaaaaaaaaaaaaaaaaaaaa

SEQ ID NO: 23850 - RNA, 4129 nt, Artificial Sequence
  SARS-CoV-2/Wuhan/WIV05/2019__EPI_ISL_402128 spike protein mRNA gc (1-1273)(D614G)
aggagacccgugacccggaaguuguacggcuacgcgacuuucccucccacaaacccucgcgcccuuccuuuccuacuugggcccggcagaaagcuuaccauguucguguuccugguccuccugccccuggugagcucccagugcgugaaccucaccacccgcacgcagcugccgcccgccuacaccaacagcuucacccggggcgucuacuaccccgacaagguguuccgcuccagcgugcugcacuccacccaggaccucuuccugcccuucuucagcaacgucacgugguuccacgccauccacguguccgggaccaacggcaccaagcgguucgacaacccggugcugcccuucaacgacggggucuacuucgcgagcaccgagaaguccaacaucauccgcggcuggaucuucgggacgacccucgacagcaagacccagucccugcugaucgugaacaacgccaccaacguggucaucaaggugugcgaguuccaguucugcaacgaccccuuccucggcguguacuaccacaagaacaacaagagcuggauggaguccgaguuccgggucuacagcuccgccaacaacugcacguucgaguacgugagccagcccuuccugauggaccuggagggcaagcaggggaacuucaagaaccuccgcgaguucguguucaagaacaucgacggcuacuucaagaucuacuccaagcacaccccgaucaaccugguccgggaccugccccagggguucagcgcccucgagccccugguggaccugcccaucggcaucaacaucacccgcuuccagacccuccuggcccugcaccgguccuaccucacgccgggggacagcagcuccggcuggaccgcgggcgccgccgccuacuacgugggguaccugcagccccgcaccuuccugcucaaguacaacgagaacggcaccaucacggacgcggucgacugcgcccuggacccccugagcgagaccaagugcacccucaaguccuucaccguggagaaggggaucuaccagacgagcaacuuccgggugcagcccaccgaguccaucguccgcuucccgaacaucaccaaccugugccccuucggcgagguguucaacgccacccgguucgccagcgucuacgccuggaaccgcaagcggaucuccaacugcguggcggacuacagcgugcuguacaacuccgccagcuucuccacguucaagugcuacggcgucagccccaccaagcucaacgaccugugcuucaccaacguguacgccgacuccuucgugauccgcggggacgagguccggcagaucgcccccggccagaccgggaagaucgccgacuacaacuacaagcugccggacgacuucacgggcugcgugaucgcguggaacagcaacaaccucgacuccaaggucgggggcaacuacaacuaccuguaccgccuguuccgcaagagcaaccucaagcccuucgagcgggacaucuccaccgagaucuaccaggccggcagcacccccugcaacgggguggagggcuucaacugcuacuucccccugcaguccuacggguuccagccgaccaacggcgugggguaccagcccuaccggguggucgugcugagcuucgagcuccugcacgcccccgccacggugugcggccccaagaaguccaccaaccuggucaagaacaagugcgugaacuucaacuucaacggccucaccgggaccggcgugcugaccgagagcaacaagaaguuccugccguuccagcaguucgggcgcgacaucgccgacacgaccgacgcgguccgcgacccccagacccuggagauccucgacaucacccccugcagcuucggcgggguguccgugaucacgccgggcaccaacaccagcaaccaggucgccgugcuguaccagggcgugaacugcaccgagguccccguggccauccacgccgaccagcugacgcccaccuggcggguguacuccaccggcagcaacgucuuccagacccgcgccgggugccucaucggcgcggagcacgugaacaacuccuacgagugcgacauccccaucggggccggcaucugcgccagcuaccagacgcagaccaacuccccgcggcgcgcccggagcguggcgucccagagcaucaucgccuacaccaugucccugggcgccgagaacagcgucgccuacuccaacaacagcaucgccauccccaccaacuucacgaucuccgugaccaccgagauccugcccgugagcaugaccaagacgagcgucgacugcaccauguacaucugcggggacuccaccgagugcagcaaccuccugcugcaguacggcuccuucugcacccagcucaaccgcgcgcugacggggaucgccguggagcaggacaagaacacccaggagguguucgcccaggucaagcagaucuacaagacgcccccgaucaaggacuucggcggguucaacuucagccagauccugcccgaccccuccaagcccagcaagcgguccuucaucgaggaccuccuguucaacaaggugacccuggccgacgccggcuucaucaagcaguacggcgacugccucggggacaucgcggcccgcgaccugaucugcgcccagaaguucaacggccugaccgugcucccgccccugcugaccgacgagaugaucgcccaguacaccagcgcccuccuggcggggaccaucacguccggcuggaccuucggggccggcgccgcccugcagauccccuucgcgaugcagauggccuaccgguucaacggcaucggggucacccagaacgugcucuacgagaaccagaagcugaucgccaaccaguucaacagcgccaucggcaagauccaggacucccugagcuccaccgccagcgcgcucgggaagcugcaggacguggucaaccagaacgcccaggcccugaacacgcucgugaagcagcuguccagcaacuucggcgccaucuccagcgugcugaacgacauccucucccgccuggacaaggucgaggccgaggugcagaucgaccggcugaucaccgggcgccuccagagccugcagaccuacgugacccagcagcugauccgggcggccgagauccgcgccagcgccaaccucgccgcgaccaagauguccgagugcguccugggccagagcaagcggguggacuucugcggcaagggguaccaccugauguccuucccccagagcgccccgcacggcguggucuuccuccacgugacguacguccccgcccaggagaagaacuucaccaccgcccccgcgaucugccacgacgggaaggcccacuucccccgcgagggcguguucguguccaacgggacccacugguucgucacgcagcggaacuucuacgagccgcagaucaucaccaccgacaacaccuucgugagcggcaacugcgacguggucaucggcaucgugaacaacacgguguacgacccccugcagcccgagcuggacuccuucaaggaggagcucgacaaguacuucaagaaccacaccagccccgacgucgaccugggggacaucuccggcaucaacgccagcguggugaacauccagaaggagaucgaccgccugaacgaggucgccaagaaccucaacgagucccugaucgaccugcaggagcucgggaaguacgagcaguacaucaaguggccgugguacaucuggcugggcuucaucgccggccugaucgcgaucgugauggugaccaucaugcucugcugcaugaccagcugcugcuccugccugaaggggugcugcagcugcggcuccugcugcaaguucgacgaggacgacagcgagcccguccugaagggggugaagcuccacuacacgugaggacuaguguccaccugucccuccugggcugcuggauugucucguuuuccugccaaauaaacaggaucagcgcuuuacagaucucaaaggcucuuuucagagccaccaaaaaaaaaaaaaaaaaaaaaaaaaaaaaaaaaaaaaaaaaaaaaaaaaaaaaaaaaaaaaaaaaaaaaaaaaaaaaaaaaaaaaaaaaaaaaaaaaaaaa

SEQ ID NO: 23851 - RNA, 4129 nt, Artificial Sequence
  SARS-CoV-2/Wuhan/WIV05/2019__EPI_ISL_402128 spike protein mRNA gc (1-1273)(A222V_D614G)
aggagacccgugacccggaaguuguacggcuacgcgacuuucccucccacaaacccucgcgcccuuccuuuccuacuugggcccggcagaaagcuuaccauguucguguuccugguccuccugccccuggugagcucccagugcgugaaccucaccacccgcacgcagcugccgcccgccuacaccaacagcuucacccggggcgucuacuaccccgacaagguguuccgcuccagcgugcugcacuccacccaggaccucuuccugcccuucuucagcaacgucacgugguuccacgccauccacguguccgggaccaacggcaccaagcgguucgacaacccggugcugcccuucaacgacggggucuacuucgcgagcaccgagaaguccaacaucauccgcggcuggaucuucgggacgacccucgacagcaagacccagucccugcugaucgugaacaacgccaccaacguggucaucaaggugugcgaguuccaguucugcaacgaccccuuccucggcguguacuaccacaagaacaacaagagcuggauggaguccgaguuccgggucuacagcuccgccaacaacugcacguucgaguacgugagccagcccuuccugauggaccuggagggcaagcaggggaacuucaagaaccuccgcgaguucguguucaagaacaucgacggcuacuucaagaucuacuccaagcacaccccgaucaaccugguccgggaccugccccagggguucagcguccucgagccccugguggaccugcccaucggcaucaacaucacccgcuuccagacccuccuggcccugcaccgguccuaccucacgccgggggacagcagcuccggcuggaccgcgggcgccgccgccuacuacgugggguaccugcagccccgcaccuuccugcucaaguacaacgagaacggcaccaucacggacgcggucgacugcgcccuggacccccugagcgagaccaagugcacccucaaguccuucaccguggagaaggggaucuaccagacgagcaacuuccgggugcagcccaccgaguccaucguccgcuucccgaacaucaccaaccugugccccuucggcgagguguucaacgccacccgguucgccagcgucuacgccuggaaccgcaagcggaucuccaacugcguggcggacuacagcgugcuguacaacuccgccagcuucuccacguucaagugcuacggcgucagccccaccaagcucaacgaccugugcuucaccaacguguacgccgacuccuucgugauccgcggggacgagguccggcagaucgcccccggccagaccgggaagaucgccgacuacaacuacaagcugccggacgacuucacgggcugcgugaucgcguggaacagcaacaaccucgacuccaaggucgggggcaacuacaacuaccuguaccgccuguuccgcaagagcaaccucaagcccuucgagcgggacaucuccaccgagaucuaccaggccggcagcacccccugcaacgggguggagggcuucaacugcuacuucccccugcaguccuacggguuccagccgaccaacggcgugggguaccagcccuaccggguggucgugcugagcuucgagcuccugcacgcccccgccacggugugcggccccaagaaguccaccaaccuggucaagaacaagugcgugaacuucaacuucaacggccucaccgggaccggcgugcugaccgagagcaacaagaaguuccugccguuccagcaguucgggcgcgacaucgccgacacgaccgacgcgguccgcgacccccagacccuggagauccucgacaucacccccugcagcuucggcgggguguccgugaucacgccgggcaccaacaccagcaaccaggucgccgugcuguaccagggcgugaacugcaccgagguccccguggccauccacgccgaccagcugacgcccaccuggcggguguacuccaccggcagcaacgucuuccagacccgcgccgggugccucaucggcgcggagcacgugaacaacuccuacgagugcgacauccccaucggggccggcaucugcgccagcuaccagacgcagaccaacuccccgcggcgcgcccggagcguggcgucccagagcaucaucgccuacaccaugucccugggcgccgagaacagcgucgccuacuccaacaacagcaucgccauccccaccaacuucacgaucuccgugaccaccgagauccugcccgugagcaugaccaagacgagcgucgacugcaccauguacaucugcggggacuccaccgagugcagcaaccuccugcugcaguacggcuccuucugcacccagcucaaccgcgcgcugacggggaucgccguggagcaggacaagaacacccaggagguguucgcccaggucaagcagaucuacaagacgcccccgaucaaggacuucggcggguucaacuucagccagauccugcccgaccccuccaagcccagcaagcgguccuucaucgaggaccuccuguucaacaaggugacccuggccgacgccggcuucaucaagcaguacggcgacugccucggggacaucgcggcccgcgaccugaucugcgcccagaaguucaacggccugaccgugcucccgccccugcugaccgacgagaugaucgcccaguacaccagcgcccuccuggcggggaccaucacguccggcuggaccuucggggccggcgccgcccugcagauccccuucgcgaugcagauggccuaccgguucaacggcaucggggucacccagaacgugcucuacgagaaccagaagcugaucgccaaccaguucaacagcgccaucggcaagauccaggacucccugagcuccaccgccagcgcgcucgggaagcugcaggacguggucaaccagaacgcccaggcccugaacacgcucgugaagcagcuguccagcaacuucggcgccaucuccagcgugcugaacgacauccucucccgccuggacaaggucgaggccgaggugcagaucgaccggcugaucaccgggcgccuccagagccugcagaccuacgugacccagcagcugauccgggcggccgagauccgcgccagcgccaaccucgccgcgaccaagauguccgagugcguccugggccagagcaagcggguggacuucugcggcaagggguaccaccugauguccuucccccagagcgccccgcacggcguggucuuccuccacgugacguacguccccgcccaggagaagaacuucaccaccgcccccgcgaucugccacgacgggaaggcccacuucccccgcgagggcguguucguguccaacgggacccacugguucgucacgcagcggaacuucuacgagccgcagaucaucaccaccgacaacaccuucgugagcggcaacugcgacguggucaucggcaucgugaacaacacgguguacgacccccugcagcccgagcuggacuccuucaaggaggagcucgacaaguacuucaagaaccacaccagccccgacgucgaccugggggacaucuccggcaucaacgccagcguggugaacauccagaaggagaucgaccgccugaacgaggucgccaagaaccucaacgagucccugaucgaccugcaggagcucgggaaguacgagcaguacaucaaguggccgugguacaucuggcugggcuucaucgccggccugaucgcgaucgugauggugaccaucaugcucugcugcaugaccagcugcugcuccugccugaaggggugcugcagcugcggcuccugcugcaaguucgacgaggacgacagcgagcccguccugaagggggugaagcuccacuacacgugaggacuaguguccaccugucccuccugggcugcuggauugucucguuuuccugccaaauaaacaggaucagcgcuuuacagaucucaaaggcucuuuucagagccaccaaaaaaaaaaaaaaaaaaaaaaaaaaaaaaaaaaaaaaaaaaaaaaaaaaaaaaaaaaaaaaaaaaaaaaaaaaaaaaaaaaaaaaaaaaaaaaaaaaaaa

SEQ ID NO: 23852 - RNA, 4129 nt, Artificial Sequence
  SARS-CoV-2/Wuhan/WIV05/2019__EPI_ISL_402128 spike protein mRNA gc (1-1273)(N439K_D614G)
aggagacccgugacccggaaguuguacggcuacgcgacuuucccucccacaaacccucgcgcccuuccuuuccuacuugggcccggcagaaagcuuaccauguucguguuccugguccuccugccccuggugagcucccagugcgugaaccucaccacccgcacgcagcugccgcccgccuacaccaacagcuucacccggggcgucuacuaccccgacaagguguuccgcuccagcgugcugcacuccacccaggaccucuuccugcccuucuucagcaacgucacgugguuccacgccauccacguguccgggaccaacggcaccaagcgguucgacaacccggugcugcccuucaacgacggggucuacuucgcgagcaccgagaaguccaacaucauccgcggcuggaucuucgggacgacccucgacagcaagacccagucccugcugaucgugaacaacgccaccaacguggucaucaaggugugcgaguuccaguucugcaacgaccccuuccucggcguguacuaccacaagaacaacaagagcuggauggaguccgaguuccgggucuacagcuccgccaacaacugcacguucgaguacgugagccagcccuuccugauggaccuggagggcaagcaggggaacuucaagaaccuccgcgaguucguguucaagaacaucgacggcuacuucaagaucuacuccaagcacaccccgaucaaccugguccgggaccugccccagggguucagcgcccucgagccccugguggaccugcccaucggcaucaacaucacccgcuuccagacccuccuggcccugcaccgguccuaccucacgccgggggacagcagcuccggcuggaccgcgggcgccgccgccuacuacgugggguaccugcagccccgcaccuuccugcucaaguacaacgagaacggcaccaucacggacgcggucgacugcgcccuggacccccugagcgagaccaagugcacccucaaguccuucaccguggagaaggggaucuaccagacgagcaacuuccgggugcagcccaccgaguccaucguccgcuucccgaacaucaccaaccugugccccuucggcgagguguucaacgccacccgguucgccagcgucuacgccuggaaccgcaagcggaucuccaacugcguggcggacuacagcgugcuguacaacuccgccagcuucuccacguucaagugcuacggcgucagccccaccaagcucaacgaccugugcuucaccaacguguacgccgacuccuucgugauccgcggggacgagguccggcagaucgcccccggccagaccgggaagaucgccgacuacaacuacaagcugccggacgacuucacgggcugcgugaucgcguggaacagcaagaaccucgacuccaaggucgggggcaacuacaacuaccuguaccgccuguuccgcaagagcaaccucaagcccuucgagcgggacaucuccaccgagaucuaccaggccggcagcacccccugcaacgggguggagggcuucaacugcuacuucccccugcaguccuacggguuccagccgaccaacggcgugggguaccagcccuaccggguggucgugcugagcuucgagcuccugcacgcccccgccacggugugcggccccaagaaguccaccaaccuggucaagaacaagugcgugaacuucaacuucaacggccucaccgggaccggcgugcugaccgagagcaacaagaaguuccugccguuccagcaguucgggcgcgacaucgccgacacgaccgacgcgguccgcgacccccagacccuggagauccucgacaucacccccugcagcuucggcgggguguccgugaucacgccgggcaccaacaccagcaaccaggucgccgugcuguaccagggcgugaacugcaccgagguccccguggccauccacgccgaccagcugacgcccaccuggcggguguacuccaccggcagcaacgucuuccagacccgcgccgggugccucaucggcgcggagcacgugaacaacuccuacgagugcgacauccccaucggggccggcaucugcgccagcuaccagacgcagaccaacuccccgcggcgcgcccggagcguggcgucccagagcaucaucgccuacaccaugucccugggcgccgagaacagcgucgccuacuccaacaacagcaucgccauccccaccaacuucacgaucuccgugaccaccgagauccugcccgugagcaugaccaagacgagcgucgacugcaccauguacaucugcggggacuccaccgagugcagcaaccuccugcugcaguacggcuccuucugcacccagcucaaccgcgcgcugacggggaucgccguggagcaggacaagaacacccaggagguguucgcccaggucaagcagaucuacaagacgcccccgaucaaggacuucggcggguucaacuucagccagauccugcccgaccccuccaagcccagcaagcgguccuucaucgaggaccuccuguucaacaaggugacccuggccgacgccggcuucaucaagcaguacggcgacugccucggggacaucgcggcccgcgaccugaucugcgcccagaaguucaacggccugaccgugcucccgccccugcugaccgacgagaugaucgcccaguacaccagcgcccuccuggcggggaccaucacguccggcuggaccuucggggccggcgccgcccugcagauccccuucgcgaugcagauggccuaccgguucaacggcaucggggucacccagaacgugcucuacgagaaccagaagcugaucgccaaccaguucaacagcgccaucggcaagauccaggacucccugagcuccaccgccagcgcgcucgggaagcugcaggacguggucaaccagaacgcccaggcccugaacacgcucgugaagcagcuguccagcaacuucggcgccaucuccagcgugcugaacgacauccucucccgccuggacaaggucgaggccgaggugcagaucgaccggcugaucaccgggcgccuccagagccugcagaccuacgugacccagcagcugauccgggcggccgagauccgcgccagcgccaaccucgccgcgaccaagauguccgagugcguccugggccagagcaagcggguggacuucugcggcaagggguaccaccugauguccuucccccagagcgccccgcacggcguggucuuccuccacgugacguacguccccgcccaggagaagaacuucaccaccgcccccgcgaucugccacgacgggaaggcccacuucccccgcgagggcguguucguguccaacgggacccacugguucgucacgcagcggaacuucuacgagccgcagaucaucaccaccgacaacaccuucgugagcggcaacugcgacguggucaucggcaucgugaacaacacgguguacgacccccugcagcccgagcuggacuccuucaaggaggagcucgacaaguacuucaagaaccacaccagccccgacgucgaccugggggacaucuccggcaucaacgccagcguggugaacauccagaaggagaucgaccgccugaacgaggucgccaagaaccucaacgagucccugaucgaccugcaggagcucgggaaguacgagcaguacaucaaguggccgugguacaucuggcugggcuucaucgccggccugaucgcgaucgugauggugaccaucaugcucugcugcaugaccagcugcugcuccugccugaaggggugcugcagcugcggcuccugcugcaaguucgacgaggacgacagcgagcccguccugaagggggugaagcuccacuacacgugaggacuaguguccaccugucccuccugggcugcuggauugucucguuuuccugccaaauaaacaggaucagcgcuuuacagaucucaaaggcucuuuucagagccaccaaaaaaaaaaaaaaaaaaaaaaaaaaaaaaaaaaaaaaaaaaaaaaaaaaaaaaaaaaaaaaaaaaaaaaaaaaaaaaaaaaaaaaaaaaaaaaaaaaaaa

SEQ ID NO: 23853 - RNA, 4129 nt, Artificial Sequence
  SARS-CoV-2/Wuhan/WIV05/2019__EPI_ISL_402128 spike protein mRNA gc (1-1273)(S477N_D614G)
aggagacccgugacccggaaguuguacggcuacgcgacuuucccucccacaaacccucgcgcccuuccuuuccuacuugggcccggcagaaagcuuaccauguucguguuccugguccuccugccccuggugagcucccagugcgugaaccucaccacccgcacgcagcugccgcccgccuacaccaacagcuucacccggggcgucuacuaccccgacaagguguuccgcuccagcgugcugcacuccacccaggaccucuuccugcccuucuucagcaacgucacgugguuccacgccauccacguguccgggaccaacggcaccaagcgguucgacaacccggugcugcccuucaacgacggggucuacuucgcgagcaccgagaaguccaacaucauccgcggcuggaucuucgggacgacccucgacagcaagacccagucccugcugaucgugaacaacgccaccaacguggucaucaaggugugcgaguuccaguucugcaacgaccccuuccucggcguguacuaccacaagaacaacaagagcuggauggaguccgaguuccgggucuacagcuccgccaacaacugcacguucgaguacgugagccagcccuuccugauggaccuggagggcaagcaggggaacuucaagaaccuccgcgaguucguguucaagaacaucgacggcuacuucaagaucuacuccaagcacaccccgaucaaccugguccgggaccugccccagggguucagcgcccucgagccccugguggaccugcccaucggcaucaacaucacccgcuuccagacccuccuggcccugcaccgguccuaccucacgccgggggacagcagcuccggcuggaccgcgggcgccgccgccuacuacgugggguaccugcagccccgcaccuuccugcucaaguacaacgagaacggcaccaucacggacgcggucgacugcgcccuggacccccugagcgagaccaagugcacccucaaguccuucaccguggagaaggggaucuaccagacgagcaacuuccgggugcagcccaccgaguccaucguccgcuucccgaacaucaccaaccugugccccuucggcgagguguucaacgccacccgguucgccagcgucuacgccuggaaccgcaagcggaucuccaacugcguggcggacuacagcgugcuguacaacuccgccagcuucuccacguucaagugcuacggcgucagccccaccaagcucaacgaccugugcuucaccaacguguacgccgacuccuucgugauccgcggggacgagguccggcagaucgcccccggccagaccgggaagaucgccgacuacaacuacaagcugccggacgacuucacgggcugcgugaucgcguggaacagcaacaaccucgacuccaaggucgggggcaacuacaacuaccuguaccgccuguuccgcaagagcaaccucaagcccuucgagcgggacaucuccaccgagaucuaccaggccggcaacacccccugcaacgggguggagggcuucaacugcuacuucccccugcaguccuacggguuccagccgaccaacggcgugggguaccagcccuaccggguggucgugcugagcuucgagcuccugcacgcccccgccacggugugcggccccaagaaguccaccaaccuggucaagaacaagugcgugaacuucaacuucaacggccucaccgggaccggcgugcugaccgagagcaacaagaaguuccugccguuccagcaguucgggcgcgacaucgccgacacgaccgacgcgguccgcgacccccagacccuggagauccucgacaucacccccugcagcuucggcgggguguccgugaucacgccgggcaccaacaccagcaaccaggucgccgugcuguaccagggcgugaacugcaccgagguccccguggccauccacgccgaccagcugacgcccaccuggcggguguacuccaccggcagcaacgucuuccagacccgcgccgggugccucaucggcgcggagcacgugaacaacuccuacgagugcgacauccccaucggggccggcaucugcgccagcuaccagacgcagaccaacuccccgcggcgcgcccggagcguggcgucccagagcaucaucgccuacaccaugucccugggcgccgagaacagcgucgccuacuccaacaacagcaucgccauccccaccaacuucacgaucuccgugaccaccgagauccugcccgugagcaugaccaagacgagcgucgacugcaccauguacaucugcggggacuccaccgagugcagcaaccuccugcugcaguacggcuccuucugcacccagcucaaccgcgcgcugacggggaucgccguggagcaggacaagaacacccaggagguguucgcccaggucaagcagaucuacaagacgcccccgaucaaggacuucggcggguucaacuucagccagauccugcccgaccccuccaagcccagcaagcgguccuucaucgaggaccuccuguucaacaaggugacccuggccgacgccggcuucaucaagcaguacggcgacugccucggggacaucgcggcccgcgaccugaucugcgcccagaaguucaacggccugaccgugcucccgccccugcugaccgacgagaugaucgcccaguacaccagcgcccuccuggcggggaccaucacguccggcuggaccuucggggccggcgccgcccugcagauccccuucgcgaugcagauggccuaccgguucaacggcaucggggucacccagaacgugcucuacgagaaccagaagcugaucgccaaccaguucaacagcgccaucggcaagauccaggacucccugagcuccaccgccagcgcgcucgggaagcugcaggacguggucaaccagaacgcccaggcccugaacacgcucgugaagcagcuguccagcaacuucggcgccaucuccagcgugcugaacgacauccucucccgccuggacaaggucgaggccgaggugcagaucgaccggcugaucaccgggcgccuccagagccugcagaccuacgugacccagcagcugauccgggcggccgagauccgcgccagcgccaaccucgccgcgaccaagauguccgagugcguccugggccagagcaagcggguggacuucugcggcaagggguaccaccugauguccuucccccagagcgccccgcacggcguggucuuccuccacgugacguacguccccgcccaggagaagaacuucaccaccgcccccgcgaucugccacgacgggaaggcccacuucccccgcgagggcguguucguguccaacgggacccacugguucgucacgcagcggaacuucuacgagccgcagaucaucaccaccgacaacaccuucgugagcggcaacugcgacguggucaucggcaucgugaacaacacgguguacgacccccugcagcccgagcuggacuccuucaaggaggagcucgacaaguacuucaagaaccacaccagccccgacgucgaccugggggacaucuccggcaucaacgccagcguggugaacauccagaaggagaucgaccgccugaacgaggucgccaagaaccucaacgagucccugaucgaccugcaggagcucgggaaguacgagcaguacaucaaguggccgugguacaucuggcugggcuucaucgccggccugaucgcgaucgugauggugaccaucaugcucugcugcaugaccagcugcugcuccugccugaaggggugcugcagcugcggcuccugcugcaaguucgacgaggacgacagcgagcccguccugaagggggugaagcuccacuacacgugaggacuaguguccaccugucccuccugggcugcuggauugucucguuuuccugccaaauaaacaggaucagcgcuuuacagaucucaaaggcucuuuucagagccaccaaaaaaaaaaaaaaaaaaaaaaaaaaaaaaaaaaaaaaaaaaaaaaaaaaaaaaaaaaaaaaaaaaaaaaaaaaaaaaaaaaaaaaaaaaaaaaaaaaaaa

SEQ ID NO: 23854 - RNA, 4129 nt, Artificial Sequence
  SARS-CoV-2/Wuhan/WIV05/2019__EPI_ISL_402128 spike protein mRNA gc (1-1273)(N501Y_D614G)
aggagacccgugacccggaaguuguacggcuacgcgacuuucccucccacaaacccucgcgcccuuccuuuccuacuugggcccggcagaaagcuuaccauguucguguuccugguccuccugccccuggugagcucccagugcgugaaccucaccacccgcacgcagcugccgcccgccuacaccaacagcuucacccggggcgucuacuaccccgacaagguguuccgcuccagcgugcugcacuccacccaggaccucuuccugcccuucuucagcaacgucacgugguuccacgccauccacguguccgggaccaacggcaccaagcgguucgacaacccggugcugcccuucaacgacggggucuacuucgcgagcaccgagaaguccaacaucauccgcggcuggaucuucgggacgacccucgacagcaagacccagucccugcugaucgugaacaacgccaccaacguggucaucaaggugugcgaguuccaguucugcaacgaccccuuccucggcguguacuaccacaagaacaacaagagcuggauggaguccgaguuccgggucuacagcuccgccaacaacugcacguucgaguacgugagccagcccuuccugauggaccuggagggcaagcaggggaacuucaagaaccuccgcgaguucguguucaagaacaucgacggcuacuucaagaucuacuccaagcacaccccgaucaaccugguccgggaccugccccagggguucagcgcccucgagccccugguggaccugcccaucggcaucaacaucacccgcuuccagacccuccuggcccugcaccgguccuaccucacgccgggggacagcagcuccggcuggaccgcgggcgccgccgccuacuacgugggguaccugcagccccgcaccuuccugcucaaguacaacgagaacggcaccaucacggacgcggucgacugcgcccuggacccccugagcgagaccaagugcacccucaaguccuucaccguggagaaggggaucuaccagacgagcaacuuccgggugcagcccaccgaguccaucguccgcuucccgaacaucaccaaccugugccccuucggcgagguguucaacgccacccgguucgccagcgucuacgccuggaaccgcaagcggaucuccaacugcguggcggacuacagcgugcuguacaacuccgccagcuucuccacguucaagugcuacggcgucagccccaccaagcucaacgaccugugcuucaccaacguguacgccgacuccuucgugauccgcggggacgagguccggcagaucgcccccggccagaccgggaagaucgccgacuacaacuacaagcugccggacgacuucacgggcugcgugaucgcguggaacagcaacaaccucgacuccaaggucgggggcaacuacaacuaccuguaccgccuguuccgcaagagcaaccucaagcccuucgagcgggacaucuccaccgagaucuaccaggccggcagcacccccugcaacgggguggagggcuucaacugcuacuucccccugcaguccuacggguuccagccgaccuacggcgugggguaccagcccuaccggguggucgugcugagcuucgagcuccugcacgcccccgccacggugugcggccccaagaaguccaccaaccuggucaagaacaagugcgugaacuucaacuucaacggccucaccgggaccggcgugcugaccgagagcaacaagaaguuccugccguuccagcaguucgggcgcgacaucgccgacacgaccgacgcgguccgcgacccccagacccuggagauccucgacaucacccccugcagcuucggcgggguguccgugaucacgccgggcaccaacaccagcaaccaggucgccgugcuguaccagggcgugaacugcaccgagguccccguggccauccacgccgaccagcugacgcccaccuggcggguguacuccaccggcagcaacgucuuccagacccgcgccgggugccucaucggcgcggagcacgugaacaacuccuacgagugcgacauccccaucggggccggcaucugcgccagcuaccagacgcagaccaacuccccgcggcgcgcccggagcguggcgucccagagcaucaucgccuacaccaugucccugggcgccgagaacagcgucgccuacuccaacaacagcaucgccauccccaccaacuucacgaucuccgugaccaccgagauccugcccgugagcaugaccaagacgagcgucgacugcaccauguacaucugcggggacuccaccgagugcagcaaccuccugcugcaguacggcuccuucugcacccagcucaaccgcgcgcugacggggaucgccguggagcaggacaagaacacccaggagguguucgcccaggucaagcagaucuacaagacgcccccgaucaaggacuucggcggguucaacuucagccagauccugcccgaccccuccaagcccagcaagcgguccuucaucgaggaccuccuguucaacaaggugacccuggccgacgccggcuucaucaagcaguacggcgacugccucggggacaucgcggcccgcgaccugaucugcgcccagaaguucaacggccugaccgugcucccgccccugcugaccgacgagaugaucgcccaguacaccagcgcccuccuggcggggaccaucacguccggcuggaccuucggggccggcgccgcccugcagauccccuucgcgaugcagauggccuaccgguucaacggcaucggggucacccagaacgugcucuacgagaaccagaagcugaucgccaaccaguucaacagcgccaucggcaagauccaggacucccugagcuccaccgccagcgcgcucgggaagcugcaggacguggucaaccagaacgcccaggcccugaacacgcucgugaagcagcuguccagcaacuucggcgccaucuccagcgugcugaacgacauccucucccgccuggacaaggucgaggccgaggugcagaucgaccggcugaucaccgggcgccuccagagccugcagaccuacgugacccagcagcugauccgggcggccgagauccgcgccagcgccaaccucgccgcgaccaagauguccgagugcguccugggccagagcaagcggguggacuucugcggcaagggguaccaccugauguccuucccccagagcgccccgcacggcguggucuuccuccacgugacguacguccccgcccaggagaagaacuucaccaccgcccccgcgaucugccacgacgggaaggcccacuucccccgcgagggcguguucguguccaacgggacccacugguucgucacgcagcggaacuucuacgagccgcagaucaucaccaccgacaacaccuucgugagcggcaacugcgacguggucaucggcaucgugaacaacacgguguacgacccccugcagcccgagcuggacuccuucaaggaggagcucgacaaguacuucaagaaccacaccagccccgacgucgaccugggggacaucuccggcaucaacgccagcguggugaacauccagaaggagaucgaccgccugaacgaggucgccaagaaccucaacgagucccugaucgaccugcaggagcucgggaaguacgagcaguacaucaaguggccgugguacaucuggcugggcuucaucgccggccugaucgcgaucgugauggugaccaucaugcucugcugcaugaccagcugcugcuccugccugaaggggugcugcagcugcggcuccugcugcaaguucgacgaggacgacagcgagcccguccugaagggggugaagcuccacuacacgugaggacuaguguccaccugucccuccugggcugcuggauugucucguuuuccugccaaauaaacaggaucagcgcuuuacagaucucaaaggcucuuuucagagccaccaaaaaaaaaaaaaaaaaaaaaaaaaaaaaaaaaaaaaaaaaaaaaaaaaaaaaaaaaaaaaaaaaaaaaaaaaaaaaaaaaaaaaaaaaaaaaaaaaaaaa

SEQ ID NO: 23855 - RNA, 4123 nt, Artificial Sequence
  SARS-CoV-2/Wuhan/WIV05/2019__EPI_ISL_402128 spike protein mRNA gc (1-1273)(H69del_V70del_D614G)
aggagacccgugacccggaaguuguacggcuacgcgacuuucccucccacaaacccucgcgcccuuccuuuccuacuugggcccggcagaaagcuuaccauguucguguuccugguccuccugccccuggugagcucccagugcgugaaccucaccacccgcacgcagcugccgcccgccuacaccaacagcuucacccggggcgucuacuaccccgacaagguguuccgcuccagcgugcugcacuccacccaggaccucuuccugcccuucuucagcaacgucacgugguuccacgccaucuccgggaccaacggcaccaagcgguucgacaacccggugcugcccuucaacgacggggucuacuucgcgagcaccgagaaguccaacaucauccgcggcuggaucuucgggacgacccucgacagcaagacccagucccugcugaucgugaacaacgccaccaacguggucaucaaggugugcgaguuccaguucugcaacgaccccuuccucggcguguacuaccacaagaacaacaagagcuggauggaguccgaguuccgggucuacagcuccgccaacaacugcacguucgaguacgugagccagcccuuccugauggaccuggagggcaagcaggggaacuucaagaaccuccgcgaguucguguucaagaacaucgacggcuacuucaagaucuacuccaagcacaccccgaucaaccugguccgggaccugccccagggguucagcgcccucgagccccugguggaccugcccaucggcaucaacaucacccgcuuccagacccuccuggcccugcaccgguccuaccucacgccgggggacagcagcuccggcuggaccgcgggcgccgccgccuacuacgugggguaccugcagccccgcaccuuccugcucaaguacaacgagaacggcaccaucacggacgcggucgacugcgcccuggacccccugagcgagaccaagugcacccucaaguccuucaccguggagaaggggaucuaccagacgagcaacuuccgggugcagcccaccgaguccaucguccgcuucccgaacaucaccaaccugugccccuucggcgagguguucaacgccacccgguucgccagcgucuacgccuggaaccgcaagcggaucuccaacugcguggcggacuacagcgugcuguacaacuccgccagcuucuccacguucaagugcuacggcgucagccccaccaagcucaacgaccugugcuucaccaacguguacgccgacuccuucgugauccgcggggacgagguccggcagaucgcccccggccagaccgggaagaucgccgacuacaacuacaagcugccggacgacuucacgggcugcgugaucgcguggaacagcaacaaccucgacuccaaggucgggggcaacuacaacuaccuguaccgccuguuccgcaagagcaaccucaagcccuucgagcgggacaucuccaccgagaucuaccaggccggcagcacccccugcaacgggguggagggcuucaacugcuacuucccccugcaguccuacggguuccagccgaccaacggcgugggguaccagcccuaccggguggucgugcugagcuucgagcuccugcacgcccccgccacggugugcggccccaagaaguccaccaaccuggucaagaacaagugcgugaacuucaacuucaacggccucaccgggaccggcgugcugaccgagagcaacaagaaguuccugccguuccagcaguucgggcgcgacaucgccgacacgaccgacgcgguccgcgacccccagacccuggagauccucgacaucacccccugcagcuucggcgggguguccgugaucacgccgggcaccaacaccagcaaccaggucgccgugcuguaccagggcgugaacugcaccgagguccccguggccauccacgccgaccagcugacgcccaccuggcggguguacuccaccggcagcaacgucuuccagacccgcgccgggugccucaucggcgcggagcacgugaacaacuccuacgagugcgacauccccaucggggccggcaucugcgccagcuaccagacgcagaccaacuccccgcggcgcgcccggagcguggcgucccagagcaucaucgccuacaccaugucccugggcgccgagaacagcgucgccuacuccaacaacagcaucgccauccccaccaacuucacgaucuccgugaccaccgagauccugcccgugagcaugaccaagacgagcgucgacugcaccauguacaucugcggggacuccaccgagugcagcaaccuccugcugcaguacggcuccuucugcacccagcucaaccgcgcgcugacggggaucgccguggagcaggacaagaacacccaggagguguucgcccaggucaagcagaucuacaagacgcccccgaucaaggacuucggcggguucaacuucagccagauccugcccgaccccuccaagcccagcaagcgguccuucaucgaggaccuccuguucaacaaggugacccuggccgacgccggcuucaucaagcaguacggcgacugccucggggacaucgcggcccgcgaccugaucugcgcccagaaguucaacggccugaccgugcucccgccccugcugaccgacgagaugaucgcccaguacaccagcgcccuccuggcggggaccaucacguccggcuggaccuucggggccggcgccgcccugcagauccccuucgcgaugcagauggccuaccgguucaacggcaucggggucacccagaacgugcucuacgagaaccagaagcugaucgccaaccaguucaacagcgccaucggcaagauccaggacucccugagcuccaccgccagcgcgcucgggaagcugcaggacguggucaaccagaacgcccaggcccugaacacgcucgugaagcagcuguccagcaacuucggcgccaucuccagcgugcugaacgacauccucucccgccuggacaaggucgaggccgaggugcagaucgaccggcugaucaccgggcgccuccagagccugcagaccuacgugacccagcagcugauccgggcggccgagauccgcgccagcgccaaccucgccgcgaccaagauguccgagugcguccugggccagagcaagcggguggacuucugcggcaagggguaccaccugauguccuucccccagagcgccccgcacggcguggucuuccuccacgugacguacguccccgcccaggagaagaacuucaccaccgcccccgcgaucugccacgacgggaaggcccacuucccccgcgagggcguguucguguccaacgggacccacugguucgucacgcagcggaacuucuacgagccgcagaucaucaccaccgacaacaccuucgugagcggcaacugcgacguggucaucggcaucgugaacaacacgguguacgacccccugcagcccgagcuggacuccuucaaggaggagcucgacaaguacuucaagaaccacaccagccccgacgucgaccugggggacaucuccggcaucaacgccagcguggugaacauccagaaggagaucgaccgccugaacgaggucgccaagaaccucaacgagucccugaucgaccugcaggagcucgggaaguacgagcaguacaucaaguggccgugguacaucuggcugggcuucaucgccggccugaucgcgaucgugauggugaccaucaugcucugcugcaugaccagcugcugcuccugccugaaggggugcugcagcugcggcuccugcugcaaguucgacgaggacgacagcgagcccguccugaagggggugaagcuccacuacacgugaggacuaguguccaccugucccuccugggcugcuggauugucucguuuuccugccaaauaaacaggaucagcgcuuuacagaucucaaaggcucuuuucagagccaccaaaaaaaaaaaaaaaaaaaaaaaaaaaaaaaaaaaaaaaaaaaaaaaaaaaaaaaaaaaaaaaaaaaaaaaaaaaaaaaaaaaaaaaaaaaaaaaaaaaaa

SEQ ID NO: 23856 - RNA, 4129 nt, Artificial Sequence
  SARS-CoV-2/Wuhan/WIV05/2019__EPI_ISL_402128 spike protein mRNA gc (1-1273)(Y453F_D614G)
aggagacccgugacccggaaguuguacggcuacgcgacuuucccucccacaaacccucgcgcccuuccuuuccuacuugggcccggcagaaagcuuaccauguucguguuccugguccuccugccccuggugagcucccagugcgugaaccucaccacccgcacgcagcugccgcccgccuacaccaacagcuucacccggggcgucuacuaccccgacaagguguuccgcuccagcgugcugcacuccacccaggaccucuuccugcccuucuucagcaacgucacgugguuccacgccauccacguguccgggaccaacggcaccaagcgguucgacaacccggugcugcccuucaacgacggggucuacuucgcgagcaccgagaaguccaacaucauccgcggcuggaucuucgggacgacccucgacagcaagacccagucccugcugaucgugaacaacgccaccaacguggucaucaaggugugcgaguuccaguucugcaacgaccccuuccucggcguguacuaccacaagaacaacaagagcuggauggaguccgaguuccgggucuacagcuccgccaacaacugcacguucgaguacgugagccagcccuuccugauggaccuggagggcaagcaggggaacuucaagaaccuccgcgaguucguguucaagaacaucgacggcuacuucaagaucuacuccaagcacaccccgaucaaccugguccgggaccugccccagggguucagcgcccucgagccccugguggaccugcccaucggcaucaacaucacccgcuuccagacccuccuggcccugcaccgguccuaccucacgccgggggacagcagcuccggcuggaccgcgggcgccgccgccuacuacgugggguaccugcagccccgcaccuuccugcucaaguacaacgagaacggcaccaucacggacgcggucgacugcgcccuggacccccugagcgagaccaagugcacccucaaguccuucaccguggagaaggggaucuaccagacgagcaacuuccgggugcagcccaccgaguccaucguccgcuucccgaacaucaccaaccugugccccuucggcgagguguucaacgccacccgguucgccagcgucuacgccuggaaccgcaagcggaucuccaacugcguggcggacuacagcgugcuguacaacuccgccagcuucuccacguucaagugcuacggcgucagccccaccaagcucaacgaccugugcuucaccaacguguacgccgacuccuucgugauccgcggggacgagguccggcagaucgcccccggccagaccgggaagaucgccgacuacaacuacaagcugccggacgacuucacgggcugcgugaucgcguggaacagcaacaaccucgacuccaaggucgggggcaacuacaacuaccuguuccgccuguuccgcaagagcaaccucaagcccuucgagcgggacaucuccaccgagaucuaccaggccggcagcacccccugcaacgggguggagggcuucaacugcuacuucccccugcaguccuacggguuccagccgaccaacggcgugggguaccagcccuaccggguggucgugcugagcuucgagcuccugcacgcccccgccacggugugcggccccaagaaguccaccaaccuggucaagaacaagugcgugaacuucaacuucaacggccucaccgggaccggcgugcugaccgagagcaacaagaaguuccugccguuccagcaguucgggcgcgacaucgccgacacgaccgacgcgguccgcgacccccagacccuggagauccucgacaucacccccugcagcuucggcgggguguccgugaucacgccgggcaccaacaccagcaaccaggucgccgugcuguaccagggcgugaacugcaccgagguccccguggccauccacgccgaccagcugacgcccaccuggcggguguacuccaccggcagcaacgucuuccagacccgcgccgggugccucaucggcgcggagcacgugaacaacuccuacgagugcgacauccccaucggggccggcaucugcgccagcuaccagacgcagaccaacuccccgcggcgcgcccggagcguggcgucccagagcaucaucgccuacaccaugucccugggcgccgagaacagcgucgccuacuccaacaacagcaucgccauccccaccaacuucacgaucuccgugaccaccgagauccugcccgugagcaugaccaagacgagcgucgacugcaccauguacaucugcggggacuccaccgagugcagcaaccuccugcugcaguacggcuccuucugcacccagcucaaccgcgcgcugacggggaucgccguggagcaggacaagaacacccaggagguguucgcccaggucaagcagaucuacaagacgcccccgaucaaggacuucggcggguucaacuucagccagauccugcccgaccccuccaagcccagcaagcgguccuucaucgaggaccuccuguucaacaaggugacccuggccgacgccggcuucaucaagcaguacggcgacugccucggggacaucgcggcccgcgaccugaucugcgcccagaaguucaacggccugaccgugcucccgccccugcugaccgacgagaugaucgcccaguacaccagcgcccuccuggcggggaccaucacguccggcuggaccuucggggccggcgccgcccugcagauccccuucgcgaugcagauggccuaccgguucaacggcaucggggucacccagaacgugcucuacgagaaccagaagcugaucgccaaccaguucaacagcgccaucggcaagauccaggacucccugagcuccaccgccagcgcgcucgggaagcugcaggacguggucaaccagaacgcccaggcccugaacacgcucgugaagcagcuguccagcaacuucggcgccaucuccagcgugcugaacgacauccucucccgccuggacaaggucgaggccgaggugcagaucgaccggcugaucaccgggcgccuccagagccugcagaccuacgugacccagcagcugauccgggcggccgagauccgcgccagcgccaaccucgccgcgaccaagauguccgagugcguccugggccagagcaagcggguggacuucugcggcaagggguaccaccugauguccuucccccagagcgccccgcacggcguggucuuccuccacgugacguacguccccgcccaggagaagaacuucaccaccgcccccgcgaucugccacgacgggaaggcccacuucccccgcgagggcguguucguguccaacgggacccacugguucgucacgcagcggaacuucuacgagccgcagaucaucaccaccgacaacaccuucgugagcggcaacugcgacguggucaucggcaucgugaacaacacgguguacgacccccugcagcccgagcuggacuccuucaaggaggagcucgacaaguacuucaagaaccacaccagccccgacgucgaccugggggacaucuccggcaucaacgccagcguggugaacauccagaaggagaucgaccgccugaacgaggucgccaagaaccucaacgagucccugaucgaccugcaggagcucgggaaguacgagcaguacaucaaguggccgugguacaucuggcugggcuucaucgccggccugaucgcgaucgugauggugaccaucaugcucugcugcaugaccagcugcugcuccugccugaaggggugcugcagcugcggcuccugcugcaaguucgacgaggacgacagcgagcccguccugaagggggugaagcuccacuacacgugaggacuaguguccaccugucccuccugggcugcuggauugucucguuuuccugccaaauaaacaggaucagcgcuuuacagaucucaaaggcucuuuucagagccaccaaaaaaaaaaaaaaaaaaaaaaaaaaaaaaaaaaaaaaaaaaaaaaaaaaaaaaaaaaaaaaaaaaaaaaaaaaaaaaaaaaaaaaaaaaaaaaaaaaaaa

SEQ ID NO: 23857 - RNA, 4129 nt, Artificial Sequence
  SARS-CoV-2/Wuhan/WIV05/2019__EPI_ISL_402128 spike protein mRNA gc (1-1273)(D614G_I692V)
aggagacccgugacccggaaguuguacggcuacgcgacuuucccucccacaaacccucgcgcccuuccuuuccuacuugggcccggcagaaagcuuaccauguucguguuccugguccuccugccccuggugagcucccagugcgugaaccucaccacccgcacgcagcugccgcccgccuacaccaacagcuucacccggggcgucuacuaccccgacaagguguuccgcuccagcgugcugcacuccacccaggaccucuuccugcccuucuucagcaacgucacgugguuccacgccauccacguguccgggaccaacggcaccaagcgguucgacaacccggugcugcccuucaacgacggggucuacuucgcgagcaccgagaaguccaacaucauccgcggcuggaucuucgggacgacccucgacagcaagacccagucccugcugaucgugaacaacgccaccaacguggucaucaaggugugcgaguuccaguucugcaacgaccccuuccucggcguguacuaccacaagaacaacaagagcuggauggaguccgaguuccgggucuacagcuccgccaacaacugcacguucgaguacgugagccagcccuuccugauggaccuggagggcaagcaggggaacuucaagaaccuccgcgaguucguguucaagaacaucgacggcuacuucaagaucuacuccaagcacaccccgaucaaccugguccgggaccugccccagggguucagcgcccucgagccccugguggaccugcccaucggcaucaacaucacccgcuuccagacccuccuggcccugcaccgguccuaccucacgccgggggacagcagcuccggcuggaccgcgggcgccgccgccuacuacgugggguaccugcagccccgcaccuuccugcucaaguacaacgagaacggcaccaucacggacgcggucgacugcgcccuggacccccugagcgagaccaagugcacccucaaguccuucaccguggagaaggggaucuaccagacgagcaacuuccgggugcagcccaccgaguccaucguccgcuucccgaacaucaccaaccugugccccuucggcgagguguucaacgccacccgguucgccagcgucuacgccuggaaccgcaagcggaucuccaacugcguggcggacuacagcgugcuguacaacuccgccagcuucuccacguucaagugcuacggcgucagccccaccaagcucaacgaccugugcuucaccaacguguacgccgacuccuucgugauccgcggggacgagguccggcagaucgcccccggccagaccgggaagaucgccgacuacaacuacaagcugccggacgacuucacgggcugcgugaucgcguggaacagcaacaaccucgacuccaaggucgggggcaacuacaacuaccuguaccgccuguuccgcaagagcaaccucaagcccuucgagcgggacaucuccaccgagaucuaccaggccggcagcacccccugcaacgggguggagggcuucaacugcuacuucccccugcaguccuacggguuccagccgaccaacggcgugggguaccagcccuaccggguggucgugcugagcuucgagcuccugcacgcccccgccacggugugcggccccaagaaguccaccaaccuggucaagaacaagugcgugaacuucaacuucaacggccucaccgggaccggcgugcugaccgagagcaacaagaaguuccugccguuccagcaguucgggcgcgacaucgccgacacgaccgacgcgguccgcgacccccagacccuggagauccucgacaucacccccugcagcuucggcgggguguccgugaucacgccgggcaccaacaccagcaaccaggucgccgugcuguaccagggcgugaacugcaccgagguccccguggccauccacgccgaccagcugacgcccaccuggcggguguacuccaccggcagcaacgucuuccagacccgcgccgggugccucaucggcgcggagcacgugaacaacuccuacgagugcgacauccccaucggggccggcaucugcgccagcuaccagacgcagaccaacuccccgcggcgcgcccggagcguggcgucccagagcgucaucgccuacaccaugucccugggcgccgagaacagcgucgccuacuccaacaacagcaucgccauccccaccaacuucacgaucuccgugaccaccgagauccugcccgugagcaugaccaagacgagcgucgacugcaccauguacaucugcggggacuccaccgagugcagcaaccuccugcugcaguacggcuccuucugcacccagcucaaccgcgcgcugacggggaucgccguggagcaggacaagaacacccaggagguguucgcccaggucaagcagaucuacaagacgcccccgaucaaggacuucggcggguucaacuucagccagauccugcccgaccccuccaagcccagcaagcgguccuucaucgaggaccuccuguucaacaaggugacccuggccgacgccggcuucaucaagcaguacggcgacugccucggggacaucgcggcccgcgaccugaucugcgcccagaaguucaacggccugaccgugcucccgccccugcugaccgacgagaugaucgcccaguacaccagcgcccuccuggcggggaccaucacguccggcuggaccuucggggccggcgccgcccugcagauccccuucgcgaugcagauggccuaccgguucaacggcaucggggucacccagaacgugcucuacgagaaccagaagcugaucgccaaccaguucaacagcgccaucggcaagauccaggacucccugagcuccaccgccagcgcgcucgggaagcugcaggacguggucaaccagaacgcccaggcccugaacacgcucgugaagcagcuguccagcaacuucggcgccaucuccagcgugcugaacgacauccucucccgccuggacaaggucgaggccgaggugcagaucgaccggcugaucaccgggcgccuccagagccugcagaccuacgugacccagcagcugauccgggcggccgagauccgcgccagcgccaaccucgccgcgaccaagauguccgagugcguccugggccagagcaagcggguggacuucugcggcaagggguaccaccugauguccuucccccagagcgccccgcacggcguggucuuccuccacgugacguacguccccgcccaggagaagaacuucaccaccgcccccgcgaucugccacgacgggaaggcccacuucccccgcgagggcguguucguguccaacgggacccacugguucgucacgcagcggaacuucuacgagccgcagaucaucaccaccgacaacaccuucgugagcggcaacugcgacguggucaucggcaucgugaacaacacgguguacgacccccugcagcccgagcuggacuccuucaaggaggagcucgacaaguacuucaagaaccacaccagccccgacgucgaccugggggacaucuccggcaucaacgccagcguggugaacauccagaaggagaucgaccgccugaacgaggucgccaagaaccucaacgagucccugaucgaccugcaggagcucgggaaguacgagcaguacaucaaguggccgugguacaucuggcugggcuucaucgccggccugaucgcgaucgugauggugaccaucaugcucugcugcaugaccagcugcugcuccugccugaaggggugcugcagcugcggcuccugcugcaaguucgacgaggacgacagcgagcccguccugaagggggugaagcuccacuacacgugaggacuaguguccaccugucccuccugggcugcuggauugucucguuuuccugccaaauaaacaggaucagcgcuuuacagaucucaaaggcucuuuucagagccaccaaaaaaaaaaaaaaaaaaaaaaaaaaaaaaaaaaaaaaaaaaaaaaaaaaaaaaaaaaaaaaaaaaaaaaaaaaaaaaaaaaaaaaaaaaaaaaaaaaaaa

SEQ ID NO: 23858 - RNA, 4129 nt, Artificial Sequence
  SARS-CoV-2/Wuhan/WIV05/2019__EPI_ISL_402128 spike protein mRNA gc (1-1273)(D614G_M1229I)
aggagacccgugacccggaaguuguacggcuacgcgacuuucccucccacaaacccucgcgcccuuccuuuccuacuugggcccggcagaaagcuuaccauguucguguuccugguccuccugccccuggugagcucccagugcgugaaccucaccacccgcacgcagcugccgcccgccuacaccaacagcuucacccggggcgucuacuaccccgacaagguguuccgcuccagcgugcugcacuccacccaggaccucuuccugcccuucuucagcaacgucacgugguuccacgccauccacguguccgggaccaacggcaccaagcgguucgacaacccggugcugcccuucaacgacggggucuacuucgcgagcaccgagaaguccaacaucauccgcggcuggaucuucgggacgacccucgacagcaagacccagucccugcugaucgugaacaacgccaccaacguggucaucaaggugugcgaguuccaguucugcaacgaccccuuccucggcguguacuaccacaagaacaacaagagcuggauggaguccgaguuccgggucuacagcuccgccaacaacugcacguucgaguacgugagccagcccuuccugauggaccuggagggcaagcaggggaacuucaagaaccuccgcgaguucguguucaagaacaucgacggcuacuucaagaucuacuccaagcacaccccgaucaaccugguccgggaccugccccagggguucagcgcccucgagccccugguggaccugcccaucggcaucaacaucacccgcuuccagacccuccuggcccugcaccgguccuaccucacgccgggggacagcagcuccggcuggaccgcgggcgccgccgccuacuacgugggguaccugcagccccgcaccuuccugcucaaguacaacgagaacggcaccaucacggacgcggucgacugcgcccuggacccccugagcgagaccaagugcacccucaaguccuucaccguggagaaggggaucuaccagacgagcaacuuccgggugcagcccaccgaguccaucguccgcuucccgaacaucaccaaccugugccccuucggcgagguguucaacgccacccgguucgccagcgucuacgccuggaaccgcaagcggaucuccaacugcguggcggacuacagcgugcuguacaacuccgccagcuucuccacguucaagugcuacggcgucagccccaccaagcucaacgaccugugcuucaccaacguguacgccgacuccuucgugauccgcggggacgagguccggcagaucgcccccggccagaccgggaagaucgccgacuacaacuacaagcugccggacgacuucacgggcugcgugaucgcguggaacagcaacaaccucgacuccaaggucgggggcaacuacaacuaccuguaccgccuguuccgcaagagcaaccucaagcccuucgagcgggacaucuccaccgagaucuaccaggccggcagcacccccugcaacgggguggagggcuucaacugcuacuucccccugcaguccuacggguuccagccgaccaacggcgugggguaccagcccuaccggguggucgugcugagcuucgagcuccugcacgcccccgccacggugugcggccccaagaaguccaccaaccuggucaagaacaagugcgugaacuucaacuucaacggccucaccgggaccggcgugcugaccgagagcaacaagaaguuccugccguuccagcaguucgggcgcgacaucgccgacacgaccgacgcgguccgcgacccccagacccuggagauccucgacaucacccccugcagcuucggcgggguguccgugaucacgccgggcaccaacaccagcaaccaggucgccgugcuguaccagggcgugaacugcaccgagguccccguggccauccacgccgaccagcugacgcccaccuggcggguguacuccaccggcagcaacgucuuccagacccgcgccgggugccucaucggcgcggagcacgugaacaacuccuacgagugcgacauccccaucggggccggcaucugcgccagcuaccagacgcagaccaacuccccgcggcgcgcccggagcguggcgucccagagcaucaucgccuacaccaugucccugggcgccgagaacagcgucgccuacuccaacaacagcaucgccauccccaccaacuucacgaucuccgugaccaccgagauccugcccgugagcaugaccaagacgagcgucgacugcaccauguacaucugcggggacuccaccgagugcagcaaccuccugcugcaguacggcuccuucugcacccagcucaaccgcgcgcugacggggaucgccguggagcaggacaagaacacccaggagguguucgcccaggucaagcagaucuacaagacgcccccgaucaaggacuucggcggguucaacuucagccagauccugcccgaccccuccaagcccagcaagcgguccuucaucgaggaccuccuguucaacaaggugacccuggccgacgccggcuucaucaagcaguacggcgacugccucggggacaucgcggcccgcgaccugaucugcgcccagaaguucaacggccugaccgugcucccgccccugcugaccgacgagaugaucgcccaguacaccagcgcccuccuggcggggaccaucacguccggcuggaccuucggggccggcgccgcccugcagauccccuucgcgaugcagauggccuaccgguucaacggcaucggggucacccagaacgugcucuacgagaaccagaagcugaucgccaaccaguucaacagcgccaucggcaagauccaggacucccugagcuccaccgccagcgcgcucgggaagcugcaggacguggucaaccagaacgcccaggcccugaacacgcucgugaagcagcuguccagcaacuucggcgccaucuccagcgugcugaacgacauccucucccgccuggacaaggucgaggccgaggugcagaucgaccggcugaucaccgggcgccuccagagccugcagaccuacgugacccagcagcugauccgggcggccgagauccgcgccagcgccaaccucgccgcgaccaagauguccgagugcguccugggccagagcaagcggguggacuucugcggcaagggguaccaccugauguccuucccccagagcgccccgcacggcguggucuuccuccacgugacguacguccccgcccaggagaagaacuucaccaccgcccccgcgaucugccacgacgggaaggcccacuucccccgcgagggcguguucguguccaacgggacccacugguucgucacgcagcggaacuucuacgagccgcagaucaucaccaccgacaacaccuucgugagcggcaacugcgacguggucaucggcaucgugaacaacacgguguacgacccccugcagcccgagcuggacuccuucaaggaggagcucgacaaguacuucaagaaccacaccagccccgacgucgaccugggggacaucuccggcaucaacgccagcguggugaacauccagaaggagaucgaccgccugaacgaggucgccaagaaccucaacgagucccugaucgaccugcaggagcucgggaaguacgagcaguacaucaaguggccgugguacaucuggcugggcuucaucgccggccugaucgcgaucgugaucgugaccaucaugcucugcugcaugaccagcugcugcuccugccugaaggggugcugcagcugcggcuccugcugcaaguucgacgaggacgacagcgagcccguccugaagggggugaagcuccacuacacgugaggacuaguguccaccugucccuccugggcugcuggauugucucguuuuccugccaaauaaacaggaucagcgcuuuacagaucucaaaggcucuuuucagagccaccaaaaaaaaaaaaaaaaaaaaaaaaaaaaaaaaaaaaaaaaaaaaaaaaaaaaaaaaaaaaaaaaaaaaaaaaaaaaaaaaaaaaaaaaaaaaaaaaaaaaa

SEQ ID NO: 23859 - RNA, 4123 nt, Artificial Sequence
  SARS-CoV-2/Wuhan/WIV05/2019__EPI_ISL_402128 spike protein mRNA gc (1-1273)(H69del_V70del_A222V_Y453F_S477N_D614G_I692V)
aggagacccgugacccggaaguuguacggcuacgcgacuuucccucccacaaacccucgcgcccuuccuuuccuacuugggcccggcagaaagcuuaccauguucguguuccugguccuccugccccuggugagcucccagugcgugaaccucaccacccgcacgcagcugccgcccgccuacaccaacagcuucacccggggcgucuacuaccccgacaagguguuccgcuccagcgugcugcacuccacccaggaccucuuccugcccuucuucagcaacgucacgugguuccacgccaucuccgggaccaacggcaccaagcgguucgacaacccggugcugcccuucaacgacggggucuacuucgcgagcaccgagaaguccaacaucauccgcggcuggaucuucgggacgacccucgacagcaagacccagucccugcugaucgugaacaacgccaccaacguggucaucaaggugugcgaguuccaguucugcaacgaccccuuccucggcguguacuaccacaagaacaacaagagcuggauggaguccgaguuccgggucuacagcuccgccaacaacugcacguucgaguacgugagccagcccuuccugauggaccuggagggcaagcaggggaacuucaagaaccuccgcgaguucguguucaagaacaucgacggcuacuucaagaucuacuccaagcacaccccgaucaaccugguccgggaccugccccagggguucagcguccucgagccccugguggaccugcccaucggcaucaacaucacccgcuuccagacccuccuggcccugcaccgguccuaccucacgccgggggacagcagcuccggcuggaccgcgggcgccgccgccuacuacgugggguaccugcagccccgcaccuuccugcucaaguacaacgagaacggcaccaucacggacgcggucgacugcgcccuggacccccugagcgagaccaagugcacccucaaguccuucaccguggagaaggggaucuaccagacgagcaacuuccgggugcagcccaccgaguccaucguccgcuucccgaacaucaccaaccugugccccuucggcgagguguucaacgccacccgguucgccagcgucuacgccuggaaccgcaagcggaucuccaacugcguggcggacuacagcgugcuguacaacuccgccagcuucuccacguucaagugcuacggcgucagccccaccaagcucaacgaccugugcuucaccaacguguacgccgacuccuucgugauccgcggggacgagguccggcagaucgcccccggccagaccgggaagaucgccgacuacaacuacaagcugccggacgacuucacgggcugcgugaucgcguggaacagcaacaaccucgacuccaaggucgggggcaacuacaacuaccuguuccgccuguuccgcaagagcaaccucaagcccuucgagcgggacaucuccaccgagaucuaccaggccggcaacacccccugcaacgggguggagggcuucaacugcuacuucccccugcaguccuacggguuccagccgaccaacggcgugggguaccagcccuaccggguggucgugcugagcuucgagcuccugcacgcccccgccacggugugcggccccaagaaguccaccaaccuggucaagaacaagugcgugaacuucaacuucaacggccucaccgggaccggcgugcugaccgagagcaacaagaaguuccugccguuccagcaguucgggcgcgacaucgccgacacgaccgacgcgguccgcgacccccagacccuggagauccucgacaucacccccugcagcuucggcgggguguccgugaucacgccgggcaccaacaccagcaaccaggucgccgugcuguaccagggcgugaacugcaccgagguccccguggccauccacgccgaccagcugacgcccaccuggcggguguacuccaccggcagcaacgucuuccagacccgcgccgggugccucaucggcgcggagcacgugaacaacuccuacgagugcgacauccccaucggggccggcaucugcgccagcuaccagacgcagaccaacuccccgcggcgcgcccggagcguggcgucccagagcgucaucgccuacaccaugucccugggcgccgagaacagcgucgccuacuccaacaacagcaucgccauccccaccaacuucacgaucuccgugaccaccgagauccugcccgugagcaugaccaagacgagcgucgacugcaccauguacaucugcggggacuccaccgagugcagcaaccuccugcugcaguacggcuccuucugcacccagcucaaccgcgcgcugacggggaucgccguggagcaggacaagaacacccaggagguguucgcccaggucaagcagaucuacaagacgcccccgaucaaggacuucggcggguucaacuucagccagauccugcccgaccccuccaagcccagcaagcgguccuucaucgaggaccuccuguucaacaaggugacccuggccgacgccggcuucaucaagcaguacggcgacugccucggggacaucgcggcccgcgaccugaucugcgcccagaaguucaacggccugaccgugcucccgccccugcugaccgacgagaugaucgcccaguacaccagcgcccuccuggcggggaccaucacguccggcuggaccuucggggccggcgccgcccugcagauccccuucgcgaugcagauggccuaccgguucaacggcaucggggucacccagaacgugcucuacgagaaccagaagcugaucgccaaccaguucaacagcgccaucggcaagauccaggacucccugagcuccaccgccagcgcgcucgggaagcugcaggacguggucaaccagaacgcccaggcccugaacacgcucgugaagcagcuguccagcaacuucggcgccaucuccagcgugcugaacgacauccucucccgccuggacaaggucgaggccgaggugcagaucgaccggcugaucaccgggcgccuccagagccugcagaccuacgugacccagcagcugauccgggcggccgagauccgcgccagcgccaaccucgccgcgaccaagauguccgagugcguccugggccagagcaagcggguggacuucugcggcaagggguaccaccugauguccuucccccagagcgccccgcacggcguggucuuccuccacgugacguacguccccgcccaggagaagaacuucaccaccgcccccgcgaucugccacgacgggaaggcccacuucccccgcgagggcguguucguguccaacgggacccacugguucgucacgcagcggaacuucuacgagccgcagaucaucaccaccgacaacaccuucgugagcggcaacugcgacguggucaucggcaucgugaacaacacgguguacgacccccugcagcccgagcuggacuccuucaaggaggagcucgacaaguacuucaagaaccacaccagccccgacgucgaccugggggacaucuccggcaucaacgccagcguggugaacauccagaaggagaucgaccgccugaacgaggucgccaagaaccucaacgagucccugaucgaccugcaggagcucgggaaguacgagcaguacaucaaguggccgugguacaucuggcugggcuucaucgccggccugaucgcgaucgugauggugaccaucaugcucugcugcaugaccagcugcugcuccugccugaaggggugcugcagcugcggcuccugcugcaaguucgacgaggacgacagcgagcccguccugaagggggugaagcuccacuacacgugaggacuaguguccaccugucccuccugggcugcuggauugucucguuuuccugccaaauaaacaggaucagcgcuuuacagaucucaaaggcucuuuucagagccaccaaaaaaaaaaaaaaaaaaaaaaaaaaaaaaaaaaaaaaaaaaaaaaaaaaaaaaaaaaaaaaaaaaaaaaaaaaaaaaaaaaaaaaaaaaaaaaaaaaaaa

SEQ ID NO: 23860 - RNA, 4123 nt, Artificial Sequence
  SARS-CoV-2/Wuhan/WIV05/2019__EPI_ISL_402128 spike protein mRNA gc (1-1273)(H69del_V70del_Y453F_D614G_I692V_M1229I)
aggagacccgugacccggaaguuguacggcuacgcgacuuucccucccacaaacccucgcgcccuuccuuuccuacuugggcccggcagaaagcuuaccauguucguguuccugguccuccugccccuggugagcucccagugcgugaaccucaccacccgcacgcagcugccgcccgccuacaccaacagcuucacccggggcgucuacuaccccgacaagguguuccgcuccagcgugcugcacuccacccaggaccucuuccugcccuucuucagcaacgucacgugguuccacgccaucuccgggaccaacggcaccaagcgguucgacaacccggugcugcccuucaacgacggggucuacuucgcgagcaccgagaaguccaacaucauccgcggcuggaucuucgggacgacccucgacagcaagacccagucccugcugaucgugaacaacgccaccaacguggucaucaaggugugcgaguuccaguucugcaacgaccccuuccucggcguguacuaccacaagaacaacaagagcuggauggaguccgaguuccgggucuacagcuccgccaacaacugcacguucgaguacgugagccagcccuuccugauggaccuggagggcaagcaggggaacuucaagaaccuccgcgaguucguguucaagaacaucgacggcuacuucaagaucuacuccaagcacaccccgaucaaccugguccgggaccugccccagggguucagcgcccucgagccccugguggaccugcccaucggcaucaacaucacccgcuuccagacccuccuggcccugcaccgguccuaccucacgccgggggacagcagcuccggcuggaccgcgggcgccgccgccuacuacgugggguaccugcagccccgcaccuuccugcucaaguacaacgagaacggcaccaucacggacgcggucgacugcgcccuggacccccugagcgagaccaagugcacccucaaguccuucaccguggagaaggggaucuaccagacgagcaacuuccgggugcagcccaccgaguccaucguccgcuucccgaacaucaccaaccugugccccuucggcgagguguucaacgccacccgguucgccagcgucuacgccuggaaccgcaagcggaucuccaacugcguggcggacuacagcgugcuguacaacuccgccagcuucuccacguucaagugcuacggcgucagccccaccaagcucaacgaccugugcuucaccaacguguacgccgacuccuucgugauccgcggggacgagguccggcagaucgcccccggccagaccgggaagaucgccgacuacaacuacaagcugccggacgacuucacgggcugcgugaucgcguggaacagcaacaaccucgacuccaaggucgggggcaacuacaacuaccuguuccgccuguuccgcaagagcaaccucaagcccuucgagcgggacaucuccaccgagaucuaccaggccggcagcacccccugcaacgggguggagggcuucaacugcuacuucccccugcaguccuacggguuccagccgaccaacggcgugggguaccagcccuaccggguggucgugcugagcuucgagcuccugcacgcccccgccacggugugcggccccaagaaguccaccaaccuggucaagaacaagugcgugaacuucaacuucaacggccucaccgggaccggcgugcugaccgagagcaacaagaaguuccugccguuccagcaguucgggcgcgacaucgccgacacgaccgacgcgguccgcgacccccagacccuggagauccucgacaucacccccugcagcuucggcgggguguccgugaucacgccgggcaccaacaccagcaaccaggucgccgugcuguaccagggcgugaacugcaccgagguccccguggccauccacgccgaccagcugacgcccaccuggcggguguacuccaccggcagcaacgucuuccagacccgcgccgggugccucaucggcgcggagcacgugaacaacuccuacgagugcgacauccccaucggggccggcaucugcgccagcuaccagacgcagaccaacuccccgcggcgcgcccggagcguggcgucccagagcgugaucgccuacaccaugucccugggcgccgagaacagcgucgccuacuccaacaacagcaucgccauccccaccaacuucacgaucuccgugaccaccgagauccugcccgugagcaugaccaagacgagcgucgacugcaccauguacaucugcggggacuccaccgagugcagcaaccuccugcugcaguacggcuccuucugcacccagcucaaccgcgcgcugacggggaucgccguggagcaggacaagaacacccaggagguguucgcccaggucaagcagaucuacaagacgcccccgaucaaggacuucggcggguucaacuucagccagauccugcccgaccccuccaagcccagcaagcgguccuucaucgaggaccuccuguucaacaaggugacccuggccgacgccggcuucaucaagcaguacggcgacugccucggggacaucgcggcccgcgaccugaucugcgcccagaaguucaacggccugaccgugcucccgccccugcugaccgacgagaugaucgcccaguacaccagcgcccuccuggcggggaccaucacguccggcuggaccuucggggccggcgccgcccugcagauccccuucgcgaugcagauggccuaccgguucaacggcaucggggucacccagaacgugcucuacgagaaccagaagcugaucgccaaccaguucaacagcgccaucggcaagauccaggacucccugagcuccaccgccagcgcgcucgggaagcugcaggacguggucaaccagaacgcccaggcccugaacacgcucgugaagcagcuguccagcaacuucggcgccaucuccagcgugcugaacgacauccucucccgccuggacaaggucgaggccgaggugcagaucgaccggcugaucaccgggcgccuccagagccugcagaccuacgugacccagcagcugauccgggcggccgagauccgcgccagcgccaaccucgccgcgaccaagauguccgagugcguccugggccagagcaagcggguggacuucugcggcaagggguaccaccugauguccuucccccagagcgccccgcacggcguggucuuccuccacgugacguacguccccgcccaggagaagaacuucaccaccgcccccgcgaucugccacgacgggaaggcccacuucccccgcgagggcguguucguguccaacgggacccacugguucgucacgcagcggaacuucuacgagccgcagaucaucaccaccgacaacaccuucgugagcggcaacugcgacguggucaucggcaucgugaacaacacgguguacgacccccugcagcccgagcuggacuccuucaaggaggagcucgacaaguacuucaagaaccacaccagccccgacgucgaccugggggacaucuccggcaucaacgccagcguggugaacauccagaaggagaucgaccgccugaacgaggucgccaagaaccucaacgagucccugaucgaccugcaggagcucgggaaguacgagcaguacaucaaguggccgugguacaucuggcugggcuucaucgccggccugaucgcgaucgugaucgugaccaucaugcucugcugcaugaccagcugcugcuccugccugaaggggugcugcagcugcggcuccugcugcaaguucgacgaggacgacagcgagcccguccugaagggggugaagcuccacuacacgugaggacuaguguccaccugucccuccugggcugcuggauugucucguuuuccugccaaauaaacaggaucagcgcuuuacagaucucaaaggcucuuuucagagccaccaaaaaaaaaaaaaaaaaaaaaaaaaaaaaaaaaaaaaaaaaaaaaaaaaaaaaaaaaaaaaaaaaaaaaaaaaaaaaaaaaaaaaaaaaaaaaaaaaaaaa

SEQ ID NO: 23861 - RNA, 4120 nt, Artificial Sequence
  SARS-CoV-2/Wuhan/WIV05/2019__EPI_ISL_402128 spike protein mRNA gc (1-1273)(H69del_V70del_Y144del_N501Y_A570D_D614G_P681H_T716I_S982 A_D1118H)
aggagacccgugacccggaaguuguacggcuacgcgacuuucccucccacaaacccucgcgcccuuccuuuccuacuugggcccggcagaaagcuuaccauguucguguuccugguccuccugccccuggugagcucccagugcgugaaccucaccacccgcacgcagcugccgcccgccuacaccaacagcuucacccggggcgucuacuaccccgacaagguguuccgcuccagcgugcugcacuccacccaggaccucuuccugcccuucuucagcaacgucacgugguuccacgccaucuccgggaccaacggcaccaagcgguucgacaacccggugcugcccuucaacgacggggucuacuucgcgagcaccgagaaguccaacaucauccgcggcuggaucuucgggacgacccucgacagcaagacccagucccugcugaucgugaacaacgccaccaacguggucaucaaggugugcgaguuccaguucugcaacgaccccuuccucggcguguaccacaagaacaacaagagcuggauggaguccgaguuccgggucuacagcuccgccaacaacugcacguucgaguacgugagccagcccuuccugauggaccuggagggcaagcaggggaacuucaagaaccuccgcgaguucguguucaagaacaucgacggcuacuucaagaucuacuccaagcacaccccgaucaaccugguccgggaccugccccagggguucagcgcccucgagccccugguggaccugcccaucggcaucaacaucacccgcuuccagacccuccuggcccugcaccgguccuaccucacgccgggggacagcagcuccggcuggaccgcgggcgccgccgccuacuacgugggguaccugcagccccgcaccuuccugcucaaguacaacgagaacggcaccaucacggacgcggucgacugcgcccuggacccccugagcgagaccaagugcacccucaaguccuucaccguggagaaggggaucuaccagacgagcaacuuccgggugcagcccaccgaguccaucguccgcuucccgaacaucaccaaccugugccccuucggcgagguguucaacgccacccgguucgccagcgucuacgccuggaaccgcaagcggaucuccaacugcguggcggacuacagcgugcuguacaacuccgccagcuucuccacguucaagugcuacggcgucagccccaccaagcucaacgaccugugcuucaccaacguguacgccgacuccuucgugauccgcggggacgagguccggcagaucgcccccggccagaccgggaagaucgccgacuacaacuacaagcugccggacgacuucacgggcugcgugaucgcguggaacagcaacaaccucgacuccaaggucgggggcaacuacaacuaccuguaccgccuguuccgcaagagcaaccucaagcccuucgagcgggacaucuccaccgagaucuaccaggccggcagcacccccugcaacgggguggagggcuucaacugcuacuucccccugcaguccuacggguuccagccgaccuacggcgugggguaccagcccuaccggguggucgugcugagcuucgagcuccugcacgcccccgccacggugugcggccccaagaaguccaccaaccuggucaagaacaagugcgugaacuucaacuucaacggccucaccgggaccggcgugcugaccgagagcaacaagaaguuccugccguuccagcaguucgggcgcgacaucgacgacacgaccgacgcgguccgcgacccccagacccuggagauccucgacaucacccccugcagcuucggcgggguguccgugaucacgccgggcaccaacaccagcaaccaggucgccgugcuguaccagggcgugaacugcaccgagguccccguggccauccacgccgaccagcugacgcccaccuggcggguguacuccaccggcagcaacgucuuccagacccgcgccgggugccucaucggcgcggagcacgugaacaacuccuacgagugcgacauccccaucggggccggcaucugcgccagcuaccagacgcagaccaacucccaccggcgcgcccggagcguggcgucccagagcaucaucgccuacaccaugucccugggcgccgagaacagcgucgccuacuccaacaacagcaucgccauccccaucaacuucacgaucuccgugaccaccgagauccugcccgugagcaugaccaagacgagcgucgacugcaccauguacaucugcggggacuccaccgagugcagcaaccuccugcugcaguacggcuccuucugcacccagcucaaccgcgcgcugacggggaucgccguggagcaggacaagaacacccaggagguguucgcccaggucaagcagaucuacaagacgcccccgaucaaggacuucggcggguucaacuucagccagauccugcccgaccccuccaagcccagcaagcgguccuucaucgaggaccuccuguucaacaaggugacccuggccgacgccggcuucaucaagcaguacggcgacugccucggggacaucgcggcccgcgaccugaucugcgcccagaaguucaacggccugaccgugcucccgccccugcugaccgacgagaugaucgcccaguacaccagcgcccuccuggcggggaccaucacguccggcuggaccuucggggccggcgccgcccugcagauccccuucgcgaugcagauggccuaccgguucaacggcaucggggucacccagaacgugcucuacgagaaccagaagcugaucgccaaccaguucaacagcgccaucggcaagauccaggacucccugagcuccaccgccagcgcgcucgggaagcugcaggacguggucaaccagaacgcccaggcccugaacacgcucgugaagcagcuguccagcaacuucggcgccaucuccagcgugcugaacgacauccucgcccgccuggacaaggucgaggccgaggugcagaucgaccggcugaucaccgggcgccuccagagccugcagaccuacgugacccagcagcugauccgggcggccgagauccgcgccagcgccaaccucgccgcgaccaagauguccgagugcguccugggccagagcaagcggguggacuucugcggcaagggguaccaccugauguccuucccccagagcgccccgcacggcguggucuuccuccacgugacguacguccccgcccaggagaagaacuucaccaccgcccccgcgaucugccacgacgggaaggcccacuucccccgcgagggcguguucguguccaacgggacccacugguucgucacgcagcggaacuucuacgagccgcagaucaucaccacccacaacaccuucgugagcggcaacugcgacguggucaucggcaucgugaacaacacgguguacgacccccugcagcccgagcuggacuccuucaaggaggagcucgacaaguacuucaagaaccacaccagccccgacgucgaccugggggacaucuccggcaucaacgccagcguggugaacauccagaaggagaucgaccgccugaacgaggucgccaagaaccucaacgagucccugaucgaccugcaggagcucgggaaguacgagcaguacaucaaguggccgugguacaucuggcugggcuucaucgccggccugaucgcgaucgugauggugaccaucaugcucugcugcaugaccagcugcugcuccugccugaaggggugcugcagcugcggcuccugcugcaaguucgacgaggacgacagcgagcccguccugaagggggugaagcuccacuacacgugaggacuaguguccaccugucccuccugggcugcuggauugucucguuuuccugccaaauaaacaggaucagcgcuuuacagaucucaaaggcucuuuucagagccaccaaaaaaaaaaaaaaaaaaaaaaaaaaaaaaaaaaaaaaaaaaaaaaaaaaaaaaaaaaaaaaaaaaaaaaaaaaaaaaaaaaaaaaaaaaaaaaaaaaaaa

SEQ ID NO: 23862 - RNA, 4129 nt, Artificial Sequence
  SARS-CoV-2/Wuhan/WIV05/2019__EPI_ISL_402128 spike protein mRNA gc (1-1273)(K417N_E484K_N501Y_D614G)
aggagacccgugacccggaaguuguacggcuacgcgacuuucccucccacaaacccucgcgcccuuccuuuccuacuugggcccggcagaaagcuuaccauguucguguuccugguccuccugccccuggugagcucccagugcgugaaccucaccacccgcacgcagcugccgcccgccuacaccaacagcuucacccggggcgucuacuaccccgacaagguguuccgcuccagcgugcugcacuccacccaggaccucuuccugcccuucuucagcaacgucacgugguuccacgccauccacguguccgggaccaacggcaccaagcgguucgacaacccggugcugcccuucaacgacggggucuacuucgcgagcaccgagaaguccaacaucauccgcggcuggaucuucgggacgacccucgacagcaagacccagucccugcugaucgugaacaacgccaccaacguggucaucaaggugugcgaguuccaguucugcaacgaccccuuccucggcguguacuaccacaagaacaacaagagcuggauggaguccgaguuccgggucuacagcuccgccaacaacugcacguucgaguacgugagccagcccuuccugauggaccuggagggcaagcaggggaacuucaagaaccuccgcgaguucguguucaagaacaucgacggcuacuucaagaucuacuccaagcacaccccgaucaaccugguccgggaccugccccagggguucagcgcccucgagccccugguggaccugcccaucggcaucaacaucacccgcuuccagacccuccuggcccugcaccgguccuaccucacgccgggggacagcagcuccggcuggaccgcgggcgccgccgccuacuacgugggguaccugcagccccgcaccuuccugcucaaguacaacgagaacggcaccaucacggacgcggucgacugcgcccuggacccccugagcgagaccaagugcacccucaaguccuucaccguggagaaggggaucuaccagacgagcaacuuccgggugcagcccaccgaguccaucguccgcuucccgaacaucaccaaccugugccccuucggcgagguguucaacgccacccgguucgccagcgucuacgccuggaaccgcaagcggaucuccaacugcguggcggacuacagcgugcuguacaacuccgccagcuucuccacguucaagugcuacggcgucagccccaccaagcucaacgaccugugcuucaccaacguguacgccgacuccuucgugauccgcggggacgagguccggcagaucgcccccggccagaccgggaacaucgccgacuacaacuacaagcugccggacgacuucacgggcugcgugaucgcguggaacagcaacaaccucgacuccaaggucgggggcaacuacaacuaccuguaccgccuguuccgcaagagcaaccucaagcccuucgagcgggacaucuccaccgagaucuaccaggccggcagcacccccugcaacggggugaagggcuucaacugcuacuucccccugcaguccuacggguuccagccgaccuacggcgugggguaccagcccuaccggguggucgugcugagcuucgagcuccugcacgcccccgccacggugugcggccccaagaaguccaccaaccuggucaagaacaagugcgugaacuucaacuucaacggccucaccgggaccggcgugcugaccgagagcaacaagaaguuccugccguuccagcaguucgggcgcgacaucgccgacacgaccgacgcgguccgcgacccccagacccuggagauccucgacaucacccccugcagcuucggcgggguguccgugaucacgccgggcaccaacaccagcaaccaggucgccgugcuguaccagggcgugaacugcaccgagguccccguggccauccacgccgaccagcugacgcccaccuggcggguguacuccaccggcagcaacgucuuccagacccgcgccgggugccucaucggcgcggagcacgugaacaacuccuacgagugcgacauccccaucggggccggcaucugcgccagcuaccagacgcagaccaacuccccgcggcgcgcccggagcguggcgucccagagcaucaucgccuacaccaugucccugggcgccgagaacagcgucgccuacuccaacaacagcaucgccauccccaccaacuucacgaucuccgugaccaccgagauccugcccgugagcaugaccaagacgagcgucgacugcaccauguacaucugcggggacuccaccgagugcagcaaccuccugcugcaguacggcuccuucugcacccagcucaaccgcgcgcugacggggaucgccguggagcaggacaagaacacccaggagguguucgcccaggucaagcagaucuacaagacgcccccgaucaaggacuucggcggguucaacuucagccagauccugcccgaccccuccaagcccagcaagcgguccuucaucgaggaccuccuguucaacaaggugacccuggccgacgccggcuucaucaagcaguacggcgacugccucggggacaucgcggcccgcgaccugaucugcgcccagaaguucaacggccugaccgugcucccgccccugcugaccgacgagaugaucgcccaguacaccagcgcccuccuggcggggaccaucacguccggcuggaccuucggggccggcgccgcccugcagauccccuucgcgaugcagauggccuaccgguucaacggcaucggggucacccagaacgugcucuacgagaaccagaagcugaucgccaaccaguucaacagcgccaucggcaagauccaggacucccugagcuccaccgccagcgcgcucgggaagcugcaggacguggucaaccagaacgcccaggcccugaacacgcucgugaagcagcuguccagcaacuucggcgccaucuccagcgugcugaacgacauccucucccgccuggacaaggucgaggccgaggugcagaucgaccggcugaucaccgggcgccuccagagccugcagaccuacgugacccagcagcugauccgggcggccgagauccgcgccagcgccaaccucgccgcgaccaagauguccgagugcguccugggccagagcaagcggguggacuucugcggcaagggguaccaccugauguccuucccccagagcgccccgcacggcguggucuuccuccacgugacguacguccccgcccaggagaagaacuucaccaccgcccccgcgaucugccacgacgggaaggcccacuucccccgcgagggcguguucguguccaacgggacccacugguucgucacgcagcggaacuucuacgagccgcagaucaucaccaccgacaacaccuucgugagcggcaacugcgacguggucaucggcaucgugaacaacacgguguacgacccccugcagcccgagcuggacuccuucaaggaggagcucgacaaguacuucaagaaccacaccagccccgacgucgaccugggggacaucuccggcaucaacgccagcguggugaacauccagaaggagaucgaccgccugaacgaggucgccaagaaccucaacgagucccugaucgaccugcaggagcucgggaaguacgagcaguacaucaaguggccgugguacaucuggcugggcuucaucgccggccugaucgcgaucgugauggugaccaucaugcucugcugcaugaccagcugcugcuccugccugaaggggugcugcagcugcggcuccugcugcaaguucgacgaggacgacagcgagcccguccugaagggggugaagcuccacuacacgugaggacuaguguccaccugucccuccugggcugcuggauugucucguuuuccugccaaauaaacaggaucagcgcuuuacagaucucaaaggcucuuuucagagccaccaaaaaaaaaaaaaaaaaaaaaaaaaaaaaaaaaaaaaaaaaaaaaaaaaaaaaaaaaaaaaaaaaaaaaaaaaaaaaaaaaaaaaaaaaaaaaaaaaaaaa

SEQ ID NO: 23863 - RNA, 4120 nt, Artificial Sequence
  SARS-CoV-2/Wuhan/WIV05/2019__EPI_ISL_402128 spike protein mRNA gc (1-1273)(L18F_D80A_D215G_L242del_A243del_L244del_R246I_K417N_E484 K_N501Y_D614G_A701V)
aggagacccgugacccggaaguuguacggcuacgcgacuuucccucccacaaacccucgcgcccuuccuuuccuacuugggcccggcagaaagcuuaccauguucguguuccugguccuccugccccuggugagcucccagugcgugaacuucaccacccgcacgcagcugccgcccgccuacaccaacagcuucacccggggcgucuacuaccccgacaagguguuccgcuccagcgugcugcacuccacccaggaccucuuccugcccuucuucagcaacgucacgugguuccacgccauccacguguccgggaccaacggcaccaagcgguucgccaacccggugcugcccuucaacgacggggucuacuucgcgagcaccgagaaguccaacaucauccgcggcuggaucuucgggacgacccucgacagcaagacccagucccugcugaucgugaacaacgccaccaacguggucaucaaggugugcgaguuccaguucugcaacgaccccuuccucggcguguacuaccacaagaacaacaagagcuggauggaguccgaguuccgggucuacagcuccgccaacaacugcacguucgaguacgugagccagcccuuccugauggaccuggagggcaagcaggggaacuucaagaaccuccgcgaguucguguucaagaacaucgacggcuacuucaagaucuacuccaagcacaccccgaucaaccugguccggggccugccccagggguucagcgcccucgagccccugguggaccugcccaucggcaucaacaucacccgcuuccagacccuccacaucuccuaccucacgccgggggacagcagcuccggcuggaccgcgggcgccgccgccuacuacgugggguaccugcagccccgcaccuuccugcucaaguacaacgagaacggcaccaucacggacgcggucgacugcgcccuggacccccugagcgagaccaagugcacccucaaguccuucaccguggagaaggggaucuaccagacgagcaacuuccgggugcagcccaccgaguccaucguccgcuucccgaacaucaccaaccugugccccuucggcgagguguucaacgccacccgguucgccagcgucuacgccuggaaccgcaagcggaucuccaacugcguggcggacuacagcgugcuguacaacuccgccagcuucuccacguucaagugcuacggcgucagccccaccaagcucaacgaccugugcuucaccaacguguacgccgacuccuucgugauccgcggggacgagguccggcagaucgcccccggccagaccgggaacaucgccgacuacaacuacaagcugccggacgacuucacgggcugcgugaucgcguggaacagcaacaaccucgacuccaaggucgggggcaacuacaacuaccuguaccgccuguuccgcaagagcaaccucaagcccuucgagcgggacaucuccaccgagaucuaccaggccggcagcacccccugcaacggggugaagggcuucaacugcuacuucccccugcaguccuacggguuccagccgaccuacggcgugggguaccagcccuaccggguggucgugcugagcuucgagcuccugcacgcccccgccacggugugcggccccaagaaguccaccaaccuggucaagaacaagugcgugaacuucaacuucaacggccucaccgggaccggcgugcugaccgagagcaacaagaaguuccugccguuccagcaguucgggcgcgacaucgccgacacgaccgacgcgguccgcgacccccagacccuggagauccucgacaucacccccugcagcuucggcgggguguccgugaucacgccgggcaccaacaccagcaaccaggucgccgugcuguaccagggcgugaacugcaccgagguccccguggccauccacgccgaccagcugacgcccaccuggcggguguacuccaccggcagcaacgucuuccagacccgcgccgggugccucaucggcgcggagcacgugaacaacuccuacgagugcgacauccccaucggggccggcaucugcgccagcuaccagacgcagaccaacuccccgcggcgcgcccggagcguggcgucccagagcaucaucgccuacaccaugucccugggcguggagaacagcgucgccuacuccaacaacagcaucgccauccccaccaacuucacgaucuccgugaccaccgagauccugcccgugagcaugaccaagacgagcgucgacugcaccauguacaucugcggggacuccaccgagugcagcaaccuccugcugcaguacggcuccuucugcacccagcucaaccgcgcgcugacggggaucgccguggagcaggacaagaacacccaggagguguucgcccaggucaagcagaucuacaagacgcccccgaucaaggacuucggcggguucaacuucagccagauccugcccgaccccuccaagcccagcaagcgguccuucaucgaggaccuccuguucaacaaggugacccuggccgacgccggcuucaucaagcaguacggcgacugccucggggacaucgcggcccgcgaccugaucugcgcccagaaguucaacggccugaccgugcucccgccccugcugaccgacgagaugaucgcccaguacaccagcgcccuccuggcggggaccaucacguccggcuggaccuucggggccggcgccgcccugcagauccccuucgcgaugcagauggccuaccgguucaacggcaucggggucacccagaacgugcucuacgagaaccagaagcugaucgccaaccaguucaacagcgccaucggcaagauccaggacucccugagcuccaccgccagcgcgcucgggaagcugcaggacguggucaaccagaacgcccaggcccugaacacgcucgugaagcagcuguccagcaacuucggcgccaucuccagcgugcugaacgacauccucucccgccuggacaaggucgaggccgaggugcagaucgaccggcugaucaccgggcgccuccagagccugcagaccuacgugacccagcagcugauccgggcggccgagauccgcgccagcgccaaccucgccgcgaccaagauguccgagugcguccugggccagagcaagcggguggacuucugcggcaagggguaccaccugauguccuucccccagagcgccccgcacggcguggucuuccuccacgugacguacguccccgcccaggagaagaacuucaccaccgcccccgcgaucugccacgacgggaaggcccacuucccccgcgagggcguguucguguccaacgggacccacugguucgucacgcagcggaacuucuacgagccgcagaucaucaccaccgacaacaccuucgugagcggcaacugcgacguggucaucggcaucgugaacaacacgguguacgacccccugcagcccgagcuggacuccuucaaggaggagcucgacaaguacuucaagaaccacaccagccccgacgucgaccugggggacaucuccggcaucaacgccagcguggugaacauccagaaggagaucgaccgccugaacgaggucgccaagaaccucaacgagucccugaucgaccugcaggagcucgggaaguacgagcaguacaucaaguggccgugguacaucuggcugggcuucaucgccggccugaucgcgaucgugauggugaccaucaugcucugcugcaugaccagcugcugcuccugccugaaggggugcugcagcugcggcuccugcugcaaguucgacgaggacgacagcgagcccguccugaagggggugaagcuccacuacacgugaggacuaguguccaccugucccuccugggcugcuggauugucucguuuuccugccaaauaaacaggaucagcgcuuuacagaucucaaaggcucuuuucagagccaccaaaaaaaaaaaaaaaaaaaaaaaaaaaaaaaaaaaaaaaaaaaaaaaaaaaaaaaaaaaaaaaaaaaaaaaaaaaaaaaaaaaaaaaaaaaaaaaaaaaaa

SEQ ID NO: 23864 - RNA, 4129 nt, Artificial Sequence
  SARS-CoV-2/Wuhan/WIV05/2019__EPI_ISL_402128 spike protein mRNA gc (1-1273)(E484K_D614G)
aggagacccgugacccggaaguuguacggcuacgcgacuuucccucccacaaacccucgcgcccuuccuuuccuacuugggcccggcagaaagcuuaccauguucguguuccugguccuccugccccuggugagcucccagugcgugaaccucaccacccgcacgcagcugccgcccgccuacaccaacagcuucacccggggcgucuacuaccccgacaagguguuccgcuccagcgugcugcacuccacccaggaccucuuccugcccuucuucagcaacgucacgugguuccacgccauccacguguccgggaccaacggcaccaagcgguucgacaacccggugcugcccuucaacgacggggucuacuucgcgagcaccgagaaguccaacaucauccgcggcuggaucuucgggacgacccucgacagcaagacccagucccugcugaucgugaacaacgccaccaacguggucaucaaggugugcgaguuccaguucugcaacgaccccuuccucggcguguacuaccacaagaacaacaagagcuggauggaguccgaguuccgggucuacagcuccgccaacaacugcacguucgaguacgugagccagcccuuccugauggaccuggagggcaagcaggggaacuucaagaaccuccgcgaguucguguucaagaacaucgacggcuacuucaagaucuacuccaagcacaccccgaucaaccugguccgggaccugccccagggguucagcgcccucgagccccugguggaccugcccaucggcaucaacaucacccgcuuccagacccuccuggcccugcaccgguccuaccucacgccgggggacagcagcuccggcuggaccgcgggcgccgccgccuacuacgugggguaccugcagccccgcaccuuccugcucaaguacaacgagaacggcaccaucacggacgcggucgacugcgcccuggacccccugagcgagaccaagugcacccucaaguccuucaccguggagaaggggaucuaccagacgagcaacuuccgggugcagcccaccgaguccaucguccgcuucccgaacaucaccaaccugugccccuucggcgagguguucaacgccacccgguucgccagcgucuacgccuggaaccgcaagcggaucuccaacugcguggcggacuacagcgugcuguacaacuccgccagcuucuccacguucaagugcuacggcgucagccccaccaagcucaacgaccugugcuucaccaacguguacgccgacuccuucgugauccgcggggacgagguccggcagaucgcccccggccagaccgggaagaucgccgacuacaacuacaagcugccggacgacuucacgggcugcgugaucgcguggaacagcaacaaccucgacuccaaggucgggggcaacuacaacuaccuguaccgccuguuccgcaagagcaaccucaagcccuucgagcgggacaucuccaccgagaucuaccaggccggcagcacccccugcaacggggugaagggcuucaacugcuacuucccccugcaguccuacggguuccagccgaccaacggcgugggguaccagcccuaccggguggucgugcugagcuucgagcuccugcacgcccccgccacggugugcggccccaagaaguccaccaaccuggucaagaacaagugcgugaacuucaacuucaacggccucaccgggaccggcgugcugaccgagagcaacaagaaguuccugccguuccagcaguucgggcgcgacaucgccgacacgaccgacgcgguccgcgacccccagacccuggagauccucgacaucacccccugcagcuucggcgggguguccgugaucacgccgggcaccaacaccagcaaccaggucgccgugcuguaccagggcgugaacugcaccgagguccccguggccauccacgccgaccagcugacgcccaccuggcggguguacuccaccggcagcaacgucuuccagacccgcgccgggugccucaucggcgcggagcacgugaacaacuccuacgagugcgacauccccaucggggccggcaucugcgccagcuaccagacgcagaccaacuccccgcggcgcgcccggagcguggcgucccagagcaucaucgccuacaccaugucccugggcgccgagaacagcgucgccuacuccaacaacagcaucgccauccccaccaacuucacgaucuccgugaccaccgagauccugcccgugagcaugaccaagacgagcgucgacugcaccauguacaucugcggggacuccaccgagugcagcaaccuccugcugcaguacggcuccuucugcacccagcucaaccgcgcgcugacggggaucgccguggagcaggacaagaacacccaggagguguucgcccaggucaagcagaucuacaagacgcccccgaucaaggacuucggcggguucaacuucagccagauccugcccgaccccuccaagcccagcaagcgguccuucaucgaggaccuccuguucaacaaggugacccuggccgacgccggcuucaucaagcaguacggcgacugccucggggacaucgcggcccgcgaccugaucugcgcccagaaguucaacggccugaccgugcucccgccccugcugaccgacgagaugaucgcccaguacaccagcgcccuccuggcggggaccaucacguccggcuggaccuucggggccggcgccgcccugcagauccccuucgcgaugcagauggccuaccgguucaacggcaucggggucacccagaacgugcucuacgagaaccagaagcugaucgccaaccaguucaacagcgccaucggcaagauccaggacucccugagcuccaccgccagcgcgcucgggaagcugcaggacguggucaaccagaacgcccaggcccugaacacgcucgugaagcagcuguccagcaacuucggcgccaucuccagcgugcugaacgacauccucucccgccuggacaaggucgaggccgaggugcagaucgaccggcugaucaccgggcgccuccagagccugcagaccuacgugacccagcagcugauccgggcggccgagauccgcgccagcgccaaccucgccgcgaccaagauguccgagugcguccugggccagagcaagcggguggacuucugcggcaagggguaccaccugauguccuucccccagagcgccccgcacggcguggucuuccuccacgugacguacguccccgcccaggagaagaacuucaccaccgcccccgcgaucugccacgacgggaaggcccacuucccccgcgagggcguguucguguccaacgggacccacugguucgucacgcagcggaacuucuacgagccgcagaucaucaccaccgacaacaccuucgugagcggcaacugcgacguggucaucggcaucgugaacaacacgguguacgacccccugcagcccgagcuggacuccuucaaggaggagcucgacaaguacuucaagaaccacaccagccccgacgucgaccugggggacaucuccggcaucaacgccagcguggugaacauccagaaggagaucgaccgccugaacgaggucgccaagaaccucaacgagucccugaucgaccugcaggagcucgggaaguacgagcaguacaucaaguggccgugguacaucuggcugggcuucaucgccggccugaucgcgaucgugauggugaccaucaugcucugcugcaugaccagcugcugcuccugccugaaggggugcugcagcugcggcuccugcugcaaguucgacgaggacgacagcgagcccguccugaagggggugaagcuccacuacacgugaggacuaguguccaccugucccuccugggcugcuggauugucucguuuuccugccaaauaaacaggaucagcgcuuuacagaucucaaaggcucuuuucagagccaccaaaaaaaaaaaaaaaaaaaaaaaaaaaaaaaaaaaaaaaaaaaaaaaaaaaaaaaaaaaaaaaaaaaaaaaaaaaaaaaaaaaaaaaaaaaaaaaaaaaaa

SEQ ID NO: 23865 - RNA, 4129 nt, Artificial Sequence
  SARS-CoV-2/Wuhan/WIV05/2019__EPI_ISL_402128 spike protein mRNA gc (1-1273)(L18F_T20N_P26S_D138Y_R190S_K417T_E484K_N501Y_D614G_H655Y _T1027I)
aggagacccgugacccggaaguuguacggcuacgcgacuuucccucccacaaacccucgcgcccuuccuuuccuacuugggcccggcagaaagcuuaccauguucguguuccugguccuccugccccuggugagcucccagugcgugaacuucaccaaccgcacgcagcugccgagcgccuacaccaacagcuucacccggggcgucuacuaccccgacaagguguuccgcuccagcgugcugcacuccacccaggaccucuuccugcccuucuucagcaacgucacgugguuccacgccauccacguguccgggaccaacggcaccaagcgguucgacaacccggugcugcccuucaacgacggggucuacuucgcgagcaccgagaaguccaacaucauccgcggcuggaucuucgggacgacccucgacagcaagacccagucccugcugaucgugaacaacgccaccaacguggucaucaaggugugcgaguuccaguucugcaacuaccccuuccucggcguguacuaccacaagaacaacaagagcuggauggaguccgaguuccgggucuacagcuccgccaacaacugcacguucgaguacgugagccagcccuuccugauggaccuggagggcaagcaggggaacuucaagaaccucagcgaguucguguucaagaacaucgacggcuacuucaagaucuacuccaagcacaccccgaucaaccugguccgggaccugccccagggguucagcgcccucgagccccugguggaccugcccaucggcaucaacaucacccgcuuccagacccuccuggcccugcaccgguccuaccucacgccgggggacagcagcuccggcuggaccgcgggcgccgccgccuacuacgugggguaccugcagccccgcaccuuccugcucaaguacaacgagaacggcaccaucacggacgcggucgacugcgcccuggacccccugagcgagaccaagugcacccucaaguccuucaccguggagaaggggaucuaccagacgagcaacuuccgggugcagcccaccgaguccaucguccgcuucccgaacaucaccaaccugugccccuucggcgagguguucaacgccacccgguucgccagcgucuacgccuggaaccgcaagcggaucuccaacugcguggcggacuacagcgugcuguacaacuccgccagcuucuccacguucaagugcuacggcgucagccccaccaagcucaacgaccugugcuucaccaacguguacgccgacuccuucgugauccgcggggacgagguccggcagaucgcccccggccagaccgggaccaucgccgacuacaacuacaagcugccggacgacuucacgggcugcgugaucgcguggaacagcaacaaccucgacuccaaggucgggggcaacuacaacuaccuguaccgccuguuccgcaagagcaaccucaagcccuucgagcgggacaucuccaccgagaucuaccaggccggcagcacccccugcaacggggugaagggcuucaacugcuacuucccccugcaguccuacggguuccagccgaccuacggcgugggguaccagcccuaccggguggucgugcugagcuucgagcuccugcacgcccccgccacggugugcggccccaagaaguccaccaaccuggucaagaacaagugcgugaacuucaacuucaacggccucaccgggaccggcgugcugaccgagagcaacaagaaguuccugccguuccagcaguucgggcgcgacaucgccgacacgaccgacgcgguccgcgacccccagacccuggagauccucgacaucacccccugcagcuucggcgggguguccgugaucacgccgggcaccaacaccagcaaccaggucgccgugcuguaccagggcgugaacugcaccgagguccccguggccauccacgccgaccagcugacgcccaccuggcggguguacuccaccggcagcaacgucuuccagacccgcgccgggugccucaucggcgcggaguacgugaacaacuccuacgagugcgacauccccaucggggccggcaucugcgccagcuaccagacgcagaccaacuccccgcggcgcgcccggagcguggcgucccagagcaucaucgccuacaccaugucccugggcgccgagaacagcgucgccuacuccaacaacagcaucgccauccccaccaacuucacgaucuccgugaccaccgagauccugcccgugagcaugaccaagacgagcgucgacugcaccauguacaucugcggggacuccaccgagugcagcaaccuccugcugcaguacggcuccuucugcacccagcucaaccgcgcgcugacggggaucgccguggagcaggacaagaacacccaggagguguucgcccaggucaagcagaucuacaagacgcccccgaucaaggacuucggcggguucaacuucagccagauccugcccgaccccuccaagcccagcaagcgguccuucaucgaggaccuccuguucaacaaggugacccuggccgacgccggcuucaucaagcaguacggcgacugccucggggacaucgcggcccgcgaccugaucugcgcccagaaguucaacggccugaccgugcucccgccccugcugaccgacgagaugaucgcccaguacaccagcgcccuccuggcggggaccaucacguccggcuggaccuucggggccggcgccgcccugcagauccccuucgcgaugcagauggccuaccgguucaacggcaucggggucacccagaacgugcucuacgagaaccagaagcugaucgccaaccaguucaacagcgccaucggcaagauccaggacucccugagcuccaccgccagcgcgcucgggaagcugcaggacguggucaaccagaacgcccaggcccugaacacgcucgugaagcagcuguccagcaacuucggcgccaucuccagcgugcugaacgacauccucucccgccuggacaaggucgaggccgaggugcagaucgaccggcugaucaccgggcgccuccagagccugcagaccuacgugacccagcagcugauccgggcggccgagauccgcgccagcgccaaccucgccgcgaucaagauguccgagugcguccugggccagagcaagcggguggacuucugcggcaagggguaccaccugauguccuucccccagagcgccccgcacggcguggucuuccuccacgugacguacguccccgcccaggagaagaacuucaccaccgcccccgcgaucugccacgacgggaaggcccacuucccccgcgagggcguguucguguccaacgggacccacugguucgucacgcagcggaacuucuacgagccgcagaucaucaccaccgacaacaccuucgugagcggcaacugcgacguggucaucggcaucgugaacaacacgguguacgacccccugcagcccgagcuggacuccuucaaggaggagcucgacaaguacuucaagaaccacaccagccccgacgucgaccugggggacaucuccggcaucaacgccagcguggugaacauccagaaggagaucgaccgccugaacgaggucgccaagaaccucaacgagucccugaucgaccugcaggagcucgggaaguacgagcaguacaucaaguggccgugguacaucuggcugggcuucaucgccggccugaucgcgaucgugauggugaccaucaugcucugcugcaugaccagcugcugcuccugccugaaggggugcugcagcugcggcuccugcugcaaguucgacgaggacgacagcgagcccguccugaagggggugaagcuccacuacacgugaggacuaguguccaccugucccuccugggcugcuggauugucucguuuuccugccaaauaaacaggaucagcgcuuuacagaucucaaaggcucuuuucagagccaccaaaaaaaaaaaaaaaaaaaaaaaaaaaaaaaaaaaaaaaaaaaaaaaaaaaaaaaaaaaaaaaaaaaaaaaaaaaaaaaaaaaaaaaaaaaaaaaaaaaaa

SEQ ID NO: 23866 - RNA, 4129 nt, Artificial Sequence
  SARS-CoV-2/Wuhan/WIV05/2019__EPI_ISL_402128 spike protein mRNA gc (1-1273)(S13I_W152C_L452R_D614G)
aggagacccgugacccggaaguuguacggcuacgcgacuuucccucccacaaacccucgcgcccuuccuuuccuacuugggcccggcagaaagcuuaccauguucguguuccugguccuccugccccuggugagcauccagugcgugaaccucaccacccgcacgcagcugccgcccgccuacaccaacagcuucacccggggcgucuacuaccccgacaagguguuccgcuccagcgugcugcacuccacccaggaccucuuccugcccuucuucagcaacgucacgugguuccacgccauccacguguccgggaccaacggcaccaagcgguucgacaacccggugcugcccuucaacgacggggucuacuucgcgagcaccgagaaguccaacaucauccgcggcuggaucuucgggacgacccucgacagcaagacccagucccugcugaucgugaacaacgccaccaacguggucaucaaggugugcgaguuccaguucugcaacgaccccuuccucggcguguacuaccacaagaacaacaagagcugcauggaguccgaguuccgggucuacagcuccgccaacaacugcacguucgaguacgugagccagcccuuccugauggaccuggagggcaagcaggggaacuucaagaaccuccgcgaguucguguucaagaacaucgacggcuacuucaagaucuacuccaagcacaccccgaucaaccugguccgggaccugccccagggguucagcgcccucgagccccugguggaccugcccaucggcaucaacaucacccgcuuccagacccuccuggcccugcaccgguccuaccucacgccgggggacagcagcuccggcuggaccgcgggcgccgccgccuacuacgugggguaccugcagccccgcaccuuccugcucaaguacaacgagaacggcaccaucacggacgcggucgacugcgcccuggacccccugagcgagaccaagugcacccucaaguccuucaccguggagaaggggaucuaccagacgagcaacuuccgggugcagcccaccgaguccaucguccgcuucccgaacaucaccaaccugugccccuucggcgagguguucaacgccacccgguucgccagcgucuacgccuggaaccgcaagcggaucuccaacugcguggcggacuacagcgugcuguacaacuccgccagcuucuccacguucaagugcuacggcgucagccccaccaagcucaacgaccugugcuucaccaacguguacgccgacuccuucgugauccgcggggacgagguccggcagaucgcccccggccagaccgggaagaucgccgacuacaacuacaagcugccggacgacuucacgggcugcgugaucgcguggaacagcaacaaccucgacuccaaggucgggggcaacuacaacuaccgcuaccgccuguuccgcaagagcaaccucaagcccuucgagcgggacaucuccaccgagaucuaccaggccggcagcacccccugcaacgggguggagggcuucaacugcuacuucccccugcaguccuacggguuccagccgaccaacggcgugggguaccagcccuaccggguggucgugcugagcuucgagcuccugcacgcccccgccacggugugcggccccaagaaguccaccaaccuggucaagaacaagugcgugaacuucaacuucaacggccucaccgggaccggcgugcugaccgagagcaacaagaaguuccugccguuccagcaguucgggcgcgacaucgccgacacgaccgacgcgguccgcgacccccagacccuggagauccucgacaucacccccugcagcuucggcgggguguccgugaucacgccgggcaccaacaccagcaaccaggucgccgugcuguaccagggcgugaacugcaccgagguccccguggccauccacgccgaccagcugacgcccaccuggcggguguacuccaccggcagcaacgucuuccagacccgcgccgggugccucaucggcgcggagcacgugaacaacuccuacgagugcgacauccccaucggggccggcaucugcgccagcuaccagacgcagaccaacuccccgcggcgcgcccggagcguggcgucccagagcaucaucgccuacaccaugucccugggcgccgagaacagcgucgccuacuccaacaacagcaucgccauccccaccaacuucacgaucuccgugaccaccgagauccugcccgugagcaugaccaagacgagcgucgacugcaccauguacaucugcggggacuccaccgagugcagcaaccuccugcugcaguacggcuccuucugcacccagcucaaccgcgcgcugacggggaucgccguggagcaggacaagaacacccaggagguguucgcccaggucaagcagaucuacaagacgcccccgaucaaggacuucggcggguucaacuucagccagauccugcccgaccccuccaagcccagcaagcgguccuucaucgaggaccuccuguucaacaaggugacccuggccgacgccggcuucaucaagcaguacggcgacugccucggggacaucgcggcccgcgaccugaucugcgcccagaaguucaacggccugaccgugcucccgccccugcugaccgacgagaugaucgcccaguacaccagcgcccuccuggcggggaccaucacguccggcuggaccuucggggccggcgccgcccugcagauccccuucgcgaugcagauggccuaccgguucaacggcaucggggucacccagaacgugcucuacgagaaccagaagcugaucgccaaccaguucaacagcgccaucggcaagauccaggacucccugagcuccaccgccagcgcgcucgggaagcugcaggacguggucaaccagaacgcccaggcccugaacacgcucgugaagcagcuguccagcaacuucggcgccaucuccagcgugcugaacgacauccucucccgccuggacaaggucgaggccgaggugcagaucgaccggcugaucaccgggcgccuccagagccugcagaccuacgugacccagcagcugauccgggcggccgagauccgcgccagcgccaaccucgccgcgaccaagauguccgagugcguccugggccagagcaagcggguggacuucugcggcaagggguaccaccugauguccuucccccagagcgccccgcacggcguggucuuccuccacgugacguacguccccgcccaggagaagaacuucaccaccgcccccgcgaucugccacgacgggaaggcccacuucccccgcgagggcguguucguguccaacgggacccacugguucgucacgcagcggaacuucuacgagccgcagaucaucaccaccgacaacaccuucgugagcggcaacugcgacguggucaucggcaucgugaacaacacgguguacgacccccugcagcccgagcuggacuccuucaaggaggagcucgacaaguacuucaagaaccacaccagccccgacgucgaccugggggacaucuccggcaucaacgccagcguggugaacauccagaaggagaucgaccgccugaacgaggucgccaagaaccucaacgagucccugaucgaccugcaggagcucgggaaguacgagcaguacaucaaguggccgugguacaucuggcugggcuucaucgccggccugaucgcgaucgugauggugaccaucaugcucugcugcaugaccagcugcugcuccugccugaaggggugcugcagcugcggcuccugcugcaaguucgacgaggacgacagcgagcccguccugaagggggugaagcuccacuacacgugaggacuaguguccaccugucccuccugggcugcuggauugucucguuuuccugccaaauaaacaggaucagcgcuuuacagaucucaaaggcucuuuucagagccaccaaaaaaaaaaaaaaaaaaaaaaaaaaaaaaaaaaaaaaaaaaaaaaaaaaaaaaaaaaaaaaaaaaaaaaaaaaaaaaaaaaaaaaaaaaaaaaaaaaaaa

SEQ ID NO: 23867 - RNA, 4129 nt, Artificial Sequence; identical to SEQ ID NO: 23849
  SARS-CoV-2/Wuhan/WIV05/2019__EPI_ISL_402128 spike protein mRNA gc (1-1273)

SEQ ID NO: 23868 - RNA, 4129 nt, Artificial Sequence
  SARS-CoV-2/Wuhan/WIV05/2019__EPI_ISL_402128 spike protein mRNA gc (1-1273)(D614G)
aggagacccgugacccggaaguuguacggcuacgcgacuuucccucccacaaacccucgcgcccuuccuuuccuacuugggcccggcagaaagcuuaccauguucguguuccugguccuccugccccuggugagcucccagugcgugaaccucaccacccgcacgcagcugccgcccgccuacaccaacagcuucacccggggcgucuacuaccccgacaagguguuccgcuccagcgugcugcacuccacccaggaccucuuccugcccuucuucagcaacgucacgugguuccacgccauccacguguccgggaccaacggcaccaagcgguucgacaacccggugcugcccuucaacgacggggucuacuucgcgagcaccgagaaguccaacaucauccgcggcuggaucuucgggacgacccucgacagcaagacccagucccugcugaucgugaacaacgccaccaacguggucaucaaggugugcgaguuccaguucugcaacgaccccuuccucggcguguacuaccacaagaacaacaagagcuggauggaguccgaguuccgggucuacagcuccgccaacaacugcacguucgaguacgugagccagcccuuccugauggaccuggagggcaagcaggggaacuucaagaaccuccgcgaguucguguucaagaacaucgacggcuacuucaagaucuacuccaagcacaccccgaucaaccugguccgggaccugccccagggguucagcgcccucgagccccugguggaccugcccaucggcaucaacaucacccgcuuccagacccuccuggcccugcaccgguccuaccucacgccgggggacagcagcuccggcuggaccgcgggcgccgccgccuacuacgugggguaccugcagccccgcaccuuccugcucaaguacaacgagaacggcaccaucacggacgcggucgacugcgcccuggacccccugagcgagaccaagugcacccucaaguccuucaccguggagaaggggaucuaccagacgagcaacuuccgggugcagcccaccgaguccaucguccgcuucccgaacaucaccaaccugugccccuucggcgagguguucaacgccacccgguucgccagcgucuacgccuggaaccgcaagcggaucuccaacugcguggcggacuacagcgugcuguacaacuccgccagcuucuccacguucaagugcuacggcgucagccccaccaagcucaacgaccugugcuucaccaacguguacgccgacuccuucgugauccgcggggacgagguccggcagaucgcccccggccagaccgggaagaucgccgacuacaacuacaagcugccggacgacuucacgggcugcgugaucgcguggaacagcaacaaccucgacuccaaggucgggggcaacuacaacuaccuguaccgccuguuccgcaagagcaaccucaagcccuucgagcgggacaucuccaccgagaucuaccaggccggcagcacccccugcaacgggguggagggcuucaacugcuacuucccccugcaguccuacggguuccagccgaccaacggcgugggguaccagcccuaccggguggucgugcugagcuucgagcuccugcacgcccccgccacggugugcggccccaagaaguccaccaaccuggucaagaacaagugcgugaacuucaacuucaacggccucaccgggaccggcgugcugaccgagagcaacaagaaguuccugccguuccagcaguucgggcgcgacaucgccgacacgaccgacgcgguccgcgacccccagacccuggagauccucgacaucacccccugcagcuucggcgggguguccgugaucacgccgggcaccaacaccagcaaccaggucgccgugcuguaccagggcgugaacugcaccgagguccccguggccauccacgccgaccagcugacgcccaccuggcggguguacuccaccgggagcaacgucuuccagacccgcgccggcugccucaucggggcggagcacgugaacaacuccuacgagugcgacauccccaucggcgccggcaucugcgccagcuaccagacgcagaccaacuccccgcggcgcgcccggagcguggcgucccagagcaucaucgccuacaccaugucccugggggccgagaacagcgucgccuacuccaacaacagcaucgccauccccaccaacuucacgaucuccgugaccaccgagauccugcccgugagcaugaccaagacgagcgucgacugcaccauguacaucugcggcgacuccaccgagugcagcaaccuccugcugcaguacggguccuucugcacccagcucaaccgcgcgcugacgggcaucgccguggagcaggacaagaacacccaggagguguucgcccaggucaagcagaucuacaagacgcccccgaucaaggacuucgggggcuucaacuucagccagauccugcccgaccccuccaagcccagcaagcgguccuucaucgaggaccuccuguucaacaaggugacccuggccgacgccggcuucaucaagcaguacggggacugccucggcgacaucgcggcccgcgaccugaucugcgcccagaaguucaacgggcugaccgugcucccgccccugcugaccgacgagaugaucgcccaguacaccagcgcccuccuggcgggcaccaucacguccggguggaccuucggcgccggcgccgcccugcagauccccuucgcgaugcagauggccuaccgguucaacgggaucggcgucacccagaacgugcucuacgagaaccagaagcugaucgccaaccaguucaacagcgccaucgggaagauccaggacucccugagcuccaccgccagcgcgcucggcaagcugcaggacguggucaaccagaacgcccaggcccugaacacgcucgugaagcagcuguccagcaacuucggggccaucuccagcgugcugaacgacauccucucccgccuggacaaggucgaggccgaggugcagaucgaccggcugaucaccggccgccuccagagccugcagaccuacgugacccagcagcugauccgggcggccgagauccgcgccagcgccaaccucgccgcgaccaagauguccgagugcguccugggccagagcaagcggguggacuucugcgggaagggcuaccaccugauguccuucccccagagcgccccgcacgggguggucuuccuccacgugacguacguccccgcccaggagaagaacuucaccaccgcccccgcgaucugccacgacggcaaggcccacuucccccgcgaggggguguucguguccaacggcacccacugguucgucacgcagcggaacuucuacgagccgcagaucaucaccaccgacaacaccuucgugagcggcaacugcgacguggucaucgggaucgugaacaacacgguguacgacccccugcagcccgagcuggacuccuucaaggaggagcucgacaaguacuucaagaaccacaccagccccgacgucgaccugggcgacaucuccgggaucaacgccagcguggugaacauccagaaggagaucgaccgccugaacgaggucgccaagaaccucaacgagucccugaucgaccugcaggagcucggcaaguacgagcaguacaucaaguggccgugguacaucuggcugggcuucaucgccgggcugaucgcgaucgugauggugaccaucaugcucugcugcaugaccagcugcugcuccugccugaagggcugcugcagcugcggguccugcugcaaguucgacgaggacgacagcgagcccguccugaagggcgugaagcuccacuacacgugaggacuaguguccaccugucccuccugggcugcuggauugucucguuuuccugccaaauaaacaggaucagcgcuuuacagaucucaaaggcucuuuucagagccaccaaaaaaaaaaaaaaaaaaaaaaaaaaaaaaaaaaaaaaaaaaaaaaaaaaaaaaaaaaaaaaaaaaaaaaaaaaaaaaaaaaaaaaaaaaaaaaaaaaaaa

SEQ ID NO: 23869 - RNA, 4129 nt, Artificial Sequence
  SARS-CoV-2/Wuhan/WIV05/2019__EPI_ISL_402128 spike protein mRNA gc (1-1273)(A222V_D614G)
aggagacccgugacccggaaguuguacggcuacgcgacuuucccucccacaaacccucgcgcccuuccuuuccuacuugggcccggcagaaagcuuaccauguucguguuccugguccuccugccccuggugagcucccagugcgugaaccucaccacccgcacgcagcugccgcccgccuacaccaacagcuucacccggggcgucuacuaccccgacaagguguuccgcuccagcgugcugcacuccacccaggaccucuuccugcccuucuucagcaacgucacgugguuccacgccauccacguguccgggaccaacggcaccaagcgguucgacaacccggugcugcccuucaacgacggggucuacuucgcgagcaccgagaaguccaacaucauccgcggcuggaucuucgggacgacccucgacagcaagacccagucccugcugaucgugaacaacgccaccaacguggucaucaaggugugcgaguuccaguucugcaacgaccccuuccucggcguguacuaccacaagaacaacaagagcuggauggaguccgaguuccgggucuacagcuccgccaacaacugcacguucgaguacgugagccagcccuuccugauggaccuggagggcaagcaggggaacuucaagaaccuccgcgaguucguguucaagaacaucgacggcuacuucaagaucuacuccaagcacaccccgaucaaccugguccgggaccugccccagggguucagcgugcucgagccccugguggaccugcccaucggcaucaacaucacccgcuuccagacccuccuggcccugcaccgguccuaccucacgccgggggacagcagcuccggcuggaccgccggcgcggccgccuacuacgucggguaccugcagccccgcaccuuccugcucaaguacaacgagaacggcaccaucacggacgccguggacugcgcgcuggacccccugagcgagaccaagugcacccucaaguccuucaccguggagaaggggaucuaccagacgagcaacuuccggguccagcccaccgaguccaucgugcgcuucccgaacaucaccaaccugugccccuucggcgaggucuucaacgccacccgguucgccagcguguacgccuggaaccgcaagcggaucuccaacugcguggccgacuacagcguccuguacaacuccgcgagcuucuccacguucaagugcuacggcgugagccccaccaagcucaacgaccugugcuucaccaacguguacgccgacuccuucgucauccgcggggacgaggugcggcagaucgcccccggccagaccgggaagaucgccgacuacaacuacaagcugccggacgacuucacgggcugcgugaucgccuggaacagcaacaaccucgacuccaaggucgggggcaacuacaacuaccuguaccgccuguuccgcaagagcaaccucaagcccuucgagcgggacaucuccaccgagaucuaccaggcgggcagcacccccugcaacgggguggagggcuucaacugcuacuucccccugcaguccuacggguuccagccgaccaacggcgugggguaccagcccuaccgggucguggugcugagcuucgagcuccugcacgcccccgccacggucugcggccccaagaaguccaccaaccuggugaagaacaagugcgugaacuucaacuucaacggccucaccgggaccggcguccugaccgagagcaacaagaaguuccugccguuccagcaguucgggcgcgacaucgccgacacgaccgacgccgugcgcgacccccagacccuggagauccucgacaucacccccugcagcuucggcgggguguccgucaucacgccgggcaccaacaccagcaaccagguggcggugcuguaccagggcgucaacugcaccgaggugcccguggccauccacgccgaccagcugacgcccaccuggcgggucuacuccaccgggagcaacguguuccagacccgcgccggcugccucaucggggccgagcacgugaacaacuccuacgagugcgacauccccaucggcgcgggcaucugcgccagcuaccagacgcagaccaacuccccgcggcgcgcccggagcgucgccucccagagcaucaucgcguacaccaugucccugggggccgagaacagcguggccuacuccaacaacagcaucgccauccccaccaacuucacgaucuccgugaccaccgagauccugcccgucagcaugaccaagacgagcguggacugcaccauguacaucugcggcgacuccaccgagugcagcaaccuccugcugcaguacggguccuucugcacccagcucaaccgcgcccugacgggcaucgcgguggagcaggacaagaacacccaggaggucuucgcccaggugaagcagaucuacaagacgcccccgaucaaggacuucgggggcuucaacuucagccagauccugcccgaccccuccaagcccagcaagcgguccuucaucgaggaccuccuguucaacaaggugacccuggccgacgccggcuucaucaagcaguacggggacugccucggcgacaucgccgcgcgcgaccugaucugcgcccagaaguucaacgggcugaccguccucccgccccugcugaccgacgagaugaucgcccaguacaccagcgcccuccuggccggcaccaucacguccggguggaccuucggcgcgggcgccgcccugcagauccccuucgccaugcagauggcguaccgguucaacgggaucggcgugacccagaacgugcucuacgagaaccagaagcugaucgccaaccaguucaacagcgccaucgggaagauccaggacucccugagcuccaccgccagcgcccucggcaagcugcaggacgucgugaaccagaacgcgcaggcccugaacacgcucgugaagcagcuguccagcaacuucggggccaucuccagcguccugaacgacauccucucccgccuggacaagguggaggccgaggugcagaucgaccggcugaucaccggccgccuccagagccugcagaccuacgucacccagcagcugauccgggccgcggagauccgcgccagcgccaaccucgccgccaccaagauguccgagugcgugcugggccagagcaagcggguggacuucugcgggaagggcuaccaccugauguccuucccccagagcgcgccgcacggggucguguuccuccacgucacguacgugcccgcccaggagaagaacuucaccaccgcccccgccaucugccacgacggcaaggcgcacuucccccgcgaggggguguucgucuccaacggcacccacugguucgugacgcagcggaacuucuacgagccgcagaucaucaccaccgacaacaccuucgugagcggcaacugcgacgucgugaucgggaucgugaacaacacggucuacgacccccugcagcccgagcuggacuccuucaaggaggagcucgacaaguacuucaagaaccacaccagccccgacguggaccugggcgacaucuccgggaucaacgccagcguggucaacauccagaaggagaucgaccgccugaacgagguggccaagaaccucaacgagucccugaucgaccugcaggagcucggcaaguacgagcaguacaucaaguggccgugguacaucuggcugggcuucaucgccgggcugaucgccaucgugauggucaccaucaugcucugcugcaugaccagcugcugcuccugccugaagggcugcugcagcugcggguccugcugcaaguucgacgaggacgacagcgagcccgugcugaagggcgugaagcuccacuacacgugaggacuaguguccaccugucccuccugggcugcuggauugucucguuuuccugccaaauaaacaggaucagcgcuuuacagaucucaaaggcucuuuucagagccaccaaaaaaaaaaaaaaaaaaaaaaaaaaaaaaaaaaaaaaaaaaaaaaaaaaaaaaaaaaaaaaaaaaaaaaaaaaaaaaaaaaaaaaaaaaaaaaaaaaaaa

SEQ ID NO: 23870 - RNA, 4129 nt, Artificial Sequence
  SARS-CoV-2/Wuhan/WIV05/2019__EPI_ISL_402128 spike protein mRNA gc (1-1273)(N439K_D614G)
aggagacccgugacccggaaguuguacggcuacgcgacuuucccucccacaaacccucgcgcccuuccuuuccuacuugggcccggcagaaagcuuaccauguucguguuccugguccuccugccccuggugagcucccagugcgugaaccucaccacccgcacgcagcugccgcccgccuacaccaacagcuucacccggggcgucuacuaccccgacaagguguuccgcuccagcgugcugcacuccacccaggaccucuuccugcccuucuucagcaacgucacgugguuccacgccauccacguguccgggaccaacggcaccaagcgguucgacaacccggugcugcccuucaacgacggggucuacuucgcgagcaccgagaaguccaacaucauccgcggcuggaucuucgggacgacccucgacagcaagacccagucccugcugaucgugaacaacgccaccaacguggucaucaaggugugcgaguuccaguucugcaacgaccccuuccucggcguguacuaccacaagaacaacaagagcuggauggaguccgaguuccgggucuacagcuccgccaacaacugcacguucgaguacgugagccagcccuuccugauggaccuggagggcaagcaggggaacuucaagaaccuccgcgaguucguguucaagaacaucgacggcuacuucaagaucuacuccaagcacaccccgaucaaccugguccgggaccugccccagggguucagcgcccucgagccccugguggaccugcccaucggcaucaacaucacccgcuuccagacccuccuggcccugcaccgguccuaccucacgccgggggacagcagcuccggcuggaccgcgggcgccgccgccuacuacgugggguaccugcagccccgcaccuuccugcucaaguacaacgagaacggcaccaucacggacgcggucgacugcgcccuggacccccugagcgagaccaagugcacccucaaguccuucaccguggagaaggggaucuaccagacgagcaacuuccgggugcagcccaccgaguccaucguccgcuucccgaacaucaccaaccugugccccuucggcgagguguucaacgccacccgguucgccagcgucuacgccuggaaccgcaagcggaucuccaacugcguggcggacuacagcgugcuguacaacuccgccagcuucuccacguucaagugcuacggcgucagccccaccaagcucaacgaccugugcuucaccaacguguacgccgacuccuucgugauccgcggggacgagguccggcagaucgcccccggccagaccgggaagaucgccgacuacaacuacaagcugccggacgacuucacgggcugcgugaucgcguggaacagcaagaaccucgacuccaaggucgggggcaacuacaacuaccuguaccgccuguuccgcaagagcaaccucaagcccuucgagcgggacaucuccaccgagaucuaccaggccggcagcacccccugcaacgggguggagggcuucaacugcuacuucccccugcaguccuacggguuccagccgaccaacggcgugggguaccagcccuaccggguggucgugcugagcuucgagcuccugcacgcccccgccacggugugcggccccaagaaguccaccaaccuggucaagaacaagugcgugaacuucaacuucaacggccucaccgggaccggcgugcugaccgagagcaacaagaaguuccugccguuccagcaguucgggcgcgacaucgccgacacgaccgacgcgguccgcgacccccagacccuggagauccucgacaucacccccugcagcuucggcgggguguccgugaucacgccgggcaccaacaccagcaaccaggucgccgugcuguaccagggcgugaacugcaccgagguccccguggccauccacgccgaccagcugacgcccaccuggcggguguacuccaccgggagcaacgucuuccagacccgcgccggcugccucaucggggcggagcacgugaacaacuccuacgagugcgacauccccaucggcgccggcaucugcgccagcuaccagacgcagaccaacuccccgcggcgcgcccggagcguggcgucccagagcaucaucgccuacaccaugucccugggggccgagaacagcgucgccuacuccaacaacagcaucgccauccccaccaacuucacgaucuccgugaccaccgagauccugcccgugagcaugaccaagacgagcgucgacugcaccauguacaucugcggcgacuccaccgagugcagcaaccuccugcugcaguacggguccuucugcacccagcucaaccgcgcgcugacgggcaucgccguggagcaggacaagaacacccaggagguguucgcccaggucaagcagaucuacaagacgcccccgaucaaggacuucgggggcuucaacuucagccagauccugcccgaccccuccaagcccagcaagcgguccuucaucgaggaccuccuguucaacaaggugacccuggccgacgccggcuucaucaagcaguacggggacugccucggcgacaucgcggcccgcgaccugaucugcgcccagaaguucaacgggcugaccgugcucccgccccugcugaccgacgagaugaucgcccaguacaccagcgcccuccuggcgggcaccaucacguccggguggaccuucggcgccggcgccgcccugcagauccccuucgcgaugcagauggccuaccgguucaacgggaucggcgucacccagaacgugcucuacgagaaccagaagcugaucgccaaccaguucaacagcgccaucgggaagauccaggacucccugagcuccaccgccagcgcgcucggcaagcugcaggacguggucaaccagaacgcccaggcccugaacacgcucgugaagcagcuguccagcaacuucggggccaucuccagcgugcugaacgacauccucucccgccuggacaaggucgaggccgaggugcagaucgaccggcugaucaccggccgccuccagagccugcagaccuacgugacccagcagcugauccgggcggccgagauccgcgccagcgccaaccucgccgcgaccaagauguccgagugcguccugggccagagcaagcggguggacuucugcgggaagggcuaccaccugauguccuucccccagagcgccccgcacgggguggucuuccuccacgugacguacguccccgcccaggagaagaacuucaccaccgcccccgcgaucugccacgacggcaaggcccacuucccccgcgaggggguguucguguccaacggcacccacugguucgucacgcagcggaacuucuacgagccgcagaucaucaccaccgacaacaccuucgugagcggcaacugcgacguggucaucgggaucgugaacaacacgguguacgacccccugcagcccgagcuggacuccuucaaggaggagcucgacaaguacuucaagaaccacaccagccccgacgucgaccugggcgacaucuccgggaucaacgccagcguggugaacauccagaaggagaucgaccgccugaacgaggucgccaagaaccucaacgagucccugaucgaccugcaggagcucggcaaguacgagcaguacaucaaguggccgugguacaucuggcugggcuucaucgccgggcugaucgcgaucgugauggugaccaucaugcucugcugcaugaccagcugcugcuccugccugaagggcugcugcagcugcggguccugcugcaaguucgacgaggacgacagcgagcccguccugaagggcgugaagcuccacuacacgugaggacuaguguccaccugucccuccugggcugcuggauugucucguuuuccugccaaauaaacaggaucagcgcuuuacagaucucaaaggcucuuuucagagccaccaaaaaaaaaaaaaaaaaaaaaaaaaaaaaaaaaaaaaaaaaaaaaaaaaaaaaaaaaaaaaaaaaaaaaaaaaaaaaaaaaaaaaaaaaaaaaaaaaaaaa

SEQ ID NO: 23871 - RNA, 4129 nt, Artificial Sequence
  SARS-CoV-2/Wuhan/WIV05/2019__EPI_ISL_402128 spike protein mRNA gc (1-1273)(S477N_D614G)
aggagacccgugacccggaaguuguacggcuacgcgacuuucccucccacaaacccucgcgcccuuccuuuccuacuugggcccggcagaaagcuuaccauguucguguuccugguccuccugccccuggugagcucccagugcgugaaccucaccacccgcacgcagcugccgcccgccuacaccaacagcuucacccggggcgucuacuaccccgacaagguguuccgcuccagcgugcugcacuccacccaggaccucuuccugcccuucuucagcaacgucacgugguuccacgccauccacguguccgggaccaacggcaccaagcgguucgacaacccggugcugcccuucaacgacggggucuacuucgcgagcaccgagaaguccaacaucauccgcggcuggaucuucgggacgacccucgacagcaagacccagucccugcugaucgugaacaacgccaccaacguggucaucaaggugugcgaguuccaguucugcaacgaccccuuccucggcguguacuaccacaagaacaacaagagcuggauggaguccgaguuccgggucuacagcuccgccaacaacugcacguucgaguacgugagccagcccuuccugauggaccuggagggcaagcaggggaacuucaagaaccuccgcgaguucguguucaagaacaucgacggcuacuucaagaucuacuccaagcacaccccgaucaaccugguccgggaccugccccagggguucagcgcccucgagccccugguggaccugcccaucggcaucaacaucacccgcuuccagacccuccuggcccugcaccgguccuaccucacgccgggggacagcagcuccggcuggaccgcgggcgccgccgccuacuacgugggguaccugcagccccgcaccuuccugcucaaguacaacgagaacggcaccaucacggacgcggucgacugcgcccuggacccccugagcgagaccaagugcacccucaaguccuucaccguggagaaggggaucuaccagacgagcaacuuccgggugcagcccaccgaguccaucguccgcuucccgaacaucaccaaccugugccccuucggcgagguguucaacgccacccgguucgccagcgucuacgccuggaaccgcaagcggaucuccaacugcguggcggacuacagcgugcuguacaacuccgccagcuucuccacguucaagugcuacggcgucagccccaccaagcucaacgaccugugcuucaccaacguguacgccgacuccuucgugauccgcggggacgagguccggcagaucgcccccggccagaccgggaagaucgccgacuacaacuacaagcugccggacgacuucacgggcugcgugaucgcguggaacagcaacaaccucgacuccaaggucgggggcaacuacaacuaccuguaccgccuguuccgcaagagcaaccucaagcccuucgagcgggacaucuccaccgagaucuaccaggccggcaacacccccugcaacgggguggagggcuucaacugcuacuucccccugcagagcuacggguuccagccgaccaacggcgugggguaccagcccuaccggguggucgugcuguccuucgagcuccugcacgcccccgccacggugugcggccccaagaaguccaccaaccuggucaagaacaagugcgugaacuucaacuucaacggccucaccgggaccggcgugcugaccgagagcaacaagaaguuccugccguuccagcaguucgggcgcgacaucgccgacacgaccgacgcgguccgcgacccccagacccuggagauccucgacaucacccccugcagcuucggcggggugagcgugaucacgccgggcaccaacaccuccaaccaggucgccgugcuguaccagggcgugaacugcaccgagguccccguggccauccacgccgaccagcugacgcccaccuggcggguguacagcaccggguccaacgucuuccagacccgcgccggcugccucaucggggcggagcacgugaacaacagcuacgagugcgacauccccaucggcgccggcaucugcgccuccuaccagacgcagaccaacagcccgcggcgcgcccgguccguggcgagccaguccaucaucgccuacaccaugagccugggggccgagaacuccgucgccuacagcaacaacuccaucgccauccccaccaacuucacgaucagcgugaccaccgagauccugcccguguccaugaccaagacgagcgucgacugcaccauguacaucugcggcgacagcaccgagugcuccaaccuccugcugcaguacgggagcuucugcacccagcucaaccgcgcgcugacgggcaucgccguggagcaggacaagaacacccaggagguguucgcccaggucaagcagaucuacaagacgcccccgaucaaggacuucgggggcuucaacuucucccagauccugcccgaccccagcaagcccuccaagcggagcuucaucgaggaccuccuguucaacaaggugacccuggccgacgccggcuucaucaagcaguacggggacugccucggcgacaucgcggcccgcgaccugaucugcgcccagaaguucaacgggcugaccgugcucccgccccugcugaccgacgagaugaucgcccaguacaccuccgcccuccuggcgggcaccaucacgagcggguggaccuucggcgccggcgccgcccugcagauccccuucgcgaugcagauggccuaccgguucaacgggaucggcgucacccagaacgugcucuacgagaaccagaagcugaucgccaaccaguucaacuccgccaucgggaagauccaggacagccuguccagcaccgccuccgcgcucggcaagcugcaggacguggucaaccagaacgcccaggcccugaacacgcucgugaagcagcugagcuccaacuucggggccaucagcuccgugcugaacgacauccucagccgccuggacaaggucgaggccgaggugcagaucgaccggcugaucaccggccgccuccagucccugcagaccuacgugacccagcagcugauccgggcggccgagauccgcgccagcgccaaccucgccgcgaccaagaugagcgagugcguccugggccaguccaagcggguggacuucugcgggaagggcuaccaccugaugagcuucccccaguccgccccgcacgggguggucuuccuccacgugacguacguccccgcccaggagaagaacuucaccaccgcccccgcgaucugccacgacggcaaggcccacuucccccgcgaggggguguucgugagcaacggcacccacugguucgucacgcagcggaacuucuacgagccgcagaucaucaccaccgacaacaccuucguguccggcaacugcgacguggucaucgggaucgugaacaacacgguguacgacccccugcagcccgagcuggacagcuucaaggaggagcucgacaaguacuucaagaaccacaccucccccgacgucgaccugggcgacaucagcgggaucaacgccuccguggugaacauccagaaggagaucgaccgccugaacgaggucgccaagaaccucaacgagagccugaucgaccugcaggagcucggcaaguacgagcaguacaucaaguggccgugguacaucuggcugggcuucaucgccgggcugaucgcgaucgugauggugaccaucaugcucugcugcaugaccuccugcugcagcugccugaagggcugcugcuccugcgggagcugcugcaaguucgacgaggacgacuccgagcccguccugaagggcgugaagcuccacuacacgugaggacuaguguccaccugucccuccugggcugcuggauugucucguuuuccugccaaauaaacaggaucagcgcuuuacagaucucaaaggcucuuuucagagccaccaaaaaaaaaaaaaaaaaaaaaaaaaaaaaaaaaaaaaaaaaaaaaaaaaaaaaaaaaaaaaaaaaaaaaaaaaaaaaaaaaaaaaaaaaaaaaaaaaaaaa

SEQ ID NO: 23872 - RNA, 4129 nt, Artificial Sequence
  SARS-CoV-2/Wuhan/WIV05/2019__EPI_ISL_402128 spike protein mRNA gc (1-1273)(N501Y_D614G)
aggagacccgugacccggaaguuguacggcuacgcgacuuucccucccacaaacccucgcgcccuuccuuuccuacuugggcccggcagaaagcuuaccauguucguguuccugguccuccugccccuggugagcucccagugcgugaaccucaccacccgcacgcagcugccgcccgccuacaccaacagcuucacccggggcgucuacuaccccgacaagguguuccgcuccagcgugcugcacuccacccaggaccucuuccugcccuucuucagcaacgucacgugguuccacgccauccacguguccgggaccaacggcaccaagcgguucgacaacccggugcugcccuucaacgacggggucuacuucgcgagcaccgagaaguccaacaucauccgcggcuggaucuucgggacgacccucgacagcaagacccagucccugcugaucgugaacaacgccaccaacguggucaucaaggugugcgaguuccaguucugcaacgaccccuuccucggcguguacuaccacaagaacaacaagagcuggauggaguccgaguuccgggucuacagcuccgccaacaacugcacguucgaguacgugagccagcccuuccugauggaccuggagggcaagcaggggaacuucaagaaccuccgcgaguucguguucaagaacaucgacggcuacuucaagaucuacuccaagcacaccccgaucaaccugguccgggaccugccccagggguucagcgcccucgagccccugguggaccugcccaucggcaucaacaucacccgcuuccagacccuccuggcccugcaccgguccuaccucacgccgggggacagcagcuccggcuggaccgcgggcgccgccgccuacuacgugggguaccugcagccccgcaccuuccugcucaaguacaacgagaacggcaccaucacggacgcggucgacugcgcccuggacccccugagcgagaccaagugcacccucaaguccuucaccguggagaaggggaucuaccagacgagcaacuuccgggugcagcccaccgaguccaucguccgcuucccgaacaucaccaaccugugccccuucggcgagguguucaacgccacccgguucgccagcgucuacgccuggaaccgcaagcggaucuccaacugcguggcggacuacagcgugcuguacaacuccgccagcuucuccacguucaagugcuacggcgucagccccaccaagcucaacgaccugugcuucaccaacguguacgccgacuccuucgugauccgcggggacgagguccggcagaucgcccccggccagaccgggaagaucgccgacuacaacuacaagcugccggacgacuucacgggcugcgugaucgcguggaacagcaacaaccucgacuccaaggucgggggcaacuacaacuaccuguaccgccuguuccgcaagagcaaccucaagcccuucgagcgggacaucuccaccgagaucuaccaggccggcagcacccccugcaacgggguggagggcuucaacugcuacuucccccugcaguccuacggguuccagccgaccuacggcgugggguaccagcccuaccggguggucgugcugagcuucgagcuccugcacgcccccgccacggugugcggccccaagaaguccaccaaccuggucaagaacaagugcgugaacuucaacuucaacggccucaccgggaccggcgugcugaccgagagcaacaagaaguuccugccguuccagcaguucgggcgcgacaucgccgacacgaccgacgcgguccgcgacccccagacccuggagauccucgacaucacccccugcagcuucggcgggguguccgugaucacgccgggcaccaacaccagcaaccaggucgccgugcuguaccagggcgugaacugcaccgagguccccguggccauccacgccgaccagcugacgcccaccuggcggguguacuccaccgggagcaacgucuuccagacccgcgccggcugccucaucggggcggagcacgugaacaacuccuacgagugcgacauccccaucggcgccggcaucugcgccagcuaccagacgcagaccaacuccccgcggcgcgcccggagcguggcgucccagagcaucaucgccuacaccaugucccugggggccgagaacagcgucgccuacuccaacaacagcaucgccauccccaccaacuucacgaucuccgugaccaccgagauccugcccgugagcaugaccaagacgagcgucgacugcaccauguacaucugcggcgacuccaccgagugcagcaaccuccugcugcaguacggguccuucugcacccagcucaaccgcgcgcugacgggcaucgccguggagcaggacaagaacacccaggagguguucgcccaggucaagcagaucuacaagacgcccccgaucaaggacuucgggggcuucaacuucagccagauccugcccgaccccuccaagcccagcaagcgguccuucaucgaggaccuccuguucaacaaggugacccuggccgacgccggcuucaucaagcaguacggggacugccucggcgacaucgcggcccgcgaccugaucugcgcccagaaguucaacgggcugaccgugcucccgccccugcugaccgacgagaugaucgcccaguacaccagcgcccuccuggcgggcaccaucacguccggguggaccuucggcgccggcgccgcccugcagauccccuucgcgaugcagauggccuaccgguucaacgggaucggcgucacccagaacgugcucuacgagaaccagaagcugaucgccaaccaguucaacagcgccaucgggaagauccaggacucccugagcuccaccgccagcgcgcucggcaagcugcaggacguggucaaccagaacgcccaggcccugaacacgcucgugaagcagcuguccagcaacuucggggccaucuccagcgugcugaacgacauccucucccgccuggacaaggucgaggccgaggugcagaucgaccggcugaucaccggccgccuccagagccugcagaccuacgugacccagcagcugauccgggcggccgagauccgcgccagcgccaaccucgccgcgaccaagauguccgagugcguccugggccagagcaagcggguggacuucugcgggaagggcuaccaccugauguccuucccccagagcgccccgcacgggguggucuuccuccacgugacguacguccccgcccaggagaagaacuucaccaccgcccccgcgaucugccacgacggcaaggcccacuucccccgcgaggggguguucguguccaacggcacccacugguucgucacgcagcggaacuucuacgagccgcagaucaucaccaccgacaacaccuucgugagcggcaacugcgacguggucaucgggaucgugaacaacacgguguacgacccccugcagcccgagcuggacuccuucaaggaggagcucgacaaguacuucaagaaccacaccagccccgacgucgaccugggcgacaucuccgggaucaacgccagcguggugaacauccagaaggagaucgaccgccugaacgaggucgccaagaaccucaacgagucccugaucgaccugcaggagcucggcaaguacgagcaguacaucaaguggccgugguacaucuggcugggcuucaucgccgggcugaucgcgaucgugauggugaccaucaugcucugcugcaugaccagcugcugcuccugccugaagggcugcugcagcugcggguccugcugcaaguucgacgaggacgacagcgagcccguccugaagggcgugaagcuccacuacacgugaggacuaguguccaccugucccuccugggcugcuggauugucucguuuuccugccaaauaaacaggaucagcgcuuuacagaucucaaaggcucuuuucagagccaccaaaaaaaaaaaaaaaaaaaaaaaaaaaaaaaaaaaaaaaaaaaaaaaaaaaaaaaaaaaaaaaaaaaaaaaaaaaaaaaaaaaaaaaaaaaaaaaaaaaaa

SEQ ID NO: 23873 - RNA, 4123 nt, Artificial Sequence
  SARS-CoV-2/Wuhan/WIV05/2019__EPI_ISL_402128 spike protein mRNA gc (1-1273)(H69del_V70del_D614G)
aggagacccgugacccggaaguuguacggcuacgcgacuuucccucccacaaacccucgcgcccuuccuuuccuacuugggcccggcagaaagcuuaccauguucguguuccugguccuccugccccuggugagcucccagugcgugaaccucaccacccgcacgcagcugccgcccgccuacaccaacagcuucacccggggcgucuacuaccccgacaagguguuccgcuccagcgugcugcacuccacccaggaccucuuccugcccuucuucagcaacgucacgugguuccacgccaucuccgggaccaacggcaccaagcgguucgacaacccggugcugcccuucaacgacgggguguacuucgcgagcaccgagaaguccaacaucauccgcggcuggaucuucgggacgacccucgacagcaagacccagucccugcugaucgucaacaacgccaccaacguggugaucaaggucugcgaguuccaguucugcaacgaccccuuccucggcguguacuaccacaagaacaacaagagcuggauggaguccgaguuccggguguacagcuccgccaacaacugcacguucgaguacgucagccagcccuuccugauggaccuggagggcaagcaggggaacuucaagaaccuccgcgaguucguguucaagaacaucgacggcuacuucaagaucuacuccaagcacaccccgaucaaccuggugcgggaccugccccagggguucagcgcccucgagccccuggucgaccugcccaucggcaucaacaucacccgcuuccagacccuccuggcccugcaccgguccuaccucacgccgggggacagcagcuccggcuggaccgcgggcgccgccgccuacuacgugggguaccugcagccccgcaccuuccugcucaaguacaacgagaacggcaccaucacggacgcgguggacugcgcccuggacccccugagcgagaccaagugcacccucaaguccuucaccgucgagaaggggaucuaccagacgagcaacuuccgggugcagcccaccgaguccaucgugcgcuucccgaacaucaccaaccugugccccuucggcgaggucuucaacgccacccgguucgccagcguguacgccuggaaccgcaagcggaucuccaacugcgucgcggacuacagcgugcuguacaacuccgccagcuucuccacguucaagugcuacggcgugagccccaccaagcucaacgaccugugcuucaccaacgucuacgccgacuccuucgugauccgcggggacgaggugcggcagaucgcccccggccagaccgggaagaucgccgacuacaacuacaagcugccggacgacuucacgggcugcgucaucgcguggaacagcaacaaccucgacuccaaggucgggggcaacuacaacuaccuguaccgccuguuccgcaagagcaaccucaagcccuucgagcgggacaucuccaccgagaucuaccaggccggcagcacccccugcaacgggguggagggcuucaacugcuacuucccccugcaguccuacggguuccagccgaccaacggcgugggguaccagcccuaccggguggugguccugagcuucgagcuccugcacgcccccgccacggugugcggccccaagaaguccaccaaccuggugaagaacaagugcgucaacuucaacuucaacggccucaccgggaccggcgugcugaccgagagcaacaagaaguuccugccguuccagcaguucgggcgcgacaucgccgacacgaccgacgcggugcgcgacccccagacccuggagauccucgacaucacccccugcagcuucggcggggucuccgugaucacgccgggcaccaacaccagcaaccagguggccguccuguaccagggcgugaacugcaccgaggugcccgucgccauccacgccgaccagcugacgcccaccuggcggguguacuccaccgggagcaacguguuccagacccgcgccggcugccucaucggggcggagcacgucaacaacuccuacgagugcgacauccccaucggcgccggcaucugcgccagcuaccagacgcagaccaacuccccgcggcgcgcccggagcguggcgucccagagcaucaucgccuacaccaugucccugggggccgagaacagcguggccuacuccaacaacagcaucgccauccccaccaacuucacgaucuccgucaccaccgagauccugcccgugagcaugaccaagacgagcguggacugcaccauguacaucugcggcgacuccaccgagugcagcaaccuccugcugcaguacggguccuucugcacccagcucaaccgcgcgcugacgggcaucgccgucgagcaggacaagaacacccaggagguguucgcccaggugaagcagaucuacaagacgcccccgaucaaggacuucgggggcuucaacuucagccagauccugcccgaccccuccaagcccagcaagcgguccuucaucgaggaccuccuguucaacaaggucacccuggccgacgccggcuucaucaagcaguacggggacugccucggcgacaucgcggcccgcgaccugaucugcgcccagaaguucaacgggcugaccgugcucccgccccugcugaccgacgagaugaucgcccaguacaccagcgcccuccuggcgggcaccaucacguccggguggaccuucggcgccggcgccgcccugcagauccccuucgcgaugcagauggccuaccgguucaacgggaucggcgugacccagaacguccucuacgagaaccagaagcugaucgccaaccaguucaacagcgccaucgggaagauccaggacucccugagcuccaccgccagcgcgcucggcaagcugcaggacguggugaaccagaacgcccaggcccugaacacgcucgucaagcagcuguccagcaacuucggggccaucuccagcgugcugaacgacauccucucccgccuggacaagguggaggccgagguccagaucgaccggcugaucaccggccgccuccagagccugcagaccuacgugacccagcagcugauccgggcggccgagauccgcgccagcgccaaccucgccgcgaccaagauguccgagugcgugcugggccagagcaagcgggucgacuucugcgggaagggcuaccaccugauguccuucccccagagcgccccgcacggggugguguuccuccacgucacguacgugcccgcccaggagaagaacuucaccaccgcccccgcgaucugccacgacggcaaggcccacuucccccgcgagggggucuucguguccaacggcacccacugguucgugacgcagcggaacuucuacgagccgcagaucaucaccaccgacaacaccuucgucagcggcaacugcgacguggugaucgggaucgucaacaacacgguguacgacccccugcagcccgagcuggacuccuucaaggaggagcucgacaaguacuucaagaaccacaccagccccgacguggaccugggcgacaucuccgggaucaacgccagcgucgugaacauccagaaggagaucgaccgccugaacgagguggccaagaaccucaacgagucccugaucgaccugcaggagcucggcaaguacgagcaguacaucaaguggccgugguacaucuggcugggcuucaucgccgggcugaucgcgaucgucauggugaccaucaugcucugcugcaugaccagcugcugcuccugccugaagggcugcugcagcugcggguccugcugcaaguucgacgaggacgacagcgagcccgugcugaagggcgucaagcuccacuacacgugaggacuaguguccaccugucccuccugggcugcuggauugucucguuuuccugccaaauaaacaggaucagcgcuuuacagaucucaaaggcucuuuucagagccaccaaaaaaaaaaaaaaaaaaaaaaaaaaaaaaaaaaaaaaaaaaaaaaaaaaaaaaaaaaaaaaaaaaaaaaaaaaaaaaaaaaaaaaaaaaaaaaaaaaaaa

SEQ ID NO: 23874 - RNA, 4129 nt, Artificial Sequence
  SARS-CoV-2/Wuhan/WIV05/2019__EPI_ISL_402128 spike protein mRNA gc (1-1273)(Y453F_D614G)
aggagacccgugacccggaaguuguacggcuacgcgacuuucccucccacaaacccucgcgcccuuccuuuccuacuugggcccggcagaaagcuuaccauguucguguuccugguccuccugccccuggugagcucccagugcgugaaccucaccacccgcacgcagcugccgcccgccuacaccaacagcuucacccggggcgucuacuaccccgacaagguguuccgcuccagcgugcugcacuccacccaggaccucuuccugcccuucuucagcaacgucacgugguuccacgccauccacguguccgggaccaacggcaccaagcgguucgacaacccggugcugcccuucaacgacggggucuacuucgcgagcaccgagaaguccaacaucauccgcggcuggaucuucgggacgacccucgacagcaagacccagucccugcugaucgugaacaacgccaccaacguggucaucaaggugugcgaguuccaguucugcaacgaccccuuccucggcguguacuaccacaagaacaacaagagcuggauggaguccgaguuccgggucuacagcuccgccaacaacugcacguucgaguacgugagccagcccuuccugauggaccuggagggcaagcaggggaacuucaagaaccuccgcgaguucguguucaagaacaucgacggcuacuucaagaucuacuccaagcacaccccgaucaaccugguccgggaccugccccagggguucagcgcccucgagccccugguggaccugcccaucggcaucaacaucacccgcuuccagacccuccuggcccugcaccgguccuaccucacgccgggggacagcagcuccggcuggaccgcgggcgccgccgccuacuacgugggguaccugcagccccgcaccuuccugcucaaguacaacgagaacggcaccaucacggacgcggucgacugcgcccuggacccccugagcgagaccaagugcacccucaaguccuucaccguggagaaggggaucuaccagacgagcaacuuccgggugcagcccaccgaguccaucguccgcuucccgaacaucaccaaccugugccccuucggcgagguguucaacgccacccgguucgccagcgucuacgccuggaaccgcaagcggaucuccaacugcguggcggacuacagcgugcuguacaacuccgccagcuucuccacguucaagugcuacggcgucagccccaccaagcucaacgaccugugcuucaccaacguguacgccgacuccuucgugauccgcggggacgagguccggcagaucgcccccggccagaccgggaagaucgccgacuacaacuacaagcugccggacgacuucacgggcugcgugaucgcguggaacagcaacaaccucgacuccaaggucgggggcaacuacaacuaccuguuccgccuguuccgcaagagcaaccucaagcccuucgagcgggacaucuccaccgagaucuaccaggccggcagcacccccugcaacgggguggagggcuucaacugcuacuucccccugcaguccuacggguuccagccgaccaacggcgugggguaccagcccuaccggguggucgugcugagcuucgagcuccugcacgcccccgccacggugugcggccccaagaaguccaccaaccuggucaagaacaagugcgugaacuucaacuucaacggccucaccgggaccggcgugcugaccgagagcaacaagaaguuccugccguuccagcaguucgggcgcgacaucgccgacacgaccgacgcgguccgcgacccccagacccuggagauccucgacaucacccccugcagcuucggcgggguguccgugaucacgccgggcaccaacaccagcaaccaggucgccgugcuguaccagggcgugaacugcaccgagguccccguggccauccacgccgaccagcugacgcccaccuggcggguguacuccaccgggagcaacgucuuccagacccgcgccggcugccucaucggggcggagcacgugaacaacuccuacgagugcgacauccccaucggcgccggcaucugcgccagcuaccagacgcagaccaacuccccgcggcgcgcccggagcguggcgucccagagcaucaucgccuacaccaugucccugggggccgagaacagcgucgccuacuccaacaacagcaucgccauccccaccaacuucacgaucuccgugaccaccgagauccugcccgugagcaugaccaagacgagcgucgacugcaccauguacaucugcggcgacuccaccgagugcagcaaccuccugcugcaguacggguccuucugcacccagcucaaccgcgcgcugacgggcaucgccguggagcaggacaagaacacccaggagguguucgcccaggucaagcagaucuacaagacgcccccgaucaaggacuucgggggcuucaacuucagccagauccugcccgaccccuccaagcccagcaagcgguccuucaucgaggaccuccuguucaacaaggugacccuggccgacgccggcuucaucaagcaguacggggacugccucggcgacaucgcggcccgcgaccugaucugcgcccagaaguucaacgggcugaccgugcucccgccccugcugaccgacgagaugaucgcccaguacaccagcgcccuccuggcgggcaccaucacguccggguggaccuucggcgccggcgccgcccugcagauccccuucgcgaugcagauggccuaccgguucaacgggaucggcgucacccagaacgugcucuacgagaaccagaagcugaucgccaaccaguucaacagcgccaucgggaagauccaggacucccugagcuccaccgccagcgcgcucggcaagcugcaggacguggucaaccagaacgcccaggcccugaacacgcucgugaagcagcuguccagcaacuucggggccaucuccagcgugcugaacgacauccucucccgccuggacaaggucgaggccgaggugcagaucgaccggcugaucaccggccgccuccagagccugcagaccuacgugacccagcagcugauccgggcggccgagauccgcgccagcgccaaccucgccgcgaccaagauguccgagugcguccugggccagagcaagcggguggacuucugcgggaagggcuaccaccugauguccuucccccagagcgccccgcacgggguggucuuccuccacgugacguacguccccgcccaggagaagaacuucaccaccgcccccgcgaucugccacgacggcaaggcccacuucccccgcgaggggguguucguguccaacggcacccacugguucgucacgcagcggaacuucuacgagccgcagaucaucaccaccgacaacaccuucgugagcggcaacugcgacguggucaucgggaucgugaacaacacgguguacgacccccugcagcccgagcuggacuccuucaaggaggagcucgacaaguacuucaagaaccacaccagccccgacgucgaccugggcgacaucuccgggaucaacgccagcguggugaacauccagaaggagaucgaccgccugaacgaggucgccaagaaccucaacgagucccugaucgaccugcaggagcucggcaaguacgagcaguacaucaaguggccgugguacaucuggcugggcuucaucgccgggcugaucgcgaucgugauggugaccaucaugcucugcugcaugaccagcugcugcuccugccugaagggcugcugcagcugcggguccugcugcaaguucgacgaggacgacagcgagcccguccugaagggcgugaagcuccacuacacgugaggacuaguguccaccugucccuccugggcugcuggauugucucguuuuccugccaaauaaacaggaucagcgcuuuacagaucucaaaggcucuuuucagagccaccaaaaaaaaaaaaaaaaaaaaaaaaaaaaaaaaaaaaaaaaaaaaaaaaaaaaaaaaaaaaaaaaaaaaaaaaaaaaaaaaaaaaaaaaaaaaaaaaaaaaa

SEQ ID NO: 23875 - RNA, 4129 nt, Artificial Sequence
  SARS-CoV-2/Wuhan/WIV05/2019__EPI_ISL_402128 spike protein mRNA gc (1-1273)(D614G_I692V)
aggagacccgugacccggaaguuguacggcuacgcgacuuucccucccacaaacccucgcgcccuuccuuuccuacuugggcccggcagaaagcuuaccauguucguguuccugguccuccugccccuggugagcucccagugcgugaaccucaccacccgcacgcagcugccgcccgccuacaccaacagcuucacccggggcgucuacuaccccgacaagguguuccgcuccagcgugcugcacuccacccaggaccucuuccugcccuucuucagcaacgucacgugguuccacgccauccacguguccgggaccaacggcaccaagcgguucgacaacccggugcugcccuucaacgacggggucuacuucgcgagcaccgagaaguccaacaucauccgcggcuggaucuucgggacgacccucgacagcaagacccagucccugcugaucgugaacaacgccaccaacguggucaucaaggugugcgaguuccaguucugcaacgaccccuuccucggcguguacuaccacaagaacaacaagagcuggauggaguccgaguuccgggucuacagcuccgccaacaacugcacguucgaguacgugagccagcccuuccugauggaccuggagggcaagcaggggaacuucaagaaccuccgcgaguucguguucaagaacaucgacggcuacuucaagaucuacuccaagcacaccccgaucaaccugguccgggaccugccccagggguucagcgcccucgagccccugguggaccugcccaucggcaucaacaucacccgcuuccagacccuccuggcccugcaccgguccuaccucacgccgggggacagcagcuccggcuggaccgcgggcgccgccgccuacuacgugggguaccugcagccccgcaccuuccugcucaaguacaacgagaacggcaccaucacggacgcggucgacugcgcccuggacccccugagcgagaccaagugcacccucaaguccuucaccguggagaaggggaucuaccagacgagcaacuuccgggugcagcccaccgaguccaucguccgcuucccgaacaucaccaaccugugccccuucggcgagguguucaacgccacccgguucgccagcgucuacgccuggaaccgcaagcggaucuccaacugcguggcggacuacagcgugcuguacaacuccgccagcuucuccacguucaagugcuacggcgucagccccaccaagcucaacgaccugugcuucaccaacguguacgccgacuccuucgugauccgcggggacgagguccggcagaucgcccccggccagaccgggaagaucgccgacuacaacuacaagcugccggacgacuucacgggcugcgugaucgcguggaacagcaacaaccucgacuccaaggucgggggcaacuacaacuaccuguaccgccuguuccgcaagagcaaccucaagcccuucgagcgggacaucuccaccgagaucuaccaggccggcagcacccccugcaacgggguggagggcuucaacugcuacuucccccugcaguccuacggguuccagccgaccaacggcgugggguaccagcccuaccggguggucgugcugagcuucgagcuccugcacgcccccgccacggugugcggccccaagaaguccaccaaccuggucaagaacaagugcgugaacuucaacuucaacggccucaccgggaccggcgugcugaccgagagcaacaagaaguuccugccguuccagcaguucgggcgcgacaucgccgacacgaccgacgcgguccgcgacccccagacccuggagauccucgacaucacccccugcagcuucggcgggguguccgugaucacgccgggcaccaacaccagcaaccaggucgccgugcuguaccagggcgugaacugcaccgagguccccguggccauccacgccgaccagcugacgcccaccuggcggguguacuccaccgggagcaacgucuuccagacccgcgccggcugccucaucggggcggagcacgugaacaacuccuacgagugcgacauccccaucggcgccggcaucugcgccagcuaccagacgcagaccaacuccccgcggcgcgcccggagcguggcgucccagagcgucaucgccuacaccaugucccugggggccgagaacagcguggccuacuccaacaacagcaucgccauccccaccaacuucacgaucuccgugaccaccgagauccugcccgucagcaugaccaagacgagcguggacugcaccauguacaucugcggcgacuccaccgagugcagcaaccuccugcugcaguacggguccuucugcacccagcucaaccgcgcgcugacgggcaucgccguggagcaggacaagaacacccaggaggucuucgcccaggugaagcagaucuacaagacgcccccgaucaaggacuucgggggcuucaacuucagccagauccugcccgaccccuccaagcccagcaagcgguccuucaucgaggaccuccuguucaacaaggugacccuggccgacgccggcuucaucaagcaguacggggacugccucggcgacaucgcggcccgcgaccugaucugcgcccagaaguucaacgggcugaccguccucccgccccugcugaccgacgagaugaucgcccaguacaccagcgcccuccuggcgggcaccaucacguccggguggaccuucggcgccggcgccgcccugcagauccccuucgcgaugcagauggccuaccgguucaacgggaucggcgugacccagaacgugcucuacgagaaccagaagcugaucgccaaccaguucaacagcgccaucgggaagauccaggacucccugagcuccaccgccagcgcgcucggcaagcugcaggacgucgugaaccagaacgcccaggcccugaacacgcucgugaagcagcuguccagcaacuucggggccaucuccagcguccugaacgacauccucucccgccuggacaagguggaggccgaggugcagaucgaccggcugaucaccggccgccuccagagccugcagaccuacgucacccagcagcugauccgggcggccgagauccgcgccagcgccaaccucgccgcgaccaagauguccgagugcgugcugggccagagcaagcggguggacuucugcgggaagggcuaccaccugauguccuucccccagagcgccccgcacggggucguguuccuccacgucacguacgugcccgcccaggagaagaacuucaccaccgcccccgcgaucugccacgacggcaaggcccacuucccccgcgaggggguguucgucuccaacggcacccacugguucgugacgcagcggaacuucuacgagccgcagaucaucaccaccgacaacaccuucgugagcggcaacugcgacgucgugaucgggaucgugaacaacacggucuacgacccccugcagcccgagcuggacuccuucaaggaggagcucgacaaguacuucaagaaccacaccagccccgacguggaccugggcgacaucuccgggaucaacgccagcguggucaacauccagaaggagaucgaccgccugaacgagguggccaagaaccucaacgagucccugaucgaccugcaggagcucggcaaguacgagcaguacaucaaguggccgugguacaucuggcugggcuucaucgccgggcugaucgcgaucgugauggucaccaucaugcucugcugcaugaccagcugcugcuccugccugaagggcugcugcagcugcggguccugcugcaaguucgacgaggacgacagcgagcccgugcugaagggcgugaagcuccacuacacgugaggacuaguguccaccugucccuccugggcugcuggauugucucguuuuccugccaaauaaacaggaucagcgcuuuacagaucucaaaggcucuuuucagagccaccaaaaaaaaaaaaaaaaaaaaaaaaaaaaaaaaaaaaaaaaaaaaaaaaaaaaaaaaaaaaaaaaaaaaaaaaaaaaaaaaaaaaaaaaaaaaaaaaaaaaa

SEQ ID NO: 23876 - RNA, 4129 nt, Artificial Sequence
  SARS-CoV-2/Wuhan/WIV05/2019__EPI_ISL_402128 spike protein mRNA gc (1-1273)(D614G_M1229I)
aggagacccgugacccggaaguuguacggcuacgcgacuuucccucccacaaacccucgcgcccuuccuuuccuacuugggcccggcagaaagcuuaccauguucguguuccugguccuccugccccuggugagcucccagugcgugaaccucaccacccgcacgcagcugccgcccgccuacaccaacagcuucacccggggcgucuacuaccccgacaagguguuccgcuccagcgugcugcacuccacccaggaccucuuccugcccuucuucagcaacgucacgugguuccacgccauccacguguccgggaccaacggcaccaagcgguucgacaacccggugcugcccuucaacgacggggucuacuucgcgagcaccgagaaguccaacaucauccgcggcuggaucuucgggacgacccucgacagcaagacccagucccugcugaucgugaacaacgccaccaacguggucaucaaggugugcgaguuccaguucugcaacgaccccuuccucggcguguacuaccacaagaacaacaagagcuggauggaguccgaguuccgggucuacagcuccgccaacaacugcacguucgaguacgugagccagcccuuccugauggaccuggagggcaagcaggggaacuucaagaaccuccgcgaguucguguucaagaacaucgacggcuacuucaagaucuacuccaagcacaccccgaucaaccugguccgggaccugccccagggguucagcgcccucgagccccugguggaccugcccaucggcaucaacaucacccgcuuccagacccuccuggcccugcaccgguccuaccucacgccgggggacagcagcuccggcuggaccgcgggcgccgccgccuacuacgugggguaccugcagccccgcaccuuccugcucaaguacaacgagaacggcaccaucacggacgcggucgacugcgcccuggacccccugagcgagaccaagugcacccucaaguccuucaccguggagaaggggaucuaccagacgagcaacuuccgggugcagcccaccgaguccaucguccgcuucccgaacaucaccaaccugugccccuucggcgagguguucaacgccacccgguucgccagcgucuacgccuggaaccgcaagcggaucuccaacugcguggcggacuacagcgugcuguacaacuccgccagcuucuccacguucaagugcuacggcgucagccccaccaagcucaacgaccugugcuucaccaacguguacgccgacuccuucgugauccgcggggacgagguccggcagaucgcccccggccagaccgggaagaucgccgacuacaacuacaagcugccggacgacuucacgggcugcgugaucgcguggaacagcaacaaccucgacuccaaggucgggggcaacuacaacuaccuguaccgccuguuccgcaagagcaaccucaagcccuucgagcgggacaucuccaccgagaucuaccaggccggcagcacccccugcaacgggguggagggcuucaacugcuacuucccccugcaguccuacggguuccagccgaccaacggcgugggguaccagcccuaccggguggucgugcugagcuucgagcuccugcacgcccccgccacggugugcggccccaagaaguccaccaaccuggucaagaacaagugcgugaacuucaacuucaacggccucaccgggaccggcgugcugaccgagagcaacaagaaguuccugccguuccagcaguucgggcgcgacaucgccgacacgaccgacgcgguccgcgacccccagacccuggagauccucgacaucacccccugcagcuucggcgggguguccgugaucacgccgggcaccaacaccagcaaccaggucgccgugcuguaccagggcgugaacugcaccgagguccccguggccauccacgccgaccagcugacgcccaccuggcggguguacuccaccgggagcaacgucuuccagacccgcgccggcugccucaucggggcggagcacgugaacaacuccuacgagugcgacauccccaucggcgccggcaucugcgccagcuaccagacgcagaccaacuccccgcggcgcgcccggagcguggcgucccagagcaucaucgccuacaccaugucccugggggccgagaacagcgucgccuacuccaacaacagcaucgccauccccaccaacuucacgaucuccgugaccaccgagauccugcccgugagcaugaccaagacgagcgucgacugcaccauguacaucugcggcgacuccaccgagugcagcaaccuccugcugcaguacggguccuucugcacccagcucaaccgcgcgcugacgggcaucgccguggagcaggacaagaacacccaggagguguucgcccaggucaagcagaucuacaagacgcccccgaucaaggacuucgggggcuucaacuucagccagauccugcccgaccccuccaagcccagcaagcgguccuucaucgaggaccuccuguucaacaaggugacccuggccgacgccggcuucaucaagcaguacggggacugccucggcgacaucgcggcccgcgaccugaucugcgcccagaaguucaacgggcugaccgugcucccgccccugcugaccgacgagaugaucgcccaguacaccagcgcccuccuggcgggcaccaucacguccggguggaccuucggcgccggcgccgcccugcagauccccuucgcgaugcagauggccuaccgguucaacgggaucggcgucacccagaacgugcucuacgagaaccagaagcugaucgccaaccaguucaacagcgccaucgggaagauccaggacucccugagcuccaccgccagcgcgcucggcaagcugcaggacguggucaaccagaacgcccaggcccugaacacgcucgugaagcagcuguccagcaacuucggggccaucuccagcgugcugaacgacauccucucccgccuggacaaggucgaggccgaggugcagaucgaccggcugaucaccggccgccuccagagccugcagaccuacgugacccagcagcugauccgggcggccgagauccgcgccagcgccaaccucgccgcgaccaagauguccgagugcguccugggccagagcaagcggguggacuucugcgggaagggcuaccaccugauguccuucccccagagcgccccgcacgggguggucuuccuccacgugacguacguccccgcccaggagaagaacuucaccaccgcccccgcgaucugccacgacggcaaggcccacuucccccgcgaggggguguucguguccaacggcacccacugguucgucacgcagcggaacuucuacgagccgcagaucaucaccaccgacaacaccuucgugagcggcaacugcgacguggucaucgggaucgugaacaacacgguguacgacccccugcagcccgagcuggacuccuucaaggaggagcucgacaaguacuucaagaaccacaccagccccgacgucgaccugggcgacaucuccgggaucaacgccagcguggugaacauccagaaggagaucgaccgccugaacgaggucgccaagaaccucaacgagucccugaucgaccugcaggagcucggcaaguacgagcaguacaucaaguggccgugguacaucuggcugggcuucaucgccgggcugaucgcgaucgugaucgugaccaucaugcucugcugcaugaccagcugcugcuccugccugaagggcugcugcagcugcggguccugcugcaaguucgacgaggacgacagcgagcccguccugaagggcgugaagcuccacuacacgugaggacuaguguccaccugucccuccugggcugcuggauugucucguuuuccugccaaauaaacaggaucagcgcuuuacagaucucaaaggcucuuuucagagccaccaaaaaaaaaaaaaaaaaaaaaaaaaaaaaaaaaaaaaaaaaaaaaaaaaaaaaaaaaaaaaaaaaaaaaaaaaaaaaaaaaaaaaaaaaaaaaaaaaaaaa

SEQ ID NO: 23877 - RNA, 4123 nt, Artificial Sequence
  SARS-CoV-2/Wuhan/WIV05/2019__EPI_ISL_402128 spike protein mRNA gc (1-1273)(H69del_V70del_A222V_Y453F_S477N_D614G_I692V)
aggagacccgugacccggaaguuguacggcuacgcgacuuucccucccacaaacccucgcgcccuuccuuuccuacuugggcccggcagaaagcuuaccauguucguguuccugguccuccugccccuggugagcucccagugcgugaaccucaccacccgcacgcagcugccgcccgccuacaccaacagcuucacccggggcgucuacuaccccgacaagguguuccgcuccagcgugcugcacuccacccaggaccucuuccugcccuucuucagcaacgucacgugguuccacgccaucuccgggaccaacggcaccaagcgguucgacaacccggugcugcccuucaacgacgggguguacuucgcgagcaccgagaaguccaacaucauccgcggcuggaucuucgggacgacccucgacagcaagacccagucccugcugaucgucaacaacgccaccaacguggugaucaaggucugcgaguuccaguucugcaacgaccccuuccucggcguguacuaccacaagaacaacaagagcuggauggaguccgaguuccggguguacagcuccgccaacaacugcacguucgaguacgucagccagcccuuccugauggaccuggagggcaagcaggggaacuucaagaaccuccgcgaguucguguucaagaacaucgacggcuacuucaagaucuacuccaagcacaccccgaucaaccuggugcgggaccugccccagggguucagcguccucgagccccugguggaccugcccaucggcaucaacaucacccgcuuccagacccuccuggcccugcaccgguccuaccucacgccgggggacagcagcuccggcuggaccgccggcgcggccgccuacuacgugggguaccugcagccccgcaccuuccugcucaaguacaacgagaacggcaccaucacggacgccgucgacugcgcgcuggacccccugagcgagaccaagugcacccucaaguccuucaccguggagaaggggaucuaccagacgagcaacuuccgggugcagcccaccgaguccaucguccgcuucccgaacaucaccaaccugugccccuucggcgagguguucaacgccacccgguucgccagcgucuacgccuggaaccgcaagcggaucuccaacugcguggccgacuacagcgugcuguacaacuccgcgagcuucuccacguucaagugcuacggcgucagccccaccaagcucaacgaccugugcuucaccaacguguacgccgacuccuucgugauccgcggggacgagguccggcagaucgcccccggccagaccgggaagaucgccgacuacaacuacaagcugccggacgacuucacgggcugcgugaucgccuggaacagcaacaaccucgacuccaaggucgggggcaacuacaacuaccuguuccgccuguuccgcaagagcaaccucaagcccuucgagcgggacaucuccaccgagaucuaccaggcgggcaacacccccugcaacgggguggagggcuucaacugcuacuucccccugcagagcuacggguuccagccgaccaacggcgugggguaccagcccuaccggguggucgugcuguccuucgagcuccugcacgcccccgccacggugugcggccccaagaaguccaccaaccuggucaagaacaagugcgugaacuucaacuucaacggccucaccgggaccggcgugcugaccgagagcaacaagaaguuccugccguuccagcaguucgggcgcgacaucgccgacacgaccgacgccguccgcgacccccagacccuggagauccucgacaucacccccugcagcuucggcggggugagcgugaucacgccgggcaccaacaccuccaaccaggucgcggugcuguaccagggcgugaacugcaccgagguccccguggccauccacgccgaccagcugacgcccaccuggcggguguacagcaccggguccaacgucuuccagacccgcgccggcugccucaucggggccgagcacgugaacaacagcuacgagugcgacauccccaucggcgcgggcaucugcgccuccuaccagacgcagaccaacagcccgcggcgcgcccgguccguggccagccaguccgucaucgcguacaccaugagccugggggccgagaacuccguggccuacagcaacaacuccaucgccauccccaccaacuucacgaucagcgugaccaccgagauccugcccgucuccaugaccaagacgagcguggacugcaccauguacaucugcggcgacagcaccgagugcuccaaccuccugcugcaguacgggagcuucugcacccagcucaaccgcgcccugacgggcaucgcgguggagcaggacaagaacacccaggaggucuucgcccaggugaagcagaucuacaagacgcccccgaucaaggacuucgggggcuucaacuucucccagauccugcccgaccccagcaagcccuccaagcggagcuucaucgaggaccuccuguucaacaaggugacccuggccgacgccggcuucaucaagcaguacggggacugccucggcgacaucgccgcgcgcgaccugaucugcgcccagaaguucaacgggcugaccguccucccgccccugcugaccgacgagaugaucgcccaguacaccuccgcccuccuggccggcaccaucacgagcggguggaccuucggcgcgggcgccgcccugcagauccccuucgccaugcagauggcguaccgguucaacgggaucggcgugacccagaacgugcucuacgagaaccagaagcugaucgccaaccaguucaacuccgccaucgggaagauccaggacagccuguccagcaccgccuccgcccucggcaagcugcaggacgucgugaaccagaacgcgcaggcccugaacacgcucgugaagcagcugagcuccaacuucggggccaucagcuccguccugaacgacauccucagccgccuggacaagguggaggccgaggugcagaucgaccggcugaucaccggccgccuccagucccugcagaccuacgucacccagcagcugauccgggccgcggagauccgcgccagcgccaaccucgccgccaccaagaugagcgagugcgugcugggccaguccaagcggguggacuucugcgggaagggcuaccaccugaugagcuucccccaguccgcgccgcacggggucguguuccuccacgucacguacgugcccgcccaggagaagaacuucaccaccgcccccgccaucugccacgacggcaaggcgcacuucccccgcgaggggguguucgucagcaacggcacccacugguucgugacgcagcggaacuucuacgagccgcagaucaucaccaccgacaacaccuucguguccggcaacugcgacgucgugaucgggaucgugaacaacacggucuacgacccccugcagcccgagcuggacagcuucaaggaggagcucgacaaguacuucaagaaccacaccucccccgacguggaccugggcgacaucagcgggaucaacgccuccguggucaacauccagaaggagaucgaccgccugaacgagguggccaagaaccucaacgagagccugaucgaccugcaggagcucggcaaguacgagcaguacaucaaguggccgugguacaucuggcugggcuucaucgccgggcugaucgccaucgugauggucaccaucaugcucugcugcaugaccuccugcugcagcugccugaagggcugcugcuccugcgggagcugcugcaaguucgacgaggacgacuccgagcccgugcugaagggcgugaagcuccacuacacgugaggacuaguguccaccugucccuccugggcugcuggauugucucguuuuccugccaaauaaacaggaucagcgcuuuacagaucucaaaggcucuuuucagagccaccaaaaaaaaaaaaaaaaaaaaaaaaaaaaaaaaaaaaaaaaaaaaaaaaaaaaaaaaaaaaaaaaaaaaaaaaaaaaaaaaaaaaaaaaaaaaaaaaaaaaa

SEQ ID NO: 23878 - RNA, 4123 nt, Artificial Sequence
  SARS-CoV-2/Wuhan/WIV05/2019__EPI_ISL_402128 spike protein mRNA gc (1-1273)(H69del_V70del_Y453F_D614G_I692V_M1229I)
aggagacccgugacccggaaguuguacggcuacgcgacuuucccucccacaaacccucgcgcccuuccuuuccuacuugggcccggcagaaagcuuaccauguucguguuccugguccuccugccccuggugagcucccagugcgugaaccucaccacccgcacgcagcugccgcccgccuacaccaacagcuucacccggggcgucuacuaccccgacaagguguuccgcuccagcgugcugcacuccacccaggaccucuuccugcccuucuucagcaacgucacgugguuccacgccaucuccgggaccaacggcaccaagcgguucgacaacccggugcugcccuucaacgacgggguguacuucgcgagcaccgagaaguccaacaucauccgcggcuggaucuucgggacgacccucgacagcaagacccagucccugcugaucgucaacaacgccaccaacguggugaucaaggucugcgaguuccaguucugcaacgaccccuuccucggcguguacuaccacaagaacaacaagagcuggauggaguccgaguuccggguguacagcuccgccaacaacugcacguucgaguacgucagccagcccuuccugauggaccuggagggcaagcaggggaacuucaagaaccuccgcgaguucguguucaagaacaucgacggcuacuucaagaucuacuccaagcacaccccgaucaaccuggugcgggaccugccccagggguucagcgcccucgagccccuggucgaccugcccaucggcaucaacaucacccgcuuccagacccuccuggcccugcaccgguccuaccucacgccgggggacagcagcuccggcuggaccgcgggcgccgccgccuacuacgugggguaccugcagccccgcaccuuccugcucaaguacaacgagaacggcaccaucacggacgcgguggacugcgcccuggacccccugagcgagaccaagugcacccucaaguccuucaccgucgagaaggggaucuaccagacgagcaacuuccgggugcagcccaccgaguccaucgugcgcuucccgaacaucaccaaccugugccccuucggcgaggucuucaacgccacccgguucgccagcguguacgccuggaaccgcaagcggaucuccaacugcgucgcggacuacagcgugcuguacaacuccgccagcuucuccacguucaagugcuacggcgugagccccaccaagcucaacgaccugugcuucaccaacgucuacgccgacuccuucgugauccgcggggacgaggugcggcagaucgcccccggccagaccgggaagaucgccgacuacaacuacaagcugccggacgacuucacgggcugcgucaucgcguggaacagcaacaaccucgacuccaaggucgggggcaacuacaacuaccuguuccgccuguuccgcaagagcaaccucaagcccuucgagcgggacaucuccaccgagaucuaccaggccggcagcacccccugcaacgggguggagggcuucaacugcuacuucccccugcaguccuacggguuccagccgaccaacggcgugggguaccagcccuaccggguggugguccugagcuucgagcuccugcacgcccccgccacggugugcggccccaagaaguccaccaaccuggugaagaacaagugcgucaacuucaacuucaacggccucaccgggaccggcgugcugaccgagagcaacaagaaguuccugccguuccagcaguucgggcgcgacaucgccgacacgaccgacgcggugcgcgacccccagacccuggagauccucgacaucacccccugcagcuucggcggggucuccgugaucacgccgggcaccaacaccagcaaccagguggccguccuguaccagggcgugaacugcaccgaggugcccgucgccauccacgccgaccagcugacgcccaccuggcggguguacuccaccgggagcaacguguuccagacccgcgccggcugccucaucggggcggagcacgucaacaacuccuacgagugcgacauccccaucggcgccggcaucugcgccagcuaccagacgcagaccaacuccccgcggcgcgcccggagcguggcgucccagagcgugaucgccuacaccaugucccugggggccgagaacagcgucgccuacuccaacaacagcaucgccauccccaccaacuucacgaucuccgugaccaccgagauccugcccgugagcaugaccaagacgagcgucgacugcaccauguacaucugcggcgacuccaccgagugcagcaaccuccugcugcaguacggguccuucugcacccagcucaaccgcgcgcugacgggcaucgccguggagcaggacaagaacacccaggagguguucgcccaggucaagcagaucuacaagacgcccccgaucaaggacuucgggggcuucaacuucagccagauccugcccgaccccuccaagcccagcaagcgguccuucaucgaggaccuccuguucaacaaggugacccuggccgacgccggcuucaucaagcaguacggggacugccucggcgacaucgcggcccgcgaccugaucugcgcccagaaguucaacgggcugaccgugcucccgccccugcugaccgacgagaugaucgcccaguacaccagcgcccuccuggcgggcaccaucacguccggguggaccuucggcgccggcgccgcccugcagauccccuucgcgaugcagauggccuaccgguucaacgggaucggcgucacccagaacgugcucuacgagaaccagaagcugaucgccaaccaguucaacagcgccaucgggaagauccaggacucccugagcuccaccgccagcgcgcucggcaagcugcaggacguggucaaccagaacgcccaggcccugaacacgcucgugaagcagcuguccagcaacuucggggccaucuccagcgugcugaacgacauccucucccgccuggacaaggucgaggccgaggugcagaucgaccggcugaucaccggccgccuccagagccugcagaccuacgugacccagcagcugauccgggcggccgagauccgcgccagcgccaaccucgccgcgaccaagauguccgagugcguccugggccagagcaagcggguggacuucugcgggaagggcuaccaccugauguccuucccccagagcgccccgcacgggguggucuuccuccacgugacguacguccccgcccaggagaagaacuucaccaccgcccccgcgaucugccacgacggcaaggcccacuucccccgcgaggggguguucguguccaacggcacccacugguucgucacgcagcggaacuucuacgagccgcagaucaucaccaccgacaacaccuucgugagcggcaacugcgacguggucaucgggaucgugaacaacacgguguacgacccccugcagcccgagcuggacuccuucaaggaggagcucgacaaguacuucaagaaccacaccagccccgacgucgaccugggcgacaucuccgggaucaacgccagcguggugaacauccagaaggagaucgaccgccugaacgaggucgccaagaaccucaacgagucccugaucgaccugcaggagcucggcaaguacgagcaguacaucaaguggccgugguacaucuggcugggcuucaucgccgggcugaucgcgaucgugaucgugaccaucaugcucugcugcaugaccagcugcugcuccugccugaagggcugcugcagcugcggguccugcugcaaguucgacgaggacgacagcgagcccguccugaagggcgugaagcuccacuacacgugaggacuaguguccaccugucccuccugggcugcuggauugucucguuuuccugccaaauaaacaggaucagcgcuuuacagaucucaaaggcucuuuucagagccaccaaaaaaaaaaaaaaaaaaaaaaaaaaaaaaaaaaaaaaaaaaaaaaaaaaaaaaaaaaaaaaaaaaaaaaaaaaaaaaaaaaaaaaaaaaaaaaaaaaaaa

SEQ ID NO: 23879 - RNA, 4120 nt, Artificial Sequence
  SARS-CoV-2/Wuhan/WIV05/2019__EPI_ISL_402128 spike protein mRNA gc (1-1273)(H69del_V70del_Y144del_N501Y_A570D_D614G_P681H_T716I_S982 A_D1118H)
aggagacccgugacccggaaguuguacggcuacgcgacuuucccucccacaaacccucgcgcccuuccuuuccuacuugggcccggcagaaagcuuaccauguucguguuccugguccuccugccccuggugagcucccagugcgugaaccucaccacccgcacgcagcugccgcccgccuacaccaacagcuucacccggggcgucuacuaccccgacaagguguuccgcuccagcgugcugcacuccacccaggaccucuuccugcccuucuucagcaacgucacgugguuccacgccaucuccgggaccaacggcaccaagcgguucgacaacccggugcugcccuucaacgacgggguguacuucgcgagcaccgagaaguccaacaucauccgcggcuggaucuucgggacgacccucgacagcaagacccagucccugcugaucgucaacaacgccaccaacguggugaucaaggucugcgaguuccaguucugcaacgaccccuuccucggcguguaccacaagaacaacaagagcuggauggaguccgaguuccggguguacagcuccgccaacaacugcacguucgaguacgucagccagcccuuccugauggaccuggagggcaagcaggggaacuucaagaaccuccgcgaguucguguucaagaacaucgacggcuacuucaagaucuacuccaagcacaccccgaucaaccuggugcgggaccugccccagggguucagcgcccucgagccccuggucgaccugcccaucggcaucaacaucacccgcuuccagacccuccuggcccugcaccgguccuaccucacgccgggggacagcagcuccggcuggaccgcgggcgccgccgccuacuacgugggguaccugcagccccgcaccuuccugcucaaguacaacgagaacggcaccaucacggacgcgguggacugcgcccuggacccccugagcgagaccaagugcacccucaaguccuucaccgucgagaaggggaucuaccagacgagcaacuuccgggugcagcccaccgaguccaucgugcgcuucccgaacaucaccaaccugugccccuucggcgaggucuucaacgccacccgguucgccagcguguacgccuggaaccgcaagcggaucuccaacugcgucgcggacuacagcgugcuguacaacuccgccagcuucuccacguucaagugcuacggcgugagccccaccaagcucaacgaccugugcuucaccaacgucuacgccgacuccuucgugauccgcggggacgaggugcggcagaucgcccccggccagaccgggaagaucgccgacuacaacuacaagcugccggacgacuucacgggcugcgucaucgcguggaacagcaacaaccucgacuccaaggucgggggcaacuacaacuaccuguaccgccuguuccgcaagagcaaccucaagcccuucgagcgggacaucuccaccgagaucuaccaggccggcagcacccccugcaacgggguggagggcuucaacugcuacuucccccugcaguccuacggguuccagccgaccuacggcgugggguaccagcccuaccggguggugguccugagcuucgagcuccugcacgcccccgccacggugugcggccccaagaaguccaccaaccuggugaagaacaagugcgucaacuucaacuucaacggccucaccgggaccggcgugcugaccgagagcaacaagaaguuccugccguuccagcaguucgggcgcgacaucgacgacacgaccgacgccgugcgcgacccccagacccuggagauccucgacaucacccccugcagcuucggcggggucuccgugaucacgccgggcaccaacaccagcaaccagguggcgguccuguaccagggcgugaacugcaccgaggugcccgucgccauccacgccgaccagcugacgcccaccuggcggguguacuccaccgggagcaacguguuccagacccgcgccggcugccucaucggggccgagcacgucaacaacuccuacgagugcgacauccccaucggcgcgggcaucugcgccagcuaccagacgcagaccaacucccaccggcgcgcccggagcguggccucccagagcaucaucgcguacaccaugucccugggggccgagaacagcguggccuacuccaacaacagcaucgccaucccgaucaacuucaccaucuccgucacgaccgagauccugcccgugagcaugaccaagaccagcguggacugcacgauguacaucugcggcgacuccaccgagugcagcaaccuccugcugcaguacggguccuucugcacccagcucaaccgcgcccugaccggcaucgcggucgagcaggacaagaacacgcaggagguguucgcccaggugaagcagaucuacaagaccccgcccaucaaggacuucgggggcuucaacuucagccagauccugcccgaccccuccaagcccagcaagcgguccuucaucgaggaccuccuguucaacaaggucacccuggccgacgccggcuucaucaagcaguacggggacugccucggcgacaucgccgcgcgcgaccugaucugcgcccagaaguucaacgggcugaccgugcugcccccgcuccugacggacgagaugaucgcccaguacaccagcgcccuccuggccggcaccaucaccuccggguggacguucggcgcgggcgccgcccugcagauccccuucgccaugcagauggcguaccgguucaacgggaucggcgugacccagaacguccucuacgagaaccagaagcugaucgccaaccaguucaacagcgccaucgggaagauccaggacucccugagcuccaccgccagcgcccucggcaagcugcaggacguggugaaccagaacgcgcaggcccugaacacccucgucaagcagcuguccagcaacuucggggccaucuccagcgugcugaacgacauccucgcccgccuggacaagguggaggccgagguccagaucgaccggcugaucacgggccgccuccagucccugcagaccuacgugacccagcagcugauccgggcggccgagauccgcgccagcgccaaccucgccgcgaccaagaugagcgagugcgugcugggccaguccaagcgggucgacuucugcgggaagggcuaccaccugaugagcuucccccaguccgcgccccacggggugguguuccuccacgucaccuacgugccggcccaggagaagaacuucacgaccgcccccgccaucugccacgacggcaaggcccacuucccccgcgagggggucuucgugagcaacggcacccacugguucgugacccagcggaacuucuacgagccccagaucaucacgacccacaacaccuucgucuccggcaacugcgacguggugaucgggaucgucaacaacaccguguacgacccgcugcagcccgagcuggacagcuucaaggaggagcucgacaaguacuucaagaaccacacgucccccgacguggaccugggcgacaucagcgggaucaacgccuccgucgugaacauccagaaggagaucgaccgccugaacgagguggccaagaaccucaacgagagccugaucgaccugcaggagcucggcaaguacgagcaguacaucaaguggcccugguacaucuggcugggcuucaucgccgggcugaucgcgaucgucauggugaccaucaugcucugcugcaugaccuccugcugcagcugccugaagggcugcugcuccugcgggagcugcugcaaguucgacgaggacgacuccgagccggugcugaagggcgucaagcuccacuacaccugaggacuaguguccaccugucccuccugggcugcuggauugucucguuuuccugccaaauaaacaggaucagcgcuuuacagaucucaaaggcucuuuucagagccaccaaaaaaaaaaaaaaaaaaaaaaaaaaaaaaaaaaaaaaaaaaaaaaaaaaaaaaaaaaaaaaaaaaaaaaaaaaaaaaaaaaaaaaaaaaaaaaaaaaaaa

SEQ ID NO: 23880 - RNA, 4129 nt, Artificial Sequence
  SARS-CoV-2/Wuhan/WIV05/2019__EPI_ISL_402128 spike protein mRNA gc (1-1273)(K417N_E484K_N501Y_D614G)
aggagacccgugacccggaaguuguacggcuacgcgacuuucccucccacaaacccucgcgcccuuccuuuccuacuugggcccggcagaaagcuuaccauguucguguuccugguccuccugccccuggugagcucccagugcgugaaccucaccacccgcacgcagcugccgcccgccuacaccaacagcuucacccggggcgucuacuaccccgacaagguguuccgcuccagcgugcugcacuccacccaggaccucuuccugcccuucuucagcaacgucacgugguuccacgccauccacguguccgggaccaacggcaccaagcgguucgacaacccggugcugcccuucaacgacggggucuacuucgcgagcaccgagaaguccaacaucauccgcggcuggaucuucgggacgacccucgacagcaagacccagucccugcugaucgugaacaacgccaccaacguggucaucaaggugugcgaguuccaguucugcaacgaccccuuccucggcguguacuaccacaagaacaacaagagcuggauggaguccgaguuccgggucuacagcuccgccaacaacugcacguucgaguacgugagccagcccuuccugauggaccuggagggcaagcaggggaacuucaagaaccuccgcgaguucguguucaagaacaucgacggcuacuucaagaucuacuccaagcacaccccgaucaaccugguccgggaccugccccagggguucagcgcccucgagccccugguggaccugcccaucggcaucaacaucacccgcuuccagacccuccuggcccugcaccgguccuaccucacgccgggggacagcagcuccggcuggaccgcgggcgccgccgccuacuacgugggguaccugcagccccgcaccuuccugcucaaguacaacgagaacggcaccaucacggacgcggucgacugcgcccuggacccccugagcgagaccaagugcacccucaaguccuucaccguggagaaggggaucuaccagacgagcaacuuccgggugcagcccaccgaguccaucguccgcuucccgaacaucaccaaccugugccccuucggcgagguguucaacgccacccgguucgccagcgucuacgccuggaaccgcaagcggaucuccaacugcguggcggacuacagcgugcuguacaacuccgccagcuucuccacguucaagugcuacggcgucagccccaccaagcucaacgaccugugcuucaccaacguguacgccgacuccuucgugauccgcggggacgagguccggcagaucgcccccggccagaccgggaacaucgccgacuacaacuacaagcugccggacgacuucacgggcugcgugaucgcguggaacagcaacaaccucgacuccaaggucgggggcaacuacaacuaccuguaccgccuguuccgcaagagcaaccucaagcccuucgagcgggacaucuccaccgagaucuaccaggccggcagcacccccugcaacggggugaagggcuucaacugcuacuucccccugcaguccuacggguuccagccgaccuacggcgugggguaccagcccuaccggguggucgugcugagcuucgagcuccugcacgcccccgccacggugugcggccccaagaaguccaccaaccuggucaagaacaagugcgugaacuucaacuucaacggccucaccgggaccggcgugcugaccgagagcaacaagaaguuccugccguuccagcaguucgggcgcgacaucgccgacacgaccgacgcgguccgcgacccccagacccuggagauccucgacaucacccccugcagcuucggcgggguguccgugaucacgccgggcaccaacaccagcaaccaggucgccgugcuguaccagggcgugaacugcaccgagguccccguggccauccacgccgaccagcugacgcccaccuggcggguguacuccaccgggagcaacgucuuccagacccgcgccggcugccucaucggggcggagcacgugaacaacuccuacgagugcgacauccccaucggcgccggcaucugcgccagcuaccagacgcagaccaacuccccgcggcgcgcccggagcguggcgucccagagcaucaucgccuacaccaugucccugggggccgagaacagcgucgccuacuccaacaacagcaucgccauccccaccaacuucacgaucuccgugaccaccgagauccugcccgugagcaugaccaagacgagcgucgacugcaccauguacaucugcggcgacuccaccgagugcagcaaccuccugcugcaguacggguccuucugcacccagcucaaccgcgcgcugacgggcaucgccguggagcaggacaagaacacccaggagguguucgcccaggucaagcagaucuacaagacgcccccgaucaaggacuucgggggcuucaacuucagccagauccugcccgaccccuccaagcccagcaagcgguccuucaucgaggaccuccuguucaacaaggugacccuggccgacgccggcuucaucaagcaguacggggacugccucggcgacaucgcggcccgcgaccugaucugcgcccagaaguucaacgggcugaccgugcucccgccccugcugaccgacgagaugaucgcccaguacaccagcgcccuccuggcgggcaccaucacguccggguggaccuucggcgccggcgccgcccugcagauccccuucgcgaugcagauggccuaccgguucaacgggaucggcgucacccagaacgugcucuacgagaaccagaagcugaucgccaaccaguucaacagcgccaucgggaagauccaggacucccugagcuccaccgccagcgcgcucggcaagcugcaggacguggucaaccagaacgcccaggcccugaacacgcucgugaagcagcuguccagcaacuucggggccaucuccagcgugcugaacgacauccucucccgccuggacaaggucgaggccgaggugcagaucgaccggcugaucaccggccgccuccagagccugcagaccuacgugacccagcagcugauccgggcggccgagauccgcgccagcgccaaccucgccgcgaccaagauguccgagugcguccugggccagagcaagcggguggacuucugcgggaagggcuaccaccugauguccuucccccagagcgccccgcacgggguggucuuccuccacgugacguacguccccgcccaggagaagaacuucaccaccgcccccgcgaucugccacgacggcaaggcccacuucccccgcgaggggguguucguguccaacggcacccacugguucgucacgcagcggaacuucuacgagccgcagaucaucaccaccgacaacaccuucgugagcggcaacugcgacguggucaucgggaucgugaacaacacgguguacgacccccugcagcccgagcuggacuccuucaaggaggagcucgacaaguacuucaagaaccacaccagccccgacgucgaccugggcgacaucuccgggaucaacgccagcguggugaacauccagaaggagaucgaccgccugaacgaggucgccaagaaccucaacgagucccugaucgaccugcaggagcucggcaaguacgagcaguacaucaaguggccgugguacaucuggcugggcuucaucgccgggcugaucgcgaucgugauggugaccaucaugcucugcugcaugaccagcugcugcuccugccugaagggcugcugcagcugcggguccugcugcaaguucgacgaggacgacagcgagcccguccugaagggcgugaagcuccacuacacgugaggacuaguguccaccugucccuccugggcugcuggauugucucguuuuccugccaaauaaacaggaucagcgcuuuacagaucucaaaggcucuuuucagagccaccaaaaaaaaaaaaaaaaaaaaaaaaaaaaaaaaaaaaaaaaaaaaaaaaaaaaaaaaaaaaaaaaaaaaaaaaaaaaaaaaaaaaaaaaaaaaaaaaaaaaa

SEQ ID NO: 23881 - RNA, 4120 nt, Artificial Sequence
  SARS-CoV-2/Wuhan/WIV05/2019__EPI_ISL_402128 spike protein mRNA gc (1-1273)(L18F_D80A_D215G_L242del_A243del_L244del_R246I_K417N_E484 K_N501Y_D614G_A701V)
aggagacccgugacccggaaguuguacggcuacgcgacuuucccucccacaaacccucgcgcccuuccuuuccuacuugggcccggcagaaagcuuaccauguucguguuccugguccuccugccccuggugagcucccagugcgugaacuucaccacccgcacgcagcucccgcccgccuacaccaacagcuucacccggggcgucuacuaccccgacaagguguuccgcuccagcgugcugcacuccacccaggaccuguuccuccccuucuucagcaacgucacgugguuccacgccauccacguguccgggaccaacggcaccaagcgguucgcgaacccggugcugcccuucaacgacggggucuacuucgccagcaccgagaaguccaacaucauccgcggcuggaucuucgggacgacccuggacagcaagacccagucccuccugaucgugaacaacgccaccaacguggucaucaaggugugcgaguuccaguucugcaacgaccccuuccugggcguguacuaccacaagaacaacaagagcuggauggaguccgaguuccgggucuacagcuccgccaacaacugcacguucgaguacgugagccagcccuuccucauggaccuggagggcaagcaggggaacuucaagaaccugcgcgaguucguguucaagaacaucgacggcuacuucaagaucuacuccaagcacaccccgaucaaccucguccgggggcugccccagggcuucagcgcccuggagccccucguggaccugcccaucgggaucaacaucacccgcuuccagacccugcacaucuccuaccucacgccgggcgacagcagcuccggcuggaccgcgggggccgccgccuacuacgugggcuaccugcagccccggaccuuccugcucaaguacaacgagaacgggaccaucacggacgcggucgacugcgcccuggacccccugagcgagaccaagugcacccucaaguccuucaccguggagaagggcaucuaccagacgagcaacuuccgcgugcagcccaccgaguccaucguccgguucccgaacaucaccaaccugugccccuucggcgagguguucaacgccacccgcuucgccagcgucuacgccuggaaccggaagcgcaucuccaacugcguggcggacuacagcgugcuguacaacuccgccagcuucuccacguucaagugcuacggggucagccccaccaagcucaacgaccugugcuucaccaacguguacgccgacuccuucgugauccggggcgacgagguccgccagaucgcccccgggcagaccggcaacaucgccgacuacaacuacaagcugccggacgacuucacggggugcgugaucgcguggaacagcaacaaccucgacuccaaggugggcggcaacuacaacuaccuguaccggcuguuccgcaagagcaaccucaagcccuucgagcgggacaucuccaccgagaucuaccaggccgggagcacccccugcaacggcgucaagggguucaacugcuacuucccccugcaguccuacggcuuccagccgaccuacggggugggcuaccagcccuaccgcguggucgugcugagcuucgagcuccugcacgcccccgccacggugugcggccccaagaaguccaccaaccuggucaagaacaagugcgugaacuucaacuucaacgggcucaccggcaccggggugcugaccgagagcaacaagaaguuccugccguuccagcaguucggccgggacaucgccgacacgaccgacgcgguccgcgacccccagacccucgagauccuggacaucacccccugcagcuucgggggcguguccgugaucacgccgggcaccaacaccagcaaccaggucgccgugcuguaccagggggugaacugcaccgagguccccguggccauccacgccgaccagcugacgcccaccuggcgcguguacuccaccggcagcaacgucuuccagacccgggccgggugccucaucggcgcggagcacgugaacaacuccuacgagugcgacauccccaucggcgccgggaucugcgccagcuaccagacgcagaccaacuccccgcgccgggcccgcagcguggcgucccagagcaucaucgccuacaccaugucccugggcgucgagaacagcguggccuacuccaacaacagcaucgccauccccaccaacuucacgaucuccgugaccaccgagauccugcccgucagcaugaccaagacgagcguggacugcaccauguacaucugcggggacuccaccgagugcagcaaccuccugcugcaguacggcuccuucugcacccagcucaaccgggcccugacggggaucgcgguggagcaggacaagaacacccaggaggucuucgcccaggugaagcagaucuacaagacgcccccgaucaaggacuucggcggcuucaacuucagccagauccugcccgaccccuccaagcccagcaagcgcuccuucaucgaggaccuccuguucaacaaggugacccuggccgacgccggguucaucaagcaguacggcgacugccucggggacaucgccgcgcgggaccugaucugcgcccagaaguucaacggccugaccguccucccgccccugcugaccgacgagaugaucgcccaguacaccagcgcccuccuggccgggaccaucacguccggcuggaccuucggcgcgggggccgcccugcagauccccuucgccaugcagauggcguaccgcuucaacggcaucggggugacccagaacgugcucuacgagaaccagaagcugaucgccaaccaguucaacagcgccaucggcaagauccaggacucccugagcuccaccgccagcgcccucgggaagcugcaggacgucgugaaccagaacgcgcaggcccugaacacgcucgugaagcagcuguccagcaacuucggcgccaucuccagcguccugaacgacauccucucccggcuggacaagguggaggccgaggugcagaucgaccgccugaucaccggccggcuccagagccugcagaccuacgucacccagcagcugauccgcgccgcggagauccgggccagcgccaaccucgccgccaccaagauguccgagugcgugcuggggcagagcaagcgcguggacuucugcggcaagggguaccaccugauguccuucccccagagcgcgccgcacggcgucguguuccuccacgucacguacgugcccgcccaggagaagaacuucaccaccgcccccgccaucugccacgacgggaaggcgcacuucccccgggagggcguguucgucuccaacggcacccacugguucgugacgcagcgcaacuucuacgagccgcagaucaucaccaccgacaacaccuucgugagcgggaacugcgacgucgugaucggcaucgugaacaacacggucuacgacccccugcagcccgagcuggacuccuucaaggaggagcucgacaaguacuucaagaaccacaccagccccgacguggaccugggggacaucuccggcaucaacgccagcguggucaacauccagaaggagaucgaccggcugaacgagguggccaagaaccucaacgagucccugaucgaccugcaggagcucggcaaguacgagcaguacaucaaguggccgugguacaucuggcugggguucaucgccggccugaucgccaucgugauggucaccaucaugcucugcugcaugaccagcugcugcuccugccugaaggggugcugcagcugcggcuccugcugcaaguucgacgaggacgacagcgagcccgugcugaagggggugaagcuccacuacacgugaggacuaguguccaccugucccuccugggcugcuggauugucucguuuuccugccaaauaaacaggaucagcgcuuuacagaucucaaaggcucuuuucagagccaccaaaaaaaaaaaaaaaaaaaaaaaaaaaaaaaaaaaaaaaaaaaaaaaaaaaaaaaaaaaaaaaaaaaaaaaaaaaaaaaaaaaaaaaaaaaaaaaaaaaaa

SEQ ID NO: 23882 - RNA, 4129 nt, Artificial Sequence
  SARS-CoV-2/Wuhan/WIV05/2019__EPI_ISL_402128 spike protein mRNA gc (1-1273)(E484K_D614G)
aggagacccgugacccggaaguuguacggcuacgcgacuuucccucccacaaacccucgcgcccuuccuuuccuacuugggcccggcagaaagcuuaccauguucguguuccugguccuccugccccuggugagcucccagugcgugaaccucaccacccgcacgcagcugccgcccgccuacaccaacagcuucacccggggcgucuacuaccccgacaagguguuccgcuccagcgugcugcacuccacccaggaccucuuccugcccuucuucagcaacgucacgugguuccacgccauccacguguccgggaccaacggcaccaagcgguucgacaacccggugcugcccuucaacgacggggucuacuucgcgagcaccgagaaguccaacaucauccgcggcuggaucuucgggacgacccucgacagcaagacccagucccugcugaucgugaacaacgccaccaacguggucaucaaggugugcgaguuccaguucugcaacgaccccuuccucggcguguacuaccacaagaacaacaagagcuggauggaguccgaguuccgggucuacagcuccgccaacaacugcacguucgaguacgugagccagcccuuccugauggaccuggagggcaagcaggggaacuucaagaaccuccgcgaguucguguucaagaacaucgacggcuacuucaagaucuacuccaagcacaccccgaucaaccugguccgggaccugccccagggguucagcgcccucgagccccugguggaccugcccaucggcaucaacaucacccgcuuccagacccuccuggcccugcaccgguccuaccucacgccgggggacagcagcuccggcuggaccgcgggcgccgccgccuacuacgugggguaccugcagccccgcaccuuccugcucaaguacaacgagaacggcaccaucacggacgcggucgacugcgcccuggacccccugagcgagaccaagugcacccucaaguccuucaccguggagaaggggaucuaccagacgagcaacuuccgggugcagcccaccgaguccaucguccgcuucccgaacaucaccaaccugugccccuucggcgagguguucaacgccacccgguucgccagcgucuacgccuggaaccgcaagcggaucuccaacugcguggcggacuacagcgugcuguacaacuccgccagcuucuccacguucaagugcuacggcgucagccccaccaagcucaacgaccugugcuucaccaacguguacgccgacuccuucgugauccgcggggacgagguccggcagaucgcccccggccagaccgggaagaucgccgacuacaacuacaagcugccggacgacuucacgggcugcgugaucgcguggaacagcaacaaccucgacuccaaggucgggggcaacuacaacuaccuguaccgccuguuccgcaagagcaaccucaagcccuucgagcgggacaucuccaccgagaucuaccaggccggcagcacccccugcaacggggugaagggcuucaacugcuacuucccccugcaguccuacggguuccagccgaccaacggcgugggguaccagcccuaccggguggucgugcugagcuucgagcuccugcacgcccccgccacggugugcggccccaagaaguccaccaaccuggucaagaacaagugcgugaacuucaacuucaacggccucaccgggaccggcgugcugaccgagagcaacaagaaguuccugccguuccagcaguucgggcgcgacaucgccgacacgaccgacgcgguccgcgacccccagacccuggagauccucgacaucacccccugcagcuucggcgggguguccgugaucacgccgggcaccaacaccagcaaccaggucgccgugcuguaccagggcgugaacugcaccgagguccccguggccauccacgccgaccagcugacgcccaccuggcggguguacuccaccgggagcaacgucuuccagacccgcgccggcugccucaucggggcggagcacgugaacaacuccuacgagugcgacauccccaucggcgccggcaucugcgccagcuaccagacgcagaccaacuccccgcggcgcgcccggagcguggcgucccagagcaucaucgccuacaccaugucccugggggccgagaacagcgucgccuacuccaacaacagcaucgccauccccaccaacuucacgaucuccgugaccaccgagauccugcccgugagcaugaccaagacgagcgucgacugcaccauguacaucugcggcgacuccaccgagugcagcaaccuccugcugcaguacggguccuucugcacccagcucaaccgcgcgcugacgggcaucgccguggagcaggacaagaacacccaggagguguucgcccaggucaagcagaucuacaagacgcccccgaucaaggacuucgggggcuucaacuucagccagauccugcccgaccccuccaagcccagcaagcgguccuucaucgaggaccuccuguucaacaaggugacccuggccgacgccggcuucaucaagcaguacggggacugccucggcgacaucgcggcccgcgaccugaucugcgcccagaaguucaacgggcugaccgugcucccgccccugcugaccgacgagaugaucgcccaguacaccagcgcccuccuggcgggcaccaucacguccggguggaccuucggcgccggcgccgcccugcagauccccuucgcgaugcagauggccuaccgguucaacgggaucggcgucacccagaacgugcucuacgagaaccagaagcugaucgccaaccaguucaacagcgccaucgggaagauccaggacucccugagcuccaccgccagcgcgcucggcaagcugcaggacguggucaaccagaacgcccaggcccugaacacgcucgugaagcagcuguccagcaacuucggggccaucuccagcgugcugaacgacauccucucccgccuggacaaggucgaggccgaggugcagaucgaccggcugaucaccggccgccuccagagccugcagaccuacgugacccagcagcugauccgggcggccgagauccgcgccagcgccaaccucgccgcgaccaagauguccgagugcguccugggccagagcaagcggguggacuucugcgggaagggcuaccaccugauguccuucccccagagcgccccgcacgggguggucuuccuccacgugacguacguccccgcccaggagaagaacuucaccaccgcccccgcgaucugccacgacggcaaggcccacuucccccgcgaggggguguucguguccaacggcacccacugguucgucacgcagcggaacuucuacgagccgcagaucaucaccaccgacaacaccuucgugagcggcaacugcgacguggucaucgggaucgugaacaacacgguguacgacccccugcagcccgagcuggacuccuucaaggaggagcucgacaaguacuucaagaaccacaccagccccgacgucgaccugggcgacaucuccgggaucaacgccagcguggugaacauccagaaggagaucgaccgccugaacgaggucgccaagaaccucaacgagucccugaucgaccugcaggagcucggcaaguacgagcaguacaucaaguggccgugguacaucuggcugggcuucaucgccgggcugaucgcgaucgugauggugaccaucaugcucugcugcaugaccagcugcugcuccugccugaagggcugcugcagcugcggguccugcugcaaguucgacgaggacgacagcgagcccguccugaagggcgugaagcuccacuacacgugaggacuaguguccaccugucccuccugggcugcuggauugucucguuuuccugccaaauaaacaggaucagcgcuuuacagaucucaaaggcucuuuucagagccaccaaaaaaaaaaaaaaaaaaaaaaaaaaaaaaaaaaaaaaaaaaaaaaaaaaaaaaaaaaaaaaaaaaaaaaaaaaaaaaaaaaaaaaaaaaaaaaaaaaaaa

SEQ ID NO: 23883 - RNA, 4129 nt, Artificial Sequence
  SARS-CoV-2/Wuhan/WIV05/2019__EPI_ISL_402128 spike protein mRNA gc (1-1273)(L18F_T20N_P26S_D138Y_R190S_K417T_E484K_N501Y_D614G_H655Y _T1027I)
aggagacccgugacccggaaguuguacggcuacgcgacuuucccucccacaaacccucgcgcccuuccuuuccuacuugggcccggcagaaagcuuaccauguucguguuccugguccuccugccccuggugagcucccagugcgugaacuucaccaaccgcacccagcucccgagcgccuacacgaacuccuucacccggggcgucuacuaccccgacaagguguuccgcagcuccgugcugcacagcacccaggaccuguuccuccccuucuucuccaacgucaccugguuccacgccauccacgugagcgggacgaacggcaccaagcgguucgacaaccccgugcugccguucaacgacggggucuacuucgcguccaccgagaaguccaacaucauccgcggcuggaucuucgggaccacgcuggacuccaagacccagagccuccugaucgugaacaacgccaccaacguggucaucaaggugugcgaguuccaguucugcaacuaccccuuccugggcguguacuaccacaagaacaacaaguccuggauggagagcgaguuccgggucuacuccagcgccaacaacugcaccuucgaguacgugucccagcccuuccucauggaccuggagggcaagcaggggaacuucaagaaccugagcgaguucguguucaagaacaucgacggcuacuucaagaucuacuccaagcacacgcccaucaaccucguccgcgaccugccgcagggguucagcgcccuggagccccucguggaccugcccaucggcaucaacaucacccgguuccagacccugcucgcccugcaccgcagcuaccugacccccggggacuccagcuccggcuggacggcgggcgccgccgccuacuacgugggguaccuccagccgcggaccuuccugcugaaguacaacgagaacggcaccaucaccgacgcggucgacugcgcccucgacccccugagcgagacgaagugcacccugaaguccuucaccguggagaaggggaucuaccagaccagcaacuuccgcgugcagcccacggaguccaucguccgguuccccaacaucaccaaccucugcccguucggcgagguguucaacgccacccgcuucgccagcgucuacgccuggaaccggaagcgcaucuccaacugcguggcggacuacagcgugcuguacaacuccgccagcuucuccaccuucaagugcuacggcgucagccccacgaagcugaacgaccucugcuucaccaacguguacgccgacuccuucgugauccgcggggacgagguccggcagaucgcccccggccagaccgggaccaucgccgacuacaacuacaagcugcccgacgacuucacgggcugcgugaucgcguggaacagcaacaaccuggacuccaaggucgggggcaacuacaacuaccucuaccggcuguuccgcaagagcaaccugaagccguucgagcgggacaucuccaccgagaucuaccaggccggcagcacccccugcaacggggugaagggcuucaacugcuacuucccccuccagagcuacggguuccagcccaccuacggcgugggguaccagccguaccgcguggucgugcuguccuucgagcugcuccacgcccccgccacggugugcggccccaagaaguccaccaaccuggucaagaacaagugcgugaacuucaacuucaacggccugaccgggaccggcgugcucaccgagagcaacaagaaguuccugcccuuccagcaguucgggcgggacaucgccgacacgaccgacgcgguccgcgacccgcagacccuggagauccuggacaucacccccugcagcuucggcgggguguccgugaucacgcccggcaccaacaccagcaaccaggucgccgugcucuaccagggcgugaacugcaccgaggucccgguggccauccacgccgaccagcugacgcccaccuggcgcguguacuccaccgggagcaacgucuuccagacccgggccggcugccugaucggggcggaguacgugaacaacuccuacgagugcgacauccccaucggcgccggcaucugcgccagcuaccagacgcagaccaacagcccccgccgggcccgcagcguggcgucccagagcaucaucgccuacaccaugucccucggggccgagaacagcgucgccuacuccaacaacagcaucgccaucccgaccaacuucacgaucagcgugaccaccgagauccugcccguguccaugaccaagacgagcgucgacugcaccauguacaucugcggcgacuccaccgagugcagcaaccugcuccugcaguacggguccuucugcacccagcugaaccgggcgcucacgggcaucgccguggagcaggacaagaacacccaggagguguucgcccaggucaagcagaucuacaagaccccgcccaucaaggacuucgggggcuucaacuucagccagauccugcccgaccccuccaagcccagcaagcgcuccuucaucgaggaccuccuguucaacaaggugacccuggccgacgccggcuucaucaagcaguacggggacugccugggcgacaucgcggcccgggaccucaucugcgcccagaaguucaacgggcugacggugcugcccccgcuccugaccgacgagaugaucgcccaguacaccagcgcccugcucgcgggcaccaucacguccggguggaccuucggcgccggcgccgcccugcagauccccuucgcgaugcagauggccuaccgcuucaacgggaucggcgucacccagaacgugcuguacgagaaccagaagcucaucgccaaccaguucaacagcgccaucgggaagauccaggacucccugagcuccaccgccagcgcgcugggcaagcuccaggacguggucaaccagaacgcccaggcccugaacacgcuggugaagcagcucuccagcaacuucggggccaucuccagcgugcugaacgacauccugagccggcucgacaaggucgaggccgaggugcagaucgaccgccugaucaccggccggcugcagucccuccagaccuacgugacccagcagcugauccgcgcggccgagauccgggccagcgccaaccuggccgcgaucaagauguccgagugcguccucggccagagcaagcgcguggacuucugcgggaagggcuaccaccugauguccuucccccagagcgcgccccacgggguggucuuccugcacgugaccuacgucccggcccaggagaagaacuucacgaccgcccccgccaucugccacgacggcaaggcccacuucccccgggaggggguguucguguccaacggcacccacugguucgucacccagcgcaacuucuacgagccccagaucaucacgaccgacaacaccuucgugagcggcaacugcgacguggucaucgggaucgugaacaacaccguguacgacccgcuccagcccgagcuggacuccuucaaggaggagcuggacaaguacuucaagaaccacacgagccccgacgucgaccucggcgacaucuccgggaucaacgccagcguggugaacauccagaaggagaucgaccggcugaacgaggucgccaagaaccugaacgagucccucaucgaccugcaggagcugggcaaguacgagcaguacaucaaguggcccugguacaucuggcucggcuucaucgccgggcugaucgcgaucgugauggugaccaucaugcugugcugcaugaccagcugcugcuccugccucaagggcugcugcagcugcggguccugcugcaaguucgacgaggacgacagcgagccgguccugaagggcgugaagcugcacuacaccugaggacuaguguccaccugucccuccugggcugcuggauugucucguuuuccugccaaauaaacaggaucagcgcuuuacagaucucaaaggcucuuuucagagccaccaaaaaaaaaaaaaaaaaaaaaaaaaaaaaaaaaaaaaaaaaaaaaaaaaaaaaaaaaaaaaaaaaaaaaaaaaaaaaaaaaaaaaaaaaaaaaaaaaaaaa

SEQ ID NO: 23884 - RNA, 4129 nt, Artificial Sequence
  SARS-CoV-2/Wuhan/WIV05/2019__EPI_ISL_402128 spike protein mRNA gc (1-1273)(S13I_W152C_L452R_D614G)
aggagacccgugacccggaaguuguacggcuacgcgacuuucccucccacaaacccucgcgcccuuccuuuccuacuugggcccggcagaaagcuuaccauguucguguuccugguccuccugccccuggugagcauccagugcgugaaccucaccacccgcacgcagcugccgcccgccuacaccaacuccuucacccggggcgucuacuaccccgacaagguguuccgcagcuccgugcugcacagcacccaggaccucuuccugcccuucuucuccaacgucacgugguuccacgccauccacgugagcgggaccaacggcaccaagcgguucgacaacccggugcugcccuucaacgacggggucuacuucgcguccaccgagaaguccaacaucauccgcggcuggaucuucgggacgacccucgacagcaagacccagagccugcugaucgugaacaacgccaccaacguggucaucaaggugugcgaguuccaguucugcaacgaccccuuccucggcguguacuaccacaagaacaacaaguccugcauggagagcgaguuccgggucuacuccagcgccaacaacugcacguucgaguacgugucccagcccuuccugauggaccuggagggcaagcaggggaacuucaagaaccuccgcgaguucguguucaagaacaucgacggcuacuucaagaucuacagcaagcacaccccgaucaaccugguccgggaccugccccagggguucuccgcccucgagccccugguggaccugcccaucggcaucaacaucacccgcuuccagacccuccuggcccugcaccggagcuaccucacgccgggggacuccagcagcggcuggaccgcgggcgccgccgccuacuacgugggguaccugcagccccgcaccuuccugcucaaguacaacgagaacggcaccaucacggacgcggucgacugcgcccuggacccccuguccgagaccaagugcacccucaagagcuucaccguggagaaggggaucuaccagacguccaacuuccgggugcagcccaccgagagcaucguccgcuucccgaacaucaccaaccugugccccuucggcgagguguucaacgccacccgguucgccuccgucuacgccuggaaccgcaagcggaucagcaacugcguggcggacuacuccgugcuguacaacagcgccuccuucagcacguucaagugcuacggcgucucccccaccaagcucaacgaccugugcuucaccaacguguacgccgacagcuucgugauccgcggggacgagguccggcagaucgcccccggccagaccgggaagaucgccgacuacaacuacaagcugccggacgacuucacgggcugcgugaucgcguggaacuccaacaaccucgacagcaaggucgggggcaacuacaacuaccgcuaccggcuguuccgcaaguccaaccugaagcccuucgagcgggacaucagcaccgagaucuaccaggccggcuccacccccugcaacgggguggagggcuucaacugcuacuucccccuccagagcuacggguuccagccgaccaacggcgugggguaccagcccuaccgcguggucgugcuguccuucgagcugcuccacgcccccgccacggugugcggccccaagaaguccaccaaccuggucaagaacaagugcgugaacuucaacuucaacggccugaccgggaccggcgugcucaccgagagcaacaagaaguuccugccguuccagcaguucgggcgcgacaucgccgacacgaccgacgcgguccgggacccccagacccuggagauccuggacaucacccccugcagcuucggcggggugagcgugaucacgccgggcaccaacaccuccaaccaggucgccgugcucuaccagggcgugaacugcaccgagguccccguggccauccacgccgaccagcugacgcccaccuggcgcguguacagcaccggguccaacgucuuccagacccgggccggcugccugaucggggcggagcacgugaacaacagcuacgagugcgacauccccaucggcgccggcaucugcgccuccuaccagacgcagaccaacagcccgcgccgggcccgcuccguggcgagccaguccaucaucgccuacaccaugagccucggggccgagaacuccgucgccuacagcaacaacuccaucgccauccccaccaacuucacgaucagcgugaccaccgagauccugcccguguccaugaccaagacgagcgucgacugcaccauguacaucugcggcgacagcaccgagugcuccaaccugcuccugcaguacgggagcuucugcacccagcugaaccgggcgcucacgggcaucgccguggagcaggacaagaacacccaggagguguucgcccaggucaagcagaucuacaagacgcccccgaucaaggacuucgggggcuucaacuucucccagauccugcccgaccccagcaagcccuccaagcgcagcuucaucgaggaccuccuguucaacaaggugacccuggccgacgccggcuucaucaagcaguacggggacugccugggcgacaucgcggcccgggaccucaucugcgcccagaaguucaacgggcugaccgugcugccgccccuccugaccgacgagaugaucgcccaguacaccuccgcccugcucgcgggcaccaucacgagcggguggaccuucggcgccggcgccgcccugcagauccccuucgcgaugcagauggccuaccgcuucaacgggaucggcgucacccagaacgugcuguacgagaaccagaagcucaucgccaaccaguucaacuccgccaucgggaagauccaggacagccuguccagcaccgccuccgcgcugggcaagcuccaggacguggucaaccagaacgcccaggcccugaacacgcuggugaagcagcucagcuccaacuucggggccaucagcuccgugcugaacgacauccugagccggcucgacaaggucgaggccgaggugcagaucgaccgccugaucaccggccggcugcagucccuccagaccuacgugacccagcagcugauccgcgcggccgagauccgggccagcgccaaccuggccgcgaccaagaugagcgagugcguccucggccaguccaagcgcguggacuucugcgggaagggcuaccaccugaugagcuucccccaguccgccccgcacgggguggucuuccugcacgugacguacguccccgcccaggagaagaacuucaccaccgcccccgcgaucugccacgacggcaaggcccacuucccccgggaggggguguucgugagcaacggcacccacugguucgucacgcagcgcaacuucuacgagccgcagaucaucaccaccgacaacaccuucguguccggcaacugcgacguggucaucgggaucgugaacaacacgguguacgacccccuccagcccgagcuggacagcuucaaggaggagcuggacaaguacuucaagaaccacaccucccccgacgucgaccucggcgacaucagcgggaucaacgccuccguggugaacauccagaaggagaucgaccggcugaacgaggucgccaagaaccugaacgagagccucaucgaccugcaggagcugggcaaguacgagcaguacaucaaguggccgugguacaucuggcucggcuucaucgccgggcugaucgcgaucgugauggugaccaucaugcugugcugcaugaccuccugcugcagcugccucaagggcugcugcuccugcgggagcugcugcaaguucgacgaggacgacuccgagcccguccugaagggcgugaagcugcacuacacgugaggacuaguguccaccugucccuccugggcugcuggauugucucguuuuccugccaaauaaacaggaucagcgcuuuacagaucucaaaggcucuuuucagagccaccaaaaaaaaaaaaaaaaaaaaaaaaaaaaaaaaaaaaaaaaaaaaaaaaaaaaaaaaaaaaaaaaaaaaaaaaaaaaaaaaaaaaaaaaaaaaaaaaaaaaa

SEQ ID NO: 23885 - RNA, 4129 nt, Artificial Sequence
  SARS-CoV-2/Wuhan/WIV05/2019__EPI_ISL_402128 spike protein mRNA gc (1-1273)
aggagacccgugacccggaaguuguacggcuacgcgacuuucccucccacaaacccucgcgcccuuccuuuccuacuugggcccggcagaaagcuuaccauguucguguuccuggugcugcugccccuggugagcagccagugcgugaaccugaccacccggacccagcugccaccagccuacaccaacagcuucacccggggcgucuacuaccccgacaagguguuccggagcagcguccugcacagcacccaggaccuguuccugcccuucuucagcaacgugaccugguuccacgccauccacgugagcggcaccaacggcaccaagcgguucgacaaccccgugcugcccuucaacgacggcguguacuucgccagcaccgagaagagcaacaucauccggggcuggaucuucggcaccacccuggacagcaagacccagagccugcugaucgugaauaacgccaccaacguggugaucaaggugugcgaguuccaguucugcaacgaccccuuccugggcguguacuaccacaagaacaacaagagcuggauggagagcgaguuccggguguacagcagcgccaacaacugcaccuucgaguacgugagccagcccuuccugauggaccuggagggcaagcagggcaacuucaagaaccugcgggaguucguguucaagaacaucgacggcuacuucaagaucuacagcaagcacaccccaaucaaccuggugcgggaucugccccagggcuucucagcccuggagccccugguggaccugcccaucggcaucaacaucacccgguuccagacccugcuggcccugcaccggagcuaccugaccccaggcgacagcagcagcggguggacagcaggcgcggcugcuuacuacgugggcuaccugcagccccggaccuuccugcugaaguacaacgagaacggcaccaucaccgacgccguggacugcgcccuggacccucugagcgagaccaagugcacccugaagagcuucaccguggagaagggcaucuaccagaccagcaacuuccgggugcagcccaccgagagcaucgugcgguuccccaacaucaccaaccugugccccuucggcgagguguucaacgccacccgguucgccagcguguacgccuggaaccggaagcggaucagcaacugcguggccgacuacagcgugcuguacaacagcgccagcuucagcaccuucaagugcuacggcgugagccccaccaagcugaacgaccugugcuucaccaacguguacgccgacagcuucgugauccguggcgacgaggugcggcagaucgcacccggccagacaggcaagaucgccgacuacaacuacaagcugcccgacgacuucaccggcugcgugaucgccuggaacagcaacaaccucgacagcaaggugggcggcaacuacaacuaccuguaccggcuguuccggaagagcaaccugaagcccuucgagcgggacaucagcaccgagaucuaccaagccggcuccaccccuugcaacggcguggagggcuucaacugcuacuucccucugcagagcuacggcuuccagcccaccaacggcgugggcuaccagcccuaccgggugguggugcugagcuucgagcugcugcacgccccagccaccguguguggccccaagaagagcaccaaccuggugaagaacaagugcgugaacuucaacuucaacggccuuaccggcaccggcgugcugaccgagagcaacaagaaauuccugcccuuucagcaguucggccgggacaucgccgacaccaccgacgcugugcgggauccccagacccuggagauccuggacaucaccccuugcagcuucggcggcgugagcgugaucaccccaggcaccaacaccagcaaccagguggccgugcuguaccaggacgugaacugcaccgaggugcccguggccauccacgccgaccagcugacacccaccuggcgggucuacagcaccggcagcaacguguuccagacccgggccgguugccugaucggcgccgagcacgugaacaacagcuacgagugcgacauccccaucggcgccggcaucugugccagcuaccagacccagaccaauucaccccggagggcaaggagcguggccagccagagcaucaucgccuacaccaugagccugggcgccgagaacagcguggccuacagcaacaacagcaucgccauccccaccaacuucaccaucagcgugaccaccgagauucugcccgugagcaugaccaagaccagcguggacugcaccauguacaucugcggcgacagcaccgagugcagcaaccugcugcugcaguacggcagcuucugcacccagcugaaccgggcccugaccggcaucgccguggagcaggacaagaacacccaggagguguucgcccaggugaagcagaucuacaagaccccucccaucaaggacuucggcggcuucaacuucagccagauccugcccgaccccagcaagcccagcaagcggagcuucaucgaggaccugcuguucaacaaggugacccuagccgacgccggcuucaucaagcaguacggcgacugccucggcgacauagccgcccgggaccugaucugcgcccagaaguucaacggccugaccgugcugccuccccugcugaccgacgagaugaucgcccaguacaccagcgcccuguuagccggaaccaucaccagcggcuggacuuucggcgcuggagccgcucugcagauccccuucgccaugcagauggccuaccgguucaacggcaucggcgugacccagaacgugcuguacgagaaccagaagcugaucgccaaccaguucaacagcgccaucggcaagauccaggacagccugagcagcaccgcuagcgcccugggcaagcugcaggacguggugaaccagaacgcccaggcccugaacacccuggugaagcagcugagcagcaacuucggcgccaucagcagcgugcugaacgacauccugagccggcuggacaaggucgaggccgaggugcagaucgaccggcugaucacuggccggcugcagagccugcagaccuacgugacccagcagcugauccgggccgccgagauucgggccagcgccaaccuggccgccaccaagaugagcgagugcgugcugggccagagcaagcggguggacuucugcggcaagggcuaccaccugaugagcuuuccccagagcgcaccccacggagugguguuccugcacgugaccuacgugcccgcccaggagaagaacuucaccaccgccccagccaucugccacgacggcaaggcccacuuuccccgggagggcguguucgugagcaacggcacccacugguucgugacccagcggaacuucuacgagccccagaucaucaccaccgacaacaccuucgugagcggcaacugcgacguggugaucggcaucgugaacaacaccguguacgauccccugcagcccgagcuggacagcuucaaggaggagcuggacaaguacuucaagaaucacaccagccccgacguggaccugggcgacaucagcggcaucaacgccagcguggugaacauccagaaggagaucgaucggcugaacgagguggccaagaaccugaacgagagccugaucgaccugcaggagcugggcaaguacgagcaguacaucaaguggcccugguacaucuggcugggcuucaucgccggccugaucgccaucgugauggugaccaucaugcugugcugcaugaccagcugcugcagcugccugaagggcuguugcagcugcggcagcugcugcaaguucgacgaggacgacagcgagcccgugcugaagggcgugaagcugcacuacaccugaggacuaguguccaccugucccuccugggcugcuggauugucucguuuuccugccaaauaaacaggaucagcgcuuuacagaucucaaaggcucuuuucagagccaccaaaaaaaaaaaaaaaaaaaaaaaaaaaaaaaaaaaaaaaaaaaaaaaaaaaaaaaaaaaaaaaaaaaaaaaaaaaaaaaaaaaaaaaaaaaaaaaaaaaaa

SEQ ID NO: 23886 - RNA, 4129 nt, Artificial Sequence
  SARS-CoV-2/Wuhan/WIV05/2019__EPI_ISL_402128 spike protein mRNA gc (1-1273)(D614G)
aggagacccgugacccggaaguuguacggcuacgcgacuuucccucccacaaacccucgcgcccuuccuuuccuacuugggcccggcagaaagcuuaccauguucguguuccuggugcugcugccccuggugagcagccagugcgugaaccugaccacccggacccagcugccaccagccuacaccaacagcuucacccggggcgucuacuaccccgacaagguguuccggagcagcguccugcacagcacccaggaccuguuccugcccuucuucagcaacgugaccugguuccacgccauccacgugagcggcaccaacggcaccaagcgguucgacaaccccgugcugcccuucaacgacggcguguacuucgccagcaccgagaagagcaacaucauccggggcuggaucuucggcaccacccuggacagcaagacccagagccugcugaucgugaauaacgccaccaacguggugaucaaggugugcgaguuccaguucugcaacgaccccuuccugggcguguacuaccacaagaacaacaagagcuggauggagagcgaguuccggguguacagcagcgccaacaacugcaccuucgaguacgugagccagcccuuccugauggaccuggagggcaagcagggcaacuucaagaaccugcgggaguucguguucaagaacaucgacggcuacuucaagaucuacagcaagcacaccccaaucaaccuggugcgggaucugccccagggcuucucagcccuggagccccugguggaccugcccaucggcaucaacaucacccgguuccagacccugcuggcccugcaccggagcuaccugaccccaggcgacagcagcagcggguggacagcaggcgcggcugcuuacuacgugggcuaccugcagccccggaccuuccugcugaaguacaacgagaacggcaccaucaccgacgccguggacugcgcccuggacccucugagcgagaccaagugcacccugaagagcuucaccguggagaagggcaucuaccagaccagcaacuuccgggugcagcccaccgagagcaucgugcgguuccccaacaucaccaaccugugccccuucggcgagguguucaacgccacccgguucgccagcguguacgccuggaaccggaagcggaucagcaacugcguggccgacuacagcgugcuguacaacagcgccagcuucagcaccuucaagugcuacggcgugagccccaccaagcugaacgaccugugcuucaccaacguguacgccgacagcuucgugauccguggcgacgaggugcggcagaucgcacccggccagacaggcaagaucgccgacuacaacuacaagcugcccgacgacuucaccggcugcgugaucgccuggaacagcaacaaccucgacagcaaggugggcggcaacuacaacuaccuguaccggcuguuccggaagagcaaccugaagcccuucgagcgggacaucagcaccgagaucuaccaagccggcuccaccccuugcaacggcguggagggcuucaacugcuacuucccucugcagagcuacggcuuccagcccaccaacggcgugggcuaccagcccuaccgggugguggugcugagcuucgagcugcugcacgccccagccaccguguguggccccaagaagagcaccaaccuggugaagaacaagugcgugaacuucaacuucaacggccuuaccggcaccggcgugcugaccgagagcaacaagaaauuccugcccuuucagcaguucggccgggacaucgccgacaccaccgacgcugugcgggauccccagacccuggagauccuggacaucaccccuugcagcuucggcggcgugagcgugaucaccccaggcaccaacaccagcaaccagguggccgugcuguaccagggcgugaacugcaccgaggugcccguggccauccacgccgaccagcugacacccaccuggcgggucuacagcaccggcagcaacguguuccagacccgggccgguugccugaucggcgccgagcacgugaacaacagcuacgagugcgacauccccaucggcgccggcaucugugccagcuaccagacccagaccaauucaccccggagggcaaggagcguggccagccagagcaucaucgccuacaccaugagccugggcgccgagaacagcguggccuacagcaacaacagcaucgccauccccaccaacuucaccaucagcgugaccaccgagauucugcccgugagcaugaccaagaccagcguggacugcaccauguacaucugcggcgacagcaccgagugcagcaaccugcugcugcaguacggcagcuucugcacccagcugaaccgggcccugaccggcaucgccguggagcaggacaagaacacccaggagguguucgcccaggugaagcagaucuacaagaccccucccaucaaggacuucggcggcuucaacuucagccagauccugcccgaccccagcaagcccagcaagcggagcuucaucgaggaccugcuguucaacaaggugacccuagccgacgccggcuucaucaagcaguacggcgacugccucggcgacauagccgcccgggaccugaucugcgcccagaaguucaacggccugaccgugcugccuccccugcugaccgacgagaugaucgcccaguacaccagcgcccuguuagccggaaccaucaccagcggcuggacuuucggcgcuggagccgcucugcagauccccuucgccaugcagauggccuaccgguucaacggcaucggcgugacccagaacgugcuguacgagaaccagaagcugaucgccaaccaguucaacagcgccaucggcaagauccaggacagccugagcagcaccgcuagcgcccugggcaagcugcaggacguggugaaccagaacgcccaggcccugaacacccuggugaagcagcugagcagcaacuucggcgccaucagcagcgugcugaacgacauccugagccggcuggacaaggucgaggccgaggugcagaucgaccggcugaucacuggccggcugcagagccugcagaccuacgugacccagcagcugauccgggccgccgagauucgggccagcgccaaccuggccgccaccaagaugagcgagugcgugcugggccagagcaagcggguggacuucugcggcaagggcuaccaccugaugagcuuuccccagagcgcaccccacggagugguguuccugcacgugaccuacgugcccgcccaggagaagaacuucaccaccgccccagccaucugccacgacggcaaggcccacuuuccccgggagggcguguucgugagcaacggcacccacugguucgugacccagcggaacuucuacgagccccagaucaucaccaccgacaacaccuucgugagcggcaacugcgacguggugaucggcaucgugaacaacaccguguacgauccccugcagcccgagcuggacagcuucaaggaggagcuggacaaguacuucaagaaucacaccagccccgacguggaccugggcgacaucagcggcaucaacgccagcguggugaacauccagaaggagaucgaucggcugaacgagguggccaagaaccugaacgagagccugaucgaccugcaggagcugggcaaguacgagcaguacaucaaguggcccugguacaucuggcugggcuucaucgccggccugaucgccaucgugauggugaccaucaugcugugcugcaugaccagcugcugcagcugccugaagggcuguugcagcugcggcagcugcugcaaguucgacgaggacgacagcgagcccgugcugaagggcgugaagcugcacuacaccugaggacuaguguccaccugucccuccugggcugcuggauugucucguuuuccugccaaauaaacaggaucagcgcuuuacagaucucaaaggcucuuuucagagccaccaaaaaaaaaaaaaaaaaaaaaaaaaaaaaaaaaaaaaaaaaaaaaaaaaaaaaaaaaaaaaaaaaaaaaaaaaaaaaaaaaaaaaaaaaaaaaaaaaaaaa

SEQ ID NO: 23887 - RNA, 4129 nt, Artificial Sequence
  SARS-CoV-2/Wuhan/WIV05/2019__EPI_ISL_402128 spike protein mRNA gc (1-1273)(A222V_D614G)
aggagacccgugacccggaaguuguacggcuacgcgacuuucccucccacaaacccucgcgcccuuccuuuccuacuugggcccggcagaaagcuuaccauguucguguuccuggugcugcugccccuggugagcagccagugcgugaaccugaccacccggacccagcugccaccagccuacaccaacagcuucacccggggcgucuacuaccccgacaagguguuccggagcagcguccugcacagcacccaggaccuguuccugcccuucuucagcaacgugaccugguuccacgccauccacgugagcggcaccaacggcaccaagcgguucgacaaccccgugcugcccuucaacgacggcguguacuucgccagcaccgagaagagcaacaucauccggggcuggaucuucggcaccacccuggacagcaagacccagagccugcugaucgugaauaacgccaccaacguggugaucaaggugugcgaguuccaguucugcaacgaccccuuccugggcguguacuaccacaagaacaacaagagcuggauggagagcgaguuccggguguacagcagcgccaacaacugcaccuucgaguacgugagccagcccuuccugauggaccuggagggcaagcagggcaacuucaagaaccugcgggaguucguguucaagaacaucgacggcuacuucaagaucuacagcaagcacaccccaaucaaccuggugcgggaucugccccagggcuucucagugcuggagccccugguggaccugcccaucggcaucaacaucacccgguuccagacccugcuggcccugcaccggagcuaccugaccccaggcgacagcagcagcggguggacagcaggcgcggcugcuuacuacgugggcuaccugcagccccggaccuuccugcugaaguacaacgagaacggcaccaucaccgacgccguggacugcgcccuggacccucugagcgagaccaagugcacccugaagagcuucaccguggagaagggcaucuaccagaccagcaacuuccgggugcagcccaccgagagcaucgugcgguuccccaacaucaccaaccugugccccuucggcgagguguucaacgccacccgguucgccagcguguacgccuggaaccggaagcggaucagcaacugcguggccgacuacagcgugcuguacaacagcgccagcuucagcaccuucaagugcuacggcgugagccccaccaagcugaacgaccugugcuucaccaacguguacgccgacagcuucgugauccguggcgacgaggugcggcagaucgcacccggccagacaggcaagaucgccgacuacaacuacaagcugcccgacgacuucaccggcugcgugaucgccuggaacagcaacaaccucgacagcaaggugggcggcaacuacaacuaccuguaccggcuguuccggaagagcaaccugaagcccuucgagcgggacaucagcaccgagaucuaccaagccggcuccaccccuugcaacggcguggagggcuucaacugcuacuucccucugcagagcuacggcuuccagcccaccaacggcgugggcuaccagcccuaccgggugguggugcugagcuucgagcugcugcacgccccagccaccguguguggccccaagaagagcaccaaccuggugaagaacaagugcgugaacuucaacuucaacggccuuaccggcaccggcgugcugaccgagagcaacaagaaauuccugcccuuucagcaguucggccgggacaucgccgacaccaccgacgcugugcgggauccccagacccuggagauccuggacaucaccccuugcagcuucggcggcgugagcgugaucaccccaggcaccaacaccagcaaccagguggccgugcuguaccagggcgugaacugcaccgaggugcccguggccauccacgccgaccagcugacacccaccuggcgggucuacagcaccggcagcaacguguuccagacccgggccgguugccugaucggcgccgagcacgugaacaacagcuacgagugcgacauccccaucggcgccggcaucugugccagcuaccagacccagaccaauucaccccggagggcaaggagcguggccagccagagcaucaucgccuacaccaugagccugggcgccgagaacagcguggccuacagcaacaacagcaucgccauccccaccaacuucaccaucagcgugaccaccgagauucugcccgugagcaugaccaagaccagcguggacugcaccauguacaucugcggcgacagcaccgagugcagcaaccugcugcugcaguacggcagcuucugcacccagcugaaccgggcccugaccggcaucgccguggagcaggacaagaacacccaggagguguucgcccaggugaagcagaucuacaagaccccucccaucaaggacuucggcggcuucaacuucagccagauccugcccgaccccagcaagcccagcaagcggagcuucaucgaggaccugcuguucaacaaggugacccuagccgacgccggcuucaucaagcaguacggcgacugccucggcgacauagccgcccgggaccugaucugcgcccagaaguucaacggccugaccgugcugccuccccugcugaccgacgagaugaucgcccaguacaccagcgcccuguuagccggaaccaucaccagcggcuggacuuucggcgcuggagccgcucugcagauccccuucgccaugcagauggccuaccgguucaacggcaucggcgugacccagaacgugcuguacgagaaccagaagcugaucgccaaccaguucaacagcgccaucggcaagauccaggacagccugagcagcaccgcuagcgcccugggcaagcugcaggacguggugaaccagaacgcccaggcccugaacacccuggugaagcagcugagcagcaacuucggcgccaucagcagcgugcugaacgacauccugagccggcuggacaaggucgaggccgaggugcagaucgaccggcugaucacuggccggcugcagagccugcagaccuacgugacccagcagcugauccgggccgccgagauucgggccagcgccaaccuggccgccaccaagaugagcgagugcgugcugggccagagcaagcggguggacuucugcggcaagggcuaccaccugaugagcuuuccccagagcgcaccccacggagugguguuccugcacgugaccuacgugcccgcccaggagaagaacuucaccaccgccccagccaucugccacgacggcaaggcccacuuuccccgggagggcguguucgugagcaacggcacccacugguucgugacccagcggaacuucuacgagccccagaucaucaccaccgacaacaccuucgugagcggcaacugcgacguggugaucggcaucgugaacaacaccguguacgauccccugcagcccgagcuggacagcuucaaggaggagcuggacaaguacuucaagaaucacaccagccccgacguggaccugggcgacaucagcggcaucaacgccagcguggugaacauccagaaggagaucgaucggcugaacgagguggccaagaaccugaacgagagccugaucgaccugcaggagcugggcaaguacgagcaguacaucaaguggcccugguacaucuggcugggcuucaucgccggccugaucgccaucgugauggugaccaucaugcugugcugcaugaccagcugcugcagcugccugaagggcuguugcagcugcggcagcugcugcaaguucgacgaggacgacagcgagcccgugcugaagggcgugaagcugcacuacaccugaggacuaguguccaccugucccuccugggcugcuggauugucucguuuuccugccaaauaaacaggaucagcgcuuuacagaucucaaaggcucuuuucagagccaccaaaaaaaaaaaaaaaaaaaaaaaaaaaaaaaaaaaaaaaaaaaaaaaaaaaaaaaaaaaaaaaaaaaaaaaaaaaaaaaaaaaaaaaaaaaaaaaaaaaaa

SEQ ID NO: 23888 - RNA, 4129 nt, Artificial Sequence
  SARS-CoV-2/Wuhan/WIV05/2019__EPI_ISL_402128 spike protein mRNA gc (1-1273)(N439K_D614G)
aggagacccgugacccggaaguuguacggcuacgcgacuuucccucccacaaacccucgcgcccuuccuuuccuacuugggcccggcagaaagcuuaccauguucguguuccuggugcugcugccccuggugagcagccagugcgugaaccugaccacccggacccagcugccaccagccuacaccaacagcuucacccggggcgucuacuaccccgacaagguguuccggagcagcguccugcacagcacccaggaccuguuccugcccuucuucagcaacgugaccugguuccacgccauccacgugagcggcaccaacggcaccaagcgguucgacaaccccgugcugcccuucaacgacggcguguacuucgccagcaccgagaagagcaacaucauccggggcuggaucuucggcaccacccuggacagcaagacccagagccugcugaucgugaauaacgccaccaacguggugaucaaggugugcgaguuccaguucugcaacgaccccuuccugggcguguacuaccacaagaacaacaagagcuggauggagagcgaguuccggguguacagcagcgccaacaacugcaccuucgaguacgugagccagcccuuccugauggaccuggagggcaagcagggcaacuucaagaaccugcgggaguucguguucaagaacaucgacggcuacuucaagaucuacagcaagcacaccccaaucaaccuggugcgggaucugccccagggcuucucagcccuggagccccugguggaccugcccaucggcaucaacaucacccgguuccagacccugcuggcccugcaccggagcuaccugaccccaggcgacagcagcagcggguggacagcaggcgcggcugcuuacuacgugggcuaccugcagccccggaccuuccugcugaaguacaacgagaacggcaccaucaccgacgccguggacugcgcccuggacccucugagcgagaccaagugcacccugaagagcuucaccguggagaagggcaucuaccagaccagcaacuuccgggugcagcccaccgagagcaucgugcgguuccccaacaucaccaaccugugccccuucggcgagguguucaacgccacccgguucgccagcguguacgccuggaaccggaagcggaucagcaacugcguggccgacuacagcgugcuguacaacagcgccagcuucagcaccuucaagugcuacggcgugagccccaccaagcugaacgaccugugcuucaccaacguguacgccgacagcuucgugauccguggcgacgaggugcggcagaucgcacccggccagacaggcaagaucgccgacuacaacuacaagcugcccgacgacuucaccggcugcgugaucgccuggaacagcaagaaccucgacagcaaggugggcggcaacuacaacuaccuguaccggcuguuccggaagagcaaccugaagcccuucgagcgggacaucagcaccgagaucuaccaagccggcuccaccccuugcaacggcguggagggcuucaacugcuacuucccucugcagagcuacggcuuccagcccaccaacggcgugggcuaccagcccuaccgggugguggugcugagcuucgagcugcugcacgccccagccaccguguguggccccaagaagagcaccaaccuggugaagaacaagugcgugaacuucaacuucaacggccuuaccggcaccggcgugcugaccgagagcaacaagaaauuccugcccuuucagcaguucggccgggacaucgccgacaccaccgacgcugugcgggauccccagacccuggagauccuggacaucaccccuugcagcuucggcggcgugagcgugaucaccccaggcaccaacaccagcaaccagguggccgugcuguaccagggcgugaacugcaccgaggugcccguggccauccacgccgaccagcugacacccaccuggcgggucuacagcaccggcagcaacguguuccagacccgggccgguugccugaucggcgccgagcacgugaacaacagcuacgagugcgacauccccaucggcgccggcaucugugccagcuaccagacccagaccaauucaccccggagggcaaggagcguggccagccagagcaucaucgccuacaccaugagccugggcgccgagaacagcguggccuacagcaacaacagcaucgccauccccaccaacuucaccaucagcgugaccaccgagauucugcccgugagcaugaccaagaccagcguggacugcaccauguacaucugcggcgacagcaccgagugcagcaaccugcugcugcaguacggcagcuucugcacccagcugaaccgggcccugaccggcaucgccguggagcaggacaagaacacccaggagguguucgcccaggugaagcagaucuacaagaccccucccaucaaggacuucggcggcuucaacuucagccagauccugcccgaccccagcaagcccagcaagcggagcuucaucgaggaccugcuguucaacaaggugacccuagccgacgccggcuucaucaagcaguacggcgacugccucggcgacauagccgcccgggaccugaucugcgcccagaaguucaacggccugaccgugcugccuccccugcugaccgacgagaugaucgcccaguacaccagcgcccuguuagccggaaccaucaccagcggcuggacuuucggcgcuggagccgcucugcagauccccuucgccaugcagauggccuaccgguucaacggcaucggcgugacccagaacgugcuguacgagaaccagaagcugaucgccaaccaguucaacagcgccaucggcaagauccaggacagccugagcagcaccgcuagcgcccugggcaagcugcaggacguggugaaccagaacgcccaggcccugaacacccuggugaagcagcugagcagcaacuucggcgccaucagcagcgugcugaacgacauccugagccggcuggacaaggucgaggccgaggugcagaucgaccggcugaucacuggccggcugcagagccugcagaccuacgugacccagcagcugauccgggccgccgagauucgggccagcgccaaccuggccgccaccaagaugagcgagugcgugcugggccagagcaagcggguggacuucugcggcaagggcuaccaccugaugagcuuuccccagagcgcaccccacggagugguguuccugcacgugaccuacgugcccgcccaggagaagaacuucaccaccgccccagccaucugccacgacggcaaggcccacuuuccccgggagggcguguucgugagcaacggcacccacugguucgugacccagcggaacuucuacgagccccagaucaucaccaccgacaacaccuucgugagcggcaacugcgacguggugaucggcaucgugaacaacaccguguacgauccccugcagcccgagcuggacagcuucaaggaggagcuggacaaguacuucaagaaucacaccagccccgacguggaccugggcgacaucagcggcaucaacgccagcguggugaacauccagaaggagaucgaucggcugaacgagguggccaagaaccugaacgagagccugaucgaccugcaggagcugggcaaguacgagcaguacaucaaguggcccugguacaucuggcugggcuucaucgccggccugaucgccaucgugauggugaccaucaugcugugcugcaugaccagcugcugcagcugccugaagggcuguugcagcugcggcagcugcugcaaguucgacgaggacgacagcgagcccgugcugaagggcgugaagcugcacuacaccugaggacuaguguccaccugucccuccugggcugcuggauugucucguuuuccugccaaauaaacaggaucagcgcuuuacagaucucaaaggcucuuuucagagccaccaaaaaaaaaaaaaaaaaaaaaaaaaaaaaaaaaaaaaaaaaaaaaaaaaaaaaaaaaaaaaaaaaaaaaaaaaaaaaaaaaaaaaaaaaaaaaaaaaaaaa

SEQ ID NO: 23889 - RNA, 4129 nt, Artificial Sequence
  SARS-CoV-2/Wuhan/WIV05/2019__EPI_ISL_402128 spike protein mRNA gc (1-1273)(S477N_D614G)
aggagacccgugacccggaaguuguacggcuacgcgacuuucccucccacaaacccucgcgcccuuccuuuccuacuugggcccggcagaaagcuuaccauguucguguuccuggugcugcugccccuggugagcagccagugcgugaaccugaccacccggacccagcugccaccagccuacaccaacagcuucacccggggcgucuacuaccccgacaagguguuccggagcagcguccugcacagcacccaggaccuguuccugcccuucuucagcaacgugaccugguuccacgccauccacgugagcggcaccaacggcaccaagcgguucgacaaccccgugcugcccuucaacgacggcguguacuucgccagcaccgagaagagcaacaucauccggggcuggaucuucggcaccacccuggacagcaagacccagagccugcugaucgugaauaacgccaccaacguggugaucaaggugugcgaguuccaguucugcaacgaccccuuccugggcguguacuaccacaagaacaacaagagcuggauggagagcgaguuccggguguacagcagcgccaacaacugcaccuucgaguacgugagccagcccuuccugauggaccuggagggcaagcagggcaacuucaagaaccugcgggaguucguguucaagaacaucgacggcuacuucaagaucuacagcaagcacaccccaaucaaccuggugcgggaucugccccagggcuucucagcccuggagccccugguggaccugcccaucggcaucaacaucacccgguuccagacccugcuggcccugcaccggagcuaccugaccccaggcgacagcagcagcggguggacagcaggcgcggcugcuuacuacgugggcuaccugcagccccggaccuuccugcugaaguacaacgagaacggcaccaucaccgacgccguggacugcgcccuggacccucugagcgagaccaagugcacccugaagagcuucaccguggagaagggcaucuaccagaccagcaacuuccgggugcagcccaccgagagcaucgugcgguuccccaacaucaccaaccugugccccuucggcgagguguucaacgccacccgguucgccagcguguacgccuggaaccggaagcggaucagcaacugcguggccgacuacagcgugcuguacaacagcgccagcuucagcaccuucaagugcuacggcgugagccccaccaagcugaacgaccugugcuucaccaacguguacgccgacagcuucgugauccguggcgacgaggugcggcagaucgcacccggccagacaggcaagaucgccgacuacaacuacaagcugcccgacgacuucaccggcugcgugaucgccuggaacagcaacaaccucgacagcaaggugggcggcaacuacaacuaccuguaccggcuguuccggaagagcaaccugaagcccuucgagcgggacaucagcaccgagaucuaccaagccggcaacaccccuugcaacggcguggagggcuucaacugcuacuucccucugcagagcuacggcuuccagcccaccaacggcgugggcuaccagcccuaccgggugguggugcugagcuucgagcugcugcacgccccagccaccguguguggccccaagaagagcaccaaccuggugaagaacaagugcgugaacuucaacuucaacggccuuaccggcaccggcgugcugaccgagagcaacaagaaauuccugcccuuucagcaguucggccgggacaucgccgacaccaccgacgcugugcgggauccccagacccuggagauccuggacaucaccccuugcagcuucggcggcgugagcgugaucaccccaggcaccaacaccagcaaccagguggccgugcuguaccagggcgugaacugcaccgaggugcccguggccauccacgccgaccagcugacacccaccuggcgggucuacagcaccggcagcaacguguuccagacccgggccgguugccugaucggcgccgagcacgugaacaacagcuacgagugcgacauccccaucggcgccggcaucugugccagcuaccagacccagaccaauucaccccggagggcaaggagcguggccagccagagcaucaucgccuacaccaugagccugggcgccgagaacagcguggccuacagcaacaacagcaucgccauccccaccaacuucaccaucagcgugaccaccgagauucugcccgugagcaugaccaagaccagcguggacugcaccauguacaucugcggcgacagcaccgagugcagcaaccugcugcugcaguacggcagcuucugcacccagcugaaccgggcccugaccggcaucgccguggagcaggacaagaacacccaggagguguucgcccaggugaagcagaucuacaagaccccucccaucaaggacuucggcggcuucaacuucagccagauccugcccgaccccagcaagcccagcaagcggagcuucaucgaggaccugcuguucaacaaggugacccuagccgacgccggcuucaucaagcaguacggcgacugccucggcgacauagccgcccgggaccugaucugcgcccagaaguucaacggccugaccgugcugccuccccugcugaccgacgagaugaucgcccaguacaccagcgcccuguuagccggaaccaucaccagcggcuggacuuucggcgcuggagccgcucugcagauccccuucgccaugcagauggccuaccgguucaacggcaucggcgugacccagaacgugcuguacgagaaccagaagcugaucgccaaccaguucaacagcgccaucggcaagauccaggacagccugagcagcaccgcuagcgcccugggcaagcugcaggacguggugaaccagaacgcccaggcccugaacacccuggugaagcagcugagcagcaacuucggcgccaucagcagcgugcugaacgacauccugagccggcuggacaaggucgaggccgaggugcagaucgaccggcugaucacuggccggcugcagagccugcagaccuacgugacccagcagcugauccgggccgccgagauucgggccagcgccaaccuggccgccaccaagaugagcgagugcgugcugggccagagcaagcggguggacuucugcggcaagggcuaccaccugaugagcuuuccccagagcgcaccccacggagugguguuccugcacgugaccuacgugcccgcccaggagaagaacuucaccaccgccccagccaucugccacgacggcaaggcccacuuuccccgggagggcguguucgugagcaacggcacccacugguucgugacccagcggaacuucuacgagccccagaucaucaccaccgacaacaccuucgugagcggcaacugcgacguggugaucggcaucgugaacaacaccguguacgauccccugcagcccgagcuggacagcuucaaggaggagcuggacaaguacuucaagaaucacaccagccccgacguggaccugggcgacaucagcggcaucaacgccagcguggugaacauccagaaggagaucgaucggcugaacgagguggccaagaaccugaacgagagccugaucgaccugcaggagcugggcaaguacgagcaguacaucaaguggcccugguacaucuggcugggcuucaucgccggccugaucgccaucgugauggugaccaucaugcugugcugcaugaccagcugcugcagcugccugaagggcuguugcagcugcggcagcugcugcaaguucgacgaggacgacagcgagcccgugcugaagggcgugaagcugcacuacaccugaggacuaguguccaccugucccuccugggcugcuggauugucucguuuuccugccaaauaaacaggaucagcgcuuuacagaucucaaaggcucuuuucagagccaccaaaaaaaaaaaaaaaaaaaaaaaaaaaaaaaaaaaaaaaaaaaaaaaaaaaaaaaaaaaaaaaaaaaaaaaaaaaaaaaaaaaaaaaaaaaaaaaaaaaaa

SEQ ID NO: 23890 - RNA, 4129 nt, Artificial Sequence
  SARS-CoV-2/Wuhan/WIV05/2019__EPI_ISL_402128 spike protein mRNA gc (1-1273)(N501Y_D614G)
aggagacccgugacccggaaguuguacggcuacgcgacuuucccucccacaaacccucgcgcccuuccuuuccuacuugggcccggcagaaagcuuaccauguucguguuccuggugcugcugccccuggugagcagccagugcgugaaccugaccacccggacccagcugccaccagccuacaccaacagcuucacccggggcgucuacuaccccgacaagguguuccggagcagcguccugcacagcacccaggaccuguuccugcccuucuucagcaacgugaccugguuccacgccauccacgugagcggcaccaacggcaccaagcgguucgacaaccccgugcugcccuucaacgacggcguguacuucgccagcaccgagaagagcaacaucauccggggcuggaucuucggcaccacccuggacagcaagacccagagccugcugaucgugaauaacgccaccaacguggugaucaaggugugcgaguuccaguucugcaacgaccccuuccugggcguguacuaccacaagaacaacaagagcuggauggagagcgaguuccggguguacagcagcgccaacaacugcaccuucgaguacgugagccagcccuuccugauggaccuggagggcaagcagggcaacuucaagaaccugcgggaguucguguucaagaacaucgacggcuacuucaagaucuacagcaagcacaccccaaucaaccuggugcgggaucugccccagggcuucucagcccuggagccccugguggaccugcccaucggcaucaacaucacccgguuccagacccugcuggcccugcaccggagcuaccugaccccaggcgacagcagcagcggguggacagcaggcgcggcugcuuacuacgugggcuaccugcagccccggaccuuccugcugaaguacaacgagaacggcaccaucaccgacgccguggacugcgcccuggacccucugagcgagaccaagugcacccugaagagcuucaccguggagaagggcaucuaccagaccagcaacuuccgggugcagcccaccgagagcaucgugcgguuccccaacaucaccaaccugugccccuucggcgagguguucaacgccacccgguucgccagcguguacgccuggaaccggaagcggaucagcaacugcguggccgacuacagcgugcuguacaacagcgccagcuucagcaccuucaagugcuacggcgugagccccaccaagcugaacgaccugugcuucaccaacguguacgccgacagcuucgugauccguggcgacgaggugcggcagaucgcacccggccagacaggcaagaucgccgacuacaacuacaagcugcccgacgacuucaccggcugcgugaucgccuggaacagcaacaaccucgacagcaaggugggcggcaacuacaacuaccuguaccggcuguuccggaagagcaaccugaagcccuucgagcgggacaucagcaccgagaucuaccaagccggcuccaccccuugcaacggcguggagggcuucaacugcuacuucccucugcagagcuacggcuuccagcccaccuacggcgugggcuaccagcccuaccgggugguggugcugagcuucgagcugcugcacgccccagccaccguguguggccccaagaagagcaccaaccuggugaagaacaagugcgugaacuucaacuucaacggccuuaccggcaccggcgugcugaccgagagcaacaagaaauuccugcccuuucagcaguucggccgggacaucgccgacaccaccgacgcugugcgggauccccagacccuggagauccuggacaucaccccuugcagcuucggcggcgugagcgugaucaccccaggcaccaacaccagcaaccagguggccgugcuguaccagggcgugaacugcaccgaggugcccguggccauccacgccgaccagcugacacccaccuggcgggucuacagcaccggcagcaacguguuccagacccgggccgguugccugaucggcgccgagcacgugaacaacagcuacgagugcgacauccccaucggcgccggcaucugugccagcuaccagacccagaccaauucaccccggagggcaaggagcguggccagccagagcaucaucgccuacaccaugagccugggcgccgagaacagcguggccuacagcaacaacagcaucgccauccccaccaacuucaccaucagcgugaccaccgagauucugcccgugagcaugaccaagaccagcguggacugcaccauguacaucugcggcgacagcaccgagugcagcaaccugcugcugcaguacggcagcuucugcacccagcugaaccgggcccugaccggcaucgccguggagcaggacaagaacacccaggagguguucgcccaggugaagcagaucuacaagaccccucccaucaaggacuucggcggcuucaacuucagccagauccugcccgaccccagcaagcccagcaagcggagcuucaucgaggaccugcuguucaacaaggugacccuagccgacgccggcuucaucaagcaguacggcgacugccucggcgacauagccgcccgggaccugaucugcgcccagaaguucaacggccugaccgugcugccuccccugcugaccgacgagaugaucgcccaguacaccagcgcccuguuagccggaaccaucaccagcggcuggacuuucggcgcuggagccgcucugcagauccccuucgccaugcagauggccuaccgguucaacggcaucggcgugacccagaacgugcuguacgagaaccagaagcugaucgccaaccaguucaacagcgccaucggcaagauccaggacagccugagcagcaccgcuagcgcccugggcaagcugcaggacguggugaaccagaacgcccaggcccugaacacccuggugaagcagcugagcagcaacuucggcgccaucagcagcgugcugaacgacauccugagccggcuggacaaggucgaggccgaggugcagaucgaccggcugaucacuggccggcugcagagccugcagaccuacgugacccagcagcugauccgggccgccgagauucgggccagcgccaaccuggccgccaccaagaugagcgagugcgugcugggccagagcaagcggguggacuucugcggcaagggcuaccaccugaugagcuuuccccagagcgcaccccacggagugguguuccugcacgugaccuacgugcccgcccaggagaagaacuucaccaccgccccagccaucugccacgacggcaaggcccacuuuccccgggagggcguguucgugagcaacggcacccacugguucgugacccagcggaacuucuacgagccccagaucaucaccaccgacaacaccuucgugagcggcaacugcgacguggugaucggcaucgugaacaacaccguguacgauccccugcagcccgagcuggacagcuucaaggaggagcuggacaaguacuucaagaaucacaccagccccgacguggaccugggcgacaucagcggcaucaacgccagcguggugaacauccagaaggagaucgaucggcugaacgagguggccaagaaccugaacgagagccugaucgaccugcaggagcugggcaaguacgagcaguacaucaaguggcccugguacaucuggcugggcuucaucgccggccugaucgccaucgugauggugaccaucaugcugugcugcaugaccagcugcugcagcugccugaagggcuguugcagcugcggcagcugcugcaaguucgacgaggacgacagcgagcccgugcugaagggcgugaagcugcacuacaccugaggacuaguguccaccugucccuccugggcugcuggauugucucguuuuccugccaaauaaacaggaucagcgcuuuacagaucucaaaggcucuuuucagagccaccaaaaaaaaaaaaaaaaaaaaaaaaaaaaaaaaaaaaaaaaaaaaaaaaaaaaaaaaaaaaaaaaaaaaaaaaaaaaaaaaaaaaaaaaaaaaaaaaaaaaa

SEQ ID NO: 23891 - RNA, 4123 nt, Artificial Sequence
  SARS-CoV-2/Wuhan/WIV05/2019__EPI_ISL_402128 spike protein mRNA gc (1-1273)(H69del_V70del_D614G)
aggagacccgugacccggaaguuguacggcuacgcgacuuucccucccacaaacccucgcgcccuuccuuuccuacuugggcccggcagaaagcuuaccauguucguguuccuggugcugcugccccuggugagcagccagugcgugaaccugaccacccggacccagcugccaccagccuacaccaacagcuucacccggggcgucuacuaccccgacaagguguuccggagcagcguccugcacagcacccaggaccuguuccugcccuucuucagcaacgugaccugguuccacgccaucagcggcaccaacggcaccaagcgguucgacaaccccgugcugcccuucaacgacggcguguacuucgccagcaccgagaagagcaacaucauccggggcuggaucuucggcaccacccuggacagcaagacccagagccugcugaucgugaauaacgccaccaacguggugaucaaggugugcgaguuccaguucugcaacgaccccuuccugggcguguacuaccacaagaacaacaagagcuggauggagagcgaguuccggguguacagcagcgccaacaacugcaccuucgaguacgugagccagcccuuccugauggaccuggagggcaagcagggcaacuucaagaaccugcgggaguucguguucaagaacaucgacggcuacuucaagaucuacagcaagcacaccccaaucaaccuggugcgggaucugccccagggcuucucagcccuggagccccugguggaccugcccaucggcaucaacaucacccgguuccagacccugcuggcccugcaccggagcuaccugaccccaggcgacagcagcagcggguggacagcaggcgcggcugcuuacuacgugggcuaccugcagccccggaccuuccugcugaaguacaacgagaacggcaccaucaccgacgccguggacugcgcccuggacccucugagcgagaccaagugcacccugaagagcuucaccguggagaagggcaucuaccagaccagcaacuuccgggugcagcccaccgagagcaucgugcgguuccccaacaucaccaaccugugccccuucggcgagguguucaacgccacccgguucgccagcguguacgccuggaaccggaagcggaucagcaacugcguggccgacuacagcgugcuguacaacagcgccagcuucagcaccuucaagugcuacggcgugagccccaccaagcugaacgaccugugcuucaccaacguguacgccgacagcuucgugauccguggcgacgaggugcggcagaucgcacccggccagacaggcaagaucgccgacuacaacuacaagcugcccgacgacuucaccggcugcgugaucgccuggaacagcaacaaccucgacagcaaggugggcggcaacuacaacuaccuguaccggcuguuccggaagagcaaccugaagcccuucgagcgggacaucagcaccgagaucuaccaagccggcuccaccccuugcaacggcguggagggcuucaacugcuacuucccucugcagagcuacggcuuccagcccaccaacggcgugggcuaccagcccuaccgggugguggugcugagcuucgagcugcugcacgccccagccaccguguguggccccaagaagagcaccaaccuggugaagaacaagugcgugaacuucaacuucaacggccuuaccggcaccggcgugcugaccgagagcaacaagaaauuccugcccuuucagcaguucggccgggacaucgccgacaccaccgacgcugugcgggauccccagacccuggagauccuggacaucaccccuugcagcuucggcggcgugagcgugaucaccccaggcaccaacaccagcaaccagguggccgugcuguaccagggcgugaacugcaccgaggugcccguggccauccacgccgaccagcugacacccaccuggcgggucuacagcaccggcagcaacguguuccagacccgggccgguugccugaucggcgccgagcacgugaacaacagcuacgagugcgacauccccaucggcgccggcaucugugccagcuaccagacccagaccaauucaccccggagggcaaggagcguggccagccagagcaucaucgccuacaccaugagccugggcgccgagaacagcguggccuacagcaacaacagcaucgccauccccaccaacuucaccaucagcgugaccaccgagauucugcccgugagcaugaccaagaccagcguggacugcaccauguacaucugcggcgacagcaccgagugcagcaaccugcugcugcaguacggcagcuucugcacccagcugaaccgggcccugaccggcaucgccguggagcaggacaagaacacccaggagguguucgcccaggugaagcagaucuacaagaccccucccaucaaggacuucggcggcuucaacuucagccagauccugcccgaccccagcaagcccagcaagcggagcuucaucgaggaccugcuguucaacaaggugacccuagccgacgccggcuucaucaagcaguacggcgacugccucggcgacauagccgcccgggaccugaucugcgcccagaaguucaacggccugaccgugcugccuccccugcugaccgacgagaugaucgcccaguacaccagcgcccuguuagccggaaccaucaccagcggcuggacuuucggcgcuggagccgcucugcagauccccuucgccaugcagauggccuaccgguucaacggcaucggcgugacccagaacgugcuguacgagaaccagaagcugaucgccaaccaguucaacagcgccaucggcaagauccaggacagccugagcagcaccgcuagcgcccugggcaagcugcaggacguggugaaccagaacgcccaggcccugaacacccuggugaagcagcugagcagcaacuucggcgccaucagcagcgugcugaacgacauccugagccggcuggacaaggucgaggccgaggugcagaucgaccggcugaucacuggccggcugcagagccugcagaccuacgugacccagcagcugauccgggccgccgagauucgggccagcgccaaccuggccgccaccaagaugagcgagugcgugcugggccagagcaagcggguggacuucugcggcaagggcuaccaccugaugagcuuuccccagagcgcaccccacggagugguguuccugcacgugaccuacgugcccgcccaggagaagaacuucaccaccgccccagccaucugccacgacggcaaggcccacuuuccccgggagggcguguucgugagcaacggcacccacugguucgugacccagcggaacuucuacgagccccagaucaucaccaccgacaacaccuucgugagcggcaacugcgacguggugaucggcaucgugaacaacaccguguacgauccccugcagcccgagcuggacagcuucaaggaggagcuggacaaguacuucaagaaucacaccagccccgacguggaccugggcgacaucagcggcaucaacgccagcguggugaacauccagaaggagaucgaucggcugaacgagguggccaagaaccugaacgagagccugaucgaccugcaggagcugggcaaguacgagcaguacaucaaguggcccugguacaucuggcugggcuucaucgccggccugaucgccaucgugauggugaccaucaugcugugcugcaugaccagcugcugcagcugccugaagggcuguugcagcugcggcagcugcugcaaguucgacgaggacgacagcgagcccgugcugaagggcgugaagcugcacuacaccugaggacuaguguccaccugucccuccugggcugcuggauugucucguuuuccugccaaauaaacaggaucagcgcuuuacagaucucaaaggcucuuuucagagccaccaaaaaaaaaaaaaaaaaaaaaaaaaaaaaaaaaaaaaaaaaaaaaaaaaaaaaaaaaaaaaaaaaaaaaaaaaaaaaaaaaaaaaaaaaaaaaaaaaaaaa

SEQ ID NO: 23892 - RNA, 4129 nt, Artificial Sequence
  SARS-CoV-2/Wuhan/WIV05/2019__EPI_ISL_402128 spike protein mRNA gc (1-1273)(Y453F_D614G)
aggagacccgugacccggaaguuguacggcuacgcgacuuucccucccacaaacccucgcgcccuuccuuuccuacuugggcccggcagaaagcuuaccauguucguguuccuggugcugcugccccuggugagcagccagugcgugaaccugaccacccggacccagcugccaccagccuacaccaacagcuucacccggggcgucuacuaccccgacaagguguuccggagcagcguccugcacagcacccaggaccuguuccugcccuucuucagcaacgugaccugguuccacgccauccacgugagcggcaccaacggcaccaagcgguucgacaaccccgugcugcccuucaacgacggcguguacuucgccagcaccgagaagagcaacaucauccggggcuggaucuucggcaccacccuggacagcaagacccagagccugcugaucgugaauaacgccaccaacguggugaucaaggugugcgaguuccaguucugcaacgaccccuuccugggcguguacuaccacaagaacaacaagagcuggauggagagcgaguuccggguguacagcagcgccaacaacugcaccuucgaguacgugagccagcccuuccugauggaccuggagggcaagcagggcaacuucaagaaccugcgggaguucguguucaagaacaucgacggcuacuucaagaucuacagcaagcacaccccaaucaaccuggugcgggaucugccccagggcuucucagcccuggagccccugguggaccugcccaucggcaucaacaucacccgguuccagacccugcuggcccugcaccggagcuaccugaccccaggcgacagcagcagcggguggacagcaggcgcggcugcuuacuacgugggcuaccugcagccccggaccuuccugcugaaguacaacgagaacggcaccaucaccgacgccguggacugcgcccuggacccucugagcgagaccaagugcacccugaagagcuucaccguggagaagggcaucuaccagaccagcaacuuccgggugcagcccaccgagagcaucgugcgguuccccaacaucaccaaccugugccccuucggcgagguguucaacgccacccgguucgccagcguguacgccuggaaccggaagcggaucagcaacugcguggccgacuacagcgugcuguacaacagcgccagcuucagcaccuucaagugcuacggcgugagccccaccaagcugaacgaccugugcuucaccaacguguacgccgacagcuucgugauccguggcgacgaggugcggcagaucgcacccggccagacaggcaagaucgccgacuacaacuacaagcugcccgacgacuucaccggcugcgugaucgccuggaacagcaacaaccucgacagcaaggugggcggcaacuacaacuaccuguuccggcuguuccggaagagcaaccugaagcccuucgagcgggacaucagcaccgagaucuaccaagccggcuccaccccuugcaacggcguggagggcuucaacugcuacuucccucugcagagcuacggcuuccagcccaccaacggcgugggcuaccagcccuaccgggugguggugcugagcuucgagcugcugcacgccccagccaccguguguggccccaagaagagcaccaaccuggugaagaacaagugcgugaacuucaacuucaacggccuuaccggcaccggcgugcugaccgagagcaacaagaaauuccugcccuuucagcaguucggccgggacaucgccgacaccaccgacgcugugcgggauccccagacccuggagauccuggacaucaccccuugcagcuucggcggcgugagcgugaucaccccaggcaccaacaccagcaaccagguggccgugcuguaccagggcgugaacugcaccgaggugcccguggccauccacgccgaccagcugacacccaccuggcgggucuacagcaccggcagcaacguguuccagacccgggccgguugccugaucggcgccgagcacgugaacaacagcuacgagugcgacauccccaucggcgccggcaucugugccagcuaccagacccagaccaauucaccccggagggcaaggagcguggccagccagagcaucaucgccuacaccaugagccugggcgccgagaacagcguggccuacagcaacaacagcaucgccauccccaccaacuucaccaucagcgugaccaccgagauucugcccgugagcaugaccaagaccagcguggacugcaccauguacaucugcggcgacagcaccgagugcagcaaccugcugcugcaguacggcagcuucugcacccagcugaaccgggcccugaccggcaucgccguggagcaggacaagaacacccaggagguguucgcccaggugaagcagaucuacaagaccccucccaucaaggacuucggcggcuucaacuucagccagauccugcccgaccccagcaagcccagcaagcggagcuucaucgaggaccugcuguucaacaaggugacccuagccgacgccggcuucaucaagcaguacggcgacugccucggcgacauagccgcccgggaccugaucugcgcccagaaguucaacggccugaccgugcugccuccccugcugaccgacgagaugaucgcccaguacaccagcgcccuguuagccggaaccaucaccagcggcuggacuuucggcgcuggagccgcucugcagauccccuucgccaugcagauggccuaccgguucaacggcaucggcgugacccagaacgugcuguacgagaaccagaagcugaucgccaaccaguucaacagcgccaucggcaagauccaggacagccugagcagcaccgcuagcgcccugggcaagcugcaggacguggugaaccagaacgcccaggcccugaacacccuggugaagcagcugagcagcaacuucggcgccaucagcagcgugcugaacgacauccugagccggcuggacaaggucgaggccgaggugcagaucgaccggcugaucacuggccggcugcagagccugcagaccuacgugacccagcagcugauccgggccgccgagauucgggccagcgccaaccuggccgccaccaagaugagcgagugcgugcugggccagagcaagcggguggacuucugcggcaagggcuaccaccugaugagcuuuccccagagcgcaccccacggagugguguuccugcacgugaccuacgugcccgcccaggagaagaacuucaccaccgccccagccaucugccacgacggcaaggcccacuuuccccgggagggcguguucgugagcaacggcacccacugguucgugacccagcggaacuucuacgagccccagaucaucaccaccgacaacaccuucgugagcggcaacugcgacguggugaucggcaucgugaacaacaccguguacgauccccugcagcccgagcuggacagcuucaaggaggagcuggacaaguacuucaagaaucacaccagccccgacguggaccugggcgacaucagcggcaucaacgccagcguggugaacauccagaaggagaucgaucggcugaacgagguggccaagaaccugaacgagagccugaucgaccugcaggagcugggcaaguacgagcaguacaucaaguggcccugguacaucuggcugggcuucaucgccggccugaucgccaucgugauggugaccaucaugcugugcugcaugaccagcugcugcagcugccugaagggcuguugcagcugcggcagcugcugcaaguucgacgaggacgacagcgagcccgugcugaagggcgugaagcugcacuacaccugaggacuaguguccaccugucccuccugggcugcuggauugucucguuuuccugccaaauaaacaggaucagcgcuuuacagaucucaaaggcucuuuucagagccaccaaaaaaaaaaaaaaaaaaaaaaaaaaaaaaaaaaaaaaaaaaaaaaaaaaaaaaaaaaaaaaaaaaaaaaaaaaaaaaaaaaaaaaaaaaaaaaaaaaaaa

SEQ ID NO: 23893 - RNA, 4129 nt, Artificial Sequence
  SARS-CoV-2/Wuhan/WIV05/2019__EPI_ISL_402128 spike protein mRNA gc (1-1273)(D614G_I692V)
aggagacccgugacccggaaguuguacggcuacgcgacuuucccucccacaaacccucgcgcccuuccuuuccuacuugggcccggcagaaagcuuaccauguucguguuccuggugcugcugccccuggugagcagccagugcgugaaccugaccacccggacccagcugccaccagccuacaccaacagcuucacccggggcgucuacuaccccgacaagguguuccggagcagcguccugcacagcacccaggaccuguuccugcccuucuucagcaacgugaccugguuccacgccauccacgugagcggcaccaacggcaccaagcgguucgacaaccccgugcugcccuucaacgacggcguguacuucgccagcaccgagaagagcaacaucauccggggcuggaucuucggcaccacccuggacagcaagacccagagccugcugaucgugaauaacgccaccaacguggugaucaaggugugcgaguuccaguucugcaacgaccccuuccugggcguguacuaccacaagaacaacaagagcuggauggagagcgaguuccggguguacagcagcgccaacaacugcaccuucgaguacgugagccagcccuuccugauggaccuggagggcaagcagggcaacuucaagaaccugcgggaguucguguucaagaacaucgacggcuacuucaagaucuacagcaagcacaccccaaucaaccuggugcgggaucugccccagggcuucucagcccuggagccccugguggaccugcccaucggcaucaacaucacccgguuccagacccugcuggcccugcaccggagcuaccugaccccaggcgacagcagcagcggguggacagcaggcgcggcugcuuacuacgugggcuaccugcagccccggaccuuccugcugaaguacaacgagaacggcaccaucaccgacgccguggacugcgcccuggacccucugagcgagaccaagugcacccugaagagcuucaccguggagaagggcaucuaccagaccagcaacuuccgggugcagcccaccgagagcaucgugcgguuccccaacaucaccaaccugugccccuucggcgagguguucaacgccacccgguucgccagcguguacgccuggaaccggaagcggaucagcaacugcguggccgacuacagcgugcuguacaacagcgccagcuucagcaccuucaagugcuacggcgugagccccaccaagcugaacgaccugugcuucaccaacguguacgccgacagcuucgugauccguggcgacgaggugcggcagaucgcacccggccagacaggcaagaucgccgacuacaacuacaagcugcccgacgacuucaccggcugcgugaucgccuggaacagcaacaaccucgacagcaaggugggcggcaacuacaacuaccuguaccggcuguuccggaagagcaaccugaagcccuucgagcgggacaucagcaccgagaucuaccaagccggcuccaccccuugcaacggcguggagggcuucaacugcuacuucccucugcagagcuacggcuuccagcccaccaacggcgugggcuaccagcccuaccgggugguggugcugagcuucgagcugcugcacgccccagccaccguguguggccccaagaagagcaccaaccuggugaagaacaagugcgugaacuucaacuucaacggccuuaccggcaccggcgugcugaccgagagcaacaagaaauuccugcccuuucagcaguucggccgggacaucgccgacaccaccgacgcugugcgggauccccagacccuggagauccuggacaucaccccuugcagcuucggcggcgugagcgugaucaccccaggcaccaacaccagcaaccagguggccgugcuguaccagggcgugaacugcaccgaggugcccguggccauccacgccgaccagcugacacccaccuggcgggucuacagcaccggcagcaacguguuccagacccgggccgguugccugaucggcgccgagcacgugaacaacagcuacgagugcgacauccccaucggcgccggcaucugugccagcuaccagacccagaccaauucaccccggagggcaaggagcguggccagccagagcgugaucgccuacaccaugagccugggcgccgagaacagcguggccuacagcaacaacagcaucgccauccccaccaacuucaccaucagcgugaccaccgagauucugcccgugagcaugaccaagaccagcguggacugcaccauguacaucugcggcgacagcaccgagugcagcaaccugcugcugcaguacggcagcuucugcacccagcugaaccgggcccugaccggcaucgccguggagcaggacaagaacacccaggagguguucgcccaggugaagcagaucuacaagaccccucccaucaaggacuucggcggcuucaacuucagccagauccugcccgaccccagcaagcccagcaagcggagcuucaucgaggaccugcuguucaacaaggugacccuagccgacgccggcuucaucaagcaguacggcgacugccucggcgacauagccgcccgggaccugaucugcgcccagaaguucaacggccugaccgugcugccuccccugcugaccgacgagaugaucgcccaguacaccagcgcccuguuagccggaaccaucaccagcggcuggacuuucggcgcuggagccgcucugcagauccccuucgccaugcagauggccuaccgguucaacggcaucggcgugacccagaacgugcuguacgagaaccagaagcugaucgccaaccaguucaacagcgccaucggcaagauccaggacagccugagcagcaccgcuagcgcccugggcaagcugcaggacguggugaaccagaacgcccaggcccugaacacccuggugaagcagcugagcagcaacuucggcgccaucagcagcgugcugaacgacauccugagccggcuggacaaggucgaggccgaggugcagaucgaccggcugaucacuggccggcugcagagccugcagaccuacgugacccagcagcugauccgggccgccgagauucgggccagcgccaaccuggccgccaccaagaugagcgagugcgugcugggccagagcaagcggguggacuucugcggcaagggcuaccaccugaugagcuuuccccagagcgcaccccacggagugguguuccugcacgugaccuacgugcccgcccaggagaagaacuucaccaccgccccagccaucugccacgacggcaaggcccacuuuccccgggagggcguguucgugagcaacggcacccacugguucgugacccagcggaacuucuacgagccccagaucaucaccaccgacaacaccuucgugagcggcaacugcgacguggugaucggcaucgugaacaacaccguguacgauccccugcagcccgagcuggacagcuucaaggaggagcuggacaaguacuucaagaaucacaccagccccgacguggaccugggcgacaucagcggcaucaacgccagcguggugaacauccagaaggagaucgaucggcugaacgagguggccaagaaccugaacgagagccugaucgaccugcaggagcugggcaaguacgagcaguacaucaaguggcccugguacaucuggcugggcuucaucgccggccugaucgccaucgugauggugaccaucaugcugugcugcaugaccagcugcugcagcugccugaagggcuguugcagcugcggcagcugcugcaaguucgacgaggacgacagcgagcccgugcugaagggcgugaagcugcacuacaccugaggacuaguguccaccugucccuccugggcugcuggauugucucguuuuccugccaaauaaacaggaucagcgcuuuacagaucucaaaggcucuuuucagagccaccaaaaaaaaaaaaaaaaaaaaaaaaaaaaaaaaaaaaaaaaaaaaaaaaaaaaaaaaaaaaaaaaaaaaaaaaaaaaaaaaaaaaaaaaaaaaaaaaaaaaa

SEQ ID NO: 23894 - RNA, 4129 nt, Artificial Sequence
  SARS-CoV-2/Wuhan/WIV05/2019__EPI_ISL_402128 spike protein mRNA gc (1-1273)(D614G_M1229I)
aggagacccgugacccggaaguuguacggcuacgcgacuuucccucccacaaacccucgcgcccuuccuuuccuacuugggcccggcagaaagcuuaccauguucguguuccuggugcugcugccccuggugagcagccagugcgugaaccugaccacccggacccagcugccaccagccuacaccaacagcuucacccggggcgucuacuaccccgacaagguguuccggagcagcguccugcacagcacccaggaccuguuccugcccuucuucagcaacgugaccugguuccacgccauccacgugagcggcaccaacggcaccaagcgguucgacaaccccgugcugcccuucaacgacggcguguacuucgccagcaccgagaagagcaacaucauccggggcuggaucuucggcaccacccuggacagcaagacccagagccugcugaucgugaauaacgccaccaacguggugaucaaggugugcgaguuccaguucugcaacgaccccuuccugggcguguacuaccacaagaacaacaagagcuggauggagagcgaguuccggguguacagcagcgccaacaacugcaccuucgaguacgugagccagcccuuccugauggaccuggagggcaagcagggcaacuucaagaaccugcgggaguucguguucaagaacaucgacggcuacuucaagaucuacagcaagcacaccccaaucaaccuggugcgggaucugccccagggcuucucagcccuggagccccugguggaccugcccaucggcaucaacaucacccgguuccagacccugcuggcccugcaccggagcuaccugaccccaggcgacagcagcagcggguggacagcaggcgcggcugcuuacuacgugggcuaccugcagccccggaccuuccugcugaaguacaacgagaacggcaccaucaccgacgccguggacugcgcccuggacccucugagcgagaccaagugcacccugaagagcuucaccguggagaagggcaucuaccagaccagcaacuuccgggugcagcccaccgagagcaucgugcgguuccccaacaucaccaaccugugccccuucggcgagguguucaacgccacccgguucgccagcguguacgccuggaaccggaagcggaucagcaacugcguggccgacuacagcgugcuguacaacagcgccagcuucagcaccuucaagugcuacggcgugagccccaccaagcugaacgaccugugcuucaccaacguguacgccgacagcuucgugauccguggcgacgaggugcggcagaucgcacccggccagacaggcaagaucgccgacuacaacuacaagcugcccgacgacuucaccggcugcgugaucgccuggaacagcaacaaccucgacagcaaggugggcggcaacuacaacuaccuguaccggcuguuccggaagagcaaccugaagcccuucgagcgggacaucagcaccgagaucuaccaagccggcuccaccccuugcaacggcguggagggcuucaacugcuacuucccucugcagagcuacggcuuccagcccaccaacggcgugggcuaccagcccuaccgggugguggugcugagcuucgagcugcugcacgccccagccaccguguguggccccaagaagagcaccaaccuggugaagaacaagugcgugaacuucaacuucaacggccuuaccggcaccggcgugcugaccgagagcaacaagaaauuccugcccuuucagcaguucggccgggacaucgccgacaccaccgacgcugugcgggauccccagacccuggagauccuggacaucaccccuugcagcuucggcggcgugagcgugaucaccccaggcaccaacaccagcaaccagguggccgugcuguaccagggcgugaacugcaccgaggugcccguggccauccacgccgaccagcugacacccaccuggcgggucuacagcaccggcagcaacguguuccagacccgggccgguugccugaucggcgccgagcacgugaacaacagcuacgagugcgacauccccaucggcgccggcaucugugccagcuaccagacccagaccaauucaccccggagggcaaggagcguggccagccagagcaucaucgccuacaccaugagccugggcgccgagaacagcguggccuacagcaacaacagcaucgccauccccaccaacuucaccaucagcgugaccaccgagauucugcccgugagcaugaccaagaccagcguggacugcaccauguacaucugcggcgacagcaccgagugcagcaaccugcugcugcaguacggcagcuucugcacccagcugaaccgggcccugaccggcaucgccguggagcaggacaagaacacccaggagguguucgcccaggugaagcagaucuacaagaccccucccaucaaggacuucggcggcuucaacuucagccagauccugcccgaccccagcaagcccagcaagcggagcuucaucgaggaccugcuguucaacaaggugacccuagccgacgccggcuucaucaagcaguacggcgacugccucggcgacauagccgcccgggaccugaucugcgcccagaaguucaacggccugaccgugcugccuccccugcugaccgacgagaugaucgcccaguacaccagcgcccuguuagccggaaccaucaccagcggcuggacuuucggcgcuggagccgcucugcagauccccuucgccaugcagauggccuaccgguucaacggcaucggcgugacccagaacgugcuguacgagaaccagaagcugaucgccaaccaguucaacagcgccaucggcaagauccaggacagccugagcagcaccgcuagcgcccugggcaagcugcaggacguggugaaccagaacgcccaggcccugaacacccuggugaagcagcugagcagcaacuucggcgccaucagcagcgugcugaacgacauccugagccggcuggacaaggucgaggccgaggugcagaucgaccggcugaucacuggccggcugcagagccugcagaccuacgugacccagcagcugauccgggccgccgagauucgggccagcgccaaccuggccgccaccaagaugagcgagugcgugcugggccagagcaagcggguggacuucugcggcaagggcuaccaccugaugagcuuuccccagagcgcaccccacggagugguguuccugcacgugaccuacgugcccgcccaggagaagaacuucaccaccgccccagccaucugccacgacggcaaggcccacuuuccccgggagggcguguucgugagcaacggcacccacugguucgugacccagcggaacuucuacgagccccagaucaucaccaccgacaacaccuucgugagcggcaacugcgacguggugaucggcaucgugaacaacaccguguacgauccccugcagcccgagcuggacagcuucaaggaggagcuggacaaguacuucaagaaucacaccagccccgacguggaccugggcgacaucagcggcaucaacgccagcguggugaacauccagaaggagaucgaucggcugaacgagguggccaagaaccugaacgagagccugaucgaccugcaggagcugggcaaguacgagcaguacaucaaguggcccugguacaucuggcugggcuucaucgccggccugaucgccaucgugaucgugaccaucaugcugugcugcaugaccagcugcugcagcugccugaagggcuguugcagcugcggcagcugcugcaaguucgacgaggacgacagcgagcccgugcugaagggcgugaagcugcacuacaccugaggacuaguguccaccugucccuccugggcugcuggauugucucguuuuccugccaaauaaacaggaucagcgcuuuacagaucucaaaggcucuuuucagagccaccaaaaaaaaaaaaaaaaaaaaaaaaaaaaaaaaaaaaaaaaaaaaaaaaaaaaaaaaaaaaaaaaaaaaaaaaaaaaaaaaaaaaaaaaaaaaaaaaaaaaa

SEQ ID NO: 23895 - RNA, 4123 nt, Artificial Sequence
  SARS-CoV-2/Wuhan/WIV05/2019__EPI_ISL_402128 spike protein mRNA gc (1-1273)(H69del_V70del_A222V_Y453F_S477N_D614G_I692V)
aggagacccgugacccggaaguuguacggcuacgcgacuuucccucccacaaacccucgcgcccuuccuuuccuacuugggcccggcagaaagcuuaccauguucguguuccuggugcugcugccccuggugagcagccagugcgugaaccugaccacccggacccagcugccaccagccuacaccaacagcuucacccggggcgucuacuaccccgacaagguguuccggagcagcguccugcacagcacccaggaccuguuccugcccuucuucagcaacgugaccugguuccacgccaucagcggcaccaacggcaccaagcgguucgacaaccccgugcugcccuucaacgacggcguguacuucgccagcaccgagaagagcaacaucauccggggcuggaucuucggcaccacccuggacagcaagacccagagccugcugaucgugaauaacgccaccaacguggugaucaaggugugcgaguuccaguucugcaacgaccccuuccugggcguguacuaccacaagaacaacaagagcuggauggagagcgaguuccggguguacagcagcgccaacaacugcaccuucgaguacgugagccagcccuuccugauggaccuggagggcaagcagggcaacuucaagaaccugcgggaguucguguucaagaacaucgacggcuacuucaagaucuacagcaagcacaccccaaucaaccuggugcgggaucugccccagggcuucucagugcuggagccccugguggaccugcccaucggcaucaacaucacccgguuccagacccugcuggcccugcaccggagcuaccugaccccaggcgacagcagcagcggguggacagcaggcgcggcugcuuacuacgugggcuaccugcagccccggaccuuccugcugaaguacaacgagaacggcaccaucaccgacgccguggacugcgcccuggacccucugagcgagaccaagugcacccugaagagcuucaccguggagaagggcaucuaccagaccagcaacuuccgggugcagcccaccgagagcaucgugcgguuccccaacaucaccaaccugugccccuucggcgagguguucaacgccacccgguucgccagcguguacgccuggaaccggaagcggaucagcaacugcguggccgacuacagcgugcuguacaacagcgccagcuucagcaccuucaagugcuacggcgugagccccaccaagcugaacgaccugugcuucaccaacguguacgccgacagcuucgugauccguggcgacgaggugcggcagaucgcacccggccagacaggcaagaucgccgacuacaacuacaagcugcccgacgacuucaccggcugcgugaucgccuggaacagcaacaaccucgacagcaaggugggcggcaacuacaacuaccuguuccggcuguuccggaagagcaaccugaagcccuucgagcgggacaucagcaccgagaucuaccaagccggcaacaccccuugcaacggcguggagggcuucaacugcuacuucccucugcagagcuacggcuuccagcccaccaacggcgugggcuaccagcccuaccgggugguggugcugagcuucgagcugcugcacgccccagccaccguguguggccccaagaagagcaccaaccuggugaagaacaagugcgugaacuucaacuucaacggccuuaccggcaccggcgugcugaccgagagcaacaagaaauuccugcccuuucagcaguucggccgggacaucgccgacaccaccgacgcugugcgggauccccagacccuggagauccuggacaucaccccuugcagcuucggcggcgugagcgugaucaccccaggcaccaacaccagcaaccagguggccgugcuguaccagggcgugaacugcaccgaggugcccguggccauccacgccgaccagcugacacccaccuggcgggucuacagcaccggcagcaacguguuccagacccgggccgguugccugaucggcgccgagcacgugaacaacagcuacgagugcgacauccccaucggcgccggcaucugugccagcuaccagacccagaccaauucaccccggagggcaaggagcguggccagccagagcgugaucgccuacaccaugagccugggcgccgagaacagcguggccuacagcaacaacagcaucgccauccccaccaacuucaccaucagcgugaccaccgagauucugcccgugagcaugaccaagaccagcguggacugcaccauguacaucugcggcgacagcaccgagugcagcaaccugcugcugcaguacggcagcuucugcacccagcugaaccgggcccugaccggcaucgccguggagcaggacaagaacacccaggagguguucgcccaggugaagcagaucuacaagaccccucccaucaaggacuucggcggcuucaacuucagccagauccugcccgaccccagcaagcccagcaagcggagcuucaucgaggaccugcuguucaacaaggugacccuagccgacgccggcuucaucaagcaguacggcgacugccucggcgacauagccgcccgggaccugaucugcgcccagaaguucaacggccugaccgugcugccuccccugcugaccgacgagaugaucgcccaguacaccagcgcccuguuagccggaaccaucaccagcggcuggacuuucggcgcuggagccgcucugcagauccccuucgccaugcagauggccuaccgguucaacggcaucggcgugacccagaacgugcuguacgagaaccagaagcugaucgccaaccaguucaacagcgccaucggcaagauccaggacagccugagcagcaccgcuagcgcccugggcaagcugcaggacguggugaaccagaacgcccaggcccugaacacccuggugaagcagcugagcagcaacuucggcgccaucagcagcgugcugaacgacauccugagccggcuggacaaggucgaggccgaggugcagaucgaccggcugaucacuggccggcugcagagccugcagaccuacgugacccagcagcugauccgggccgccgagauucgggccagcgccaaccuggccgccaccaagaugagcgagugcgugcugggccagagcaagcggguggacuucugcggcaagggcuaccaccugaugagcuuuccccagagcgcaccccacggagugguguuccugcacgugaccuacgugcccgcccaggagaagaacuucaccaccgccccagccaucugccacgacggcaaggcccacuuuccccgggagggcguguucgugagcaacggcacccacugguucgugacccagcggaacuucuacgagccccagaucaucaccaccgacaacaccuucgugagcggcaacugcgacguggugaucggcaucgugaacaacaccguguacgauccccugcagcccgagcuggacagcuucaaggaggagcuggacaaguacuucaagaaucacaccagccccgacguggaccugggcgacaucagcggcaucaacgccagcguggugaacauccagaaggagaucgaucggcugaacgagguggccaagaaccugaacgagagccugaucgaccugcaggagcugggcaaguacgagcaguacaucaaguggcccugguacaucuggcugggcuucaucgccggccugaucgccaucgugauggugaccaucaugcugugcugcaugaccagcugcugcagcugccugaagggcuguugcagcugcggcagcugcugcaaguucgacgaggacgacagcgagcccgugcugaagggcgugaagcugcacuacaccugaggacuaguguccaccugucccuccugggcugcuggauugucucguuuuccugccaaauaaacaggaucagcgcuuuacagaucucaaaggcucuuuucagagccaccaaaaaaaaaaaaaaaaaaaaaaaaaaaaaaaaaaaaaaaaaaaaaaaaaaaaaaaaaaaaaaaaaaaaaaaaaaaaaaaaaaaaaaaaaaaaaaaaaaaaa

SEQ ID NO: 23896 - RNA, 4123 nt, Artificial Sequence
  SARS-CoV-2/Wuhan/WIV05/2019__EPI_ISL_402128 spike protein mRNA gc (1-1273)(H69del_V70del_Y453F_D614G_I692V_M1229I)
aggagacccgugacccggaaguuguacggcuacgcgacuuucccucccacaaacccucgcgcccuuccuuuccuacuugggcccggcagaaagcuuaccauguucguguuccuggugcugcugccccuggugagcagccagugcgugaaccugaccacccggacccagcugccaccagccuacaccaacagcuucacccggggcgucuacuaccccgacaagguguuccggagcagcguccugcacagcacccaggaccuguuccugcccuucuucagcaacgugaccugguuccacgccaucagcggcaccaacggcaccaagcgguucgacaaccccgugcugcccuucaacgacggcguguacuucgccagcaccgagaagagcaacaucauccggggcuggaucuucggcaccacccuggacagcaagacccagagccugcugaucgugaauaacgccaccaacguggugaucaaggugugcgaguuccaguucugcaacgaccccuuccugggcguguacuaccacaagaacaacaagagcuggauggagagcgaguuccggguguacagcagcgccaacaacugcaccuucgaguacgugagccagcccuuccugauggaccuggagggcaagcagggcaacuucaagaaccugcgggaguucguguucaagaacaucgacggcuacuucaagaucuacagcaagcacaccccaaucaaccuggugcgggaucugccccagggcuucucagcccuggagccccugguggaccugcccaucggcaucaacaucacccgguuccagacccugcuggcccugcaccggagcuaccugaccccaggcgacagcagcagcggguggacagcaggcgcggcugcuuacuacgugggcuaccugcagccccggaccuuccugcugaaguacaacgagaacggcaccaucaccgacgccguggacugcgcccuggacccucugagcgagaccaagugcacccugaagagcuucaccguggagaagggcaucuaccagaccagcaacuuccgggugcagcccaccgagagcaucgugcgguuccccaacaucaccaaccugugccccuucggcgagguguucaacgccacccgguucgccagcguguacgccuggaaccggaagcggaucagcaacugcguggccgacuacagcgugcuguacaacagcgccagcuucagcaccuucaagugcuacggcgugagccccaccaagcugaacgaccugugcuucaccaacguguacgccgacagcuucgugauccguggcgacgaggugcggcagaucgcacccggccagacaggcaagaucgccgacuacaacuacaagcugcccgacgacuucaccggcugcgugaucgccuggaacagcaacaaccucgacagcaaggugggcggcaacuacaacuaccuguuccggcuguuccggaagagcaaccugaagcccuucgagcgggacaucagcaccgagaucuaccaagccggcuccaccccuugcaacggcguggagggcuucaacugcuacuucccucugcagagcuacggcuuccagcccaccaacggcgugggcuaccagcccuaccgggugguggugcugagcuucgagcugcugcacgccccagccaccguguguggccccaagaagagcaccaaccuggugaagaacaagugcgugaacuucaacuucaacggccuuaccggcaccggcgugcugaccgagagcaacaagaaauuccugcccuuucagcaguucggccgggacaucgccgacaccaccgacgcugugcgggauccccagacccuggagauccuggacaucaccccuugcagcuucggcggcgugagcgugaucaccccaggcaccaacaccagcaaccagguggccgugcuguaccagggcgugaacugcaccgaggugcccguggccauccacgccgaccagcugacacccaccuggcgggucuacagcaccggcagcaacguguuccagacccgggccgguugccugaucggcgccgagcacgugaacaacagcuacgagugcgacauccccaucggcgccggcaucugugccagcuaccagacccagaccaauucaccccggagggcaaggagcguggccagccagagcgugaucgccuacaccaugagccugggcgccgagaacagcguggccuacagcaacaacagcaucgccauccccaccaacuucaccaucagcgugaccaccgagauucugcccgugagcaugaccaagaccagcguggacugcaccauguacaucugcggcgacagcaccgagugcagcaaccugcugcugcaguacggcagcuucugcacccagcugaaccgggcccugaccggcaucgccguggagcaggacaagaacacccaggagguguucgcccaggugaagcagaucuacaagaccccucccaucaaggacuucggcggcuucaacuucagccagauccugcccgaccccagcaagcccagcaagcggagcuucaucgaggaccugcuguucaacaaggugacccuagccgacgccggcuucaucaagcaguacggcgacugccucggcgacauagccgcccgggaccugaucugcgcccagaaguucaacggccugaccgugcugccuccccugcugaccgacgagaugaucgcccaguacaccagcgcccuguuagccggaaccaucaccagcggcuggacuuucggcgcuggagccgcucugcagauccccuucgccaugcagauggccuaccgguucaacggcaucggcgugacccagaacgugcuguacgagaaccagaagcugaucgccaaccaguucaacagcgccaucggcaagauccaggacagccugagcagcaccgcuagcgcccugggcaagcugcaggacguggugaaccagaacgcccaggcccugaacacccuggugaagcagcugagcagcaacuucggcgccaucagcagcgugcugaacgacauccugagccggcuggacaaggucgaggccgaggugcagaucgaccggcugaucacuggccggcugcagagccugcagaccuacgugacccagcagcugauccgggccgccgagauucgggccagcgccaaccuggccgccaccaagaugagcgagugcgugcugggccagagcaagcggguggacuucugcggcaagggcuaccaccugaugagcuuuccccagagcgcaccccacggagugguguuccugcacgugaccuacgugcccgcccaggagaagaacuucaccaccgccccagccaucugccacgacggcaaggcccacuuuccccgggagggcguguucgugagcaacggcacccacugguucgugacccagcggaacuucuacgagccccagaucaucaccaccgacaacaccuucgugagcggcaacugcgacguggugaucggcaucgugaacaacaccguguacgauccccugcagcccgagcuggacagcuucaaggaggagcuggacaaguacuucaagaaucacaccagccccgacguggaccugggcgacaucagcggcaucaacgccagcguggugaacauccagaaggagaucgaucggcugaacgagguggccaagaaccugaacgagagccugaucgaccugcaggagcugggcaaguacgagcaguacaucaaguggcccugguacaucuggcugggcuucaucgccggccugaucgccaucgugaucgugaccaucaugcugugcugcaugaccagcugcugcagcugccugaagggcuguugcagcugcggcagcugcugcaaguucgacgaggacgacagcgagcccgugcugaagggcgugaagcugcacuacaccugaggacuaguguccaccugucccuccugggcugcuggauugucucguuuuccugccaaauaaacaggaucagcgcuuuacagaucucaaaggcucuuuucagagccaccaaaaaaaaaaaaaaaaaaaaaaaaaaaaaaaaaaaaaaaaaaaaaaaaaaaaaaaaaaaaaaaaaaaaaaaaaaaaaaaaaaaaaaaaaaaaaaaaaaaaa

SEQ ID NO: 23897 - RNA, 4120 nt, Artificial Sequence
  SARS-CoV-2/Wuhan/WIV05/2019__EPI_ISL_402128 spike protein mRNA gc (1-1273)(H69del_V70del_Y144del_N501Y_A570D_D614G_P681H_T716I_S982 A_D1118H)
aggagacccgugacccggaaguuguacggcuacgcgacuuucccucccacaaacccucgcgcccuuccuuuccuacuugggcccggcagaaagcuuaccauguucguguuccuggugcugcugccccuggugagcagccagugcgugaaccugaccacccggacccagcugccaccagccuacaccaacagcuucacccggggcgucuacuaccccgacaagguguuccggagcagcguccugcacagcacccaggaccuguuccugcccuucuucagcaacgugaccugguuccacgccaucagcggcaccaacggcaccaagcgguucgacaaccccgugcugcccuucaacgacggcguguacuucgccagcaccgagaagagcaacaucauccggggcuggaucuucggcaccacccuggacagcaagacccagagccugcugaucgugaauaacgccaccaacguggugaucaaggugugcgaguuccaguucugcaacgaccccuuccugggcguguaccacaagaacaacaagagcuggauggagagcgaguuccggguguacagcagcgccaacaacugcaccuucgaguacgugagccagcccuuccugauggaccuggagggcaagcagggcaacuucaagaaccugcgggaguucguguucaagaacaucgacggcuacuucaagaucuacagcaagcacaccccaaucaaccuggugcgggaucugccccagggcuucucagcccuggagccccugguggaccugcccaucggcaucaacaucacccgguuccagacccugcuggcccugcaccggagcuaccugaccccaggcgacagcagcagcggguggacagcaggcgcggcugcuuacuacgugggcuaccugcagccccggaccuuccugcugaaguacaacgagaacggcaccaucaccgacgccguggacugcgcccuggacccucugagcgagaccaagugcacccugaagagcuucaccguggagaagggcaucuaccagaccagcaacuuccgggugcagcccaccgagagcaucgugcgguuccccaacaucaccaaccugugccccuucggcgagguguucaacgccacccgguucgccagcguguacgccuggaaccggaagcggaucagcaacugcguggccgacuacagcgugcuguacaacagcgccagcuucagcaccuucaagugcuacggcgugagccccaccaagcugaacgaccugugcuucaccaacguguacgccgacagcuucgugauccguggcgacgaggugcggcagaucgcacccggccagacaggcaagaucgccgacuacaacuacaagcugcccgacgacuucaccggcugcgugaucgccuggaacagcaacaaccucgacagcaaggugggcggcaacuacaacuaccuguaccggcuguuccggaagagcaaccugaagcccuucgagcgggacaucagcaccgagaucuaccaagccggcuccaccccuugcaacggcguggagggcuucaacugcuacuucccucugcagagcuacggcuuccagcccaccuacggcgugggcuaccagcccuaccgggugguggugcugagcuucgagcugcugcacgccccagccaccguguguggccccaagaagagcaccaaccuggugaagaacaagugcgugaacuucaacuucaacggccuuaccggcaccggcgugcugaccgagagcaacaagaaauuccugcccuuucagcaguucggccgggacaucgacgacaccaccgacgcugugcgggauccccagacccuggagauccuggacaucaccccuugcagcuucggcggcgugagcgugaucaccccaggcaccaacaccagcaaccagguggccgugcuguaccagggcgugaacugcaccgaggugcccguggccauccacgccgaccagcugacacccaccuggcgggucuacagcaccggcagcaacguguuccagacccgggccgguugccugaucggcgccgagcacgugaacaacagcuacgagugcgacauccccaucggcgccggcaucugugccagcuaccagacccagaccaauucacaccggagggcaaggagcguggccagccagagcaucaucgccuacaccaugagccugggcgccgagaacagcguggccuacagcaacaacagcaucgccauccccaucaacuucaccaucagcgugaccaccgagauucugcccgugagcaugaccaagaccagcguggacugcaccauguacaucugcggcgacagcaccgagugcagcaaccugcugcugcaguacggcagcuucugcacccagcugaaccgggcccugaccggcaucgccguggagcaggacaagaacacccaggagguguucgcccaggugaagcagaucuacaagaccccucccaucaaggacuucggcggcuucaacuucagccagauccugcccgaccccagcaagcccagcaagcggagcuucaucgaggaccugcuguucaacaaggugacccuagccgacgccggcuucaucaagcaguacggcgacugccucggcgacauagccgcccgggaccugaucugcgcccagaaguucaacggccugaccgugcugccuccccugcugaccgacgagaugaucgcccaguacaccagcgcccuguuagccggaaccaucaccagcggcuggacuuucggcgcuggagccgcucugcagauccccuucgccaugcagauggccuaccgguucaacggcaucggcgugacccagaacgugcuguacgagaaccagaagcugaucgccaaccaguucaacagcgccaucggcaagauccaggacagccugagcagcaccgcuagcgcccugggcaagcugcaggacguggugaaccagaacgcccaggcccugaacacccuggugaagcagcugagcagcaacuucggcgccaucagcagcgugcugaacgacauccuggcccggcuggacaaggucgaggccgaggugcagaucgaccggcugaucacuggccggcugcagagccugcagaccuacgugacccagcagcugauccgggccgccgagauucgggccagcgccaaccuggccgccaccaagaugagcgagugcgugcugggccagagcaagcggguggacuucugcggcaagggcuaccaccugaugagcuuuccccagagcgcaccccacggagugguguuccugcacgugaccuacgugcccgcccaggagaagaacuucaccaccgccccagccaucugccacgacggcaaggcccacuuuccccgggagggcguguucgugagcaacggcacccacugguucgugacccagcggaacuucuacgagccccagaucaucaccacccacaacaccuucgugagcggcaacugcgacguggugaucggcaucgugaacaacaccguguacgauccccugcagcccgagcuggacagcuucaaggaggagcuggacaaguacuucaagaaucacaccagccccgacguggaccugggcgacaucagcggcaucaacgccagcguggugaacauccagaaggagaucgaucggcugaacgagguggccaagaaccugaacgagagccugaucgaccugcaggagcugggcaaguacgagcaguacaucaaguggcccugguacaucuggcugggcuucaucgccggccugaucgccaucgugauggugaccaucaugcugugcugcaugaccagcugcugcagcugccugaagggcuguugcagcugcggcagcugcugcaaguucgacgaggacgacagcgagcccgugcugaagggcgugaagcugcacuacaccugaggacuaguguccaccugucccuccugggcugcuggauugucucguuuuccugccaaauaaacaggaucagcgcuuuacagaucucaaaggcucuuuucagagccaccaaaaaaaaaaaaaaaaaaaaaaaaaaaaaaaaaaaaaaaaaaaaaaaaaaaaaaaaaaaaaaaaaaaaaaaaaaaaaaaaaaaaaaaaaaaaaaaaaaaaa

SEQ ID NO: 23898 - RNA, 4129 nt, Artificial Sequence
  SARS-CoV-2/Wuhan/WIV05/2019__EPI_ISL_402128 spike protein mRNA gc (1-1273)(K417N_E484K_N501Y_D614G)
aggagacccgugacccggaaguuguacggcuacgcgacuuucccucccacaaacccucgcgcccuuccuuuccuacuugggcccggcagaaagcuuaccauguucguguuccuggugcugcugccccuggugagcagccagugcgugaaccugaccacccggacccagcugccaccagccuacaccaacagcuucacccggggcgucuacuaccccgacaagguguuccggagcagcguccugcacagcacccaggaccuguuccugcccuucuucagcaacgugaccugguuccacgccauccacgugagcggcaccaacggcaccaagcgguucgacaaccccgugcugcccuucaacgacggcguguacuucgccagcaccgagaagagcaacaucauccggggcuggaucuucggcaccacccuggacagcaagacccagagccugcugaucgugaauaacgccaccaacguggugaucaaggugugcgaguuccaguucugcaacgaccccuuccugggcguguacuaccacaagaacaacaagagcuggauggagagcgaguuccggguguacagcagcgccaacaacugcaccuucgaguacgugagccagcccuuccugauggaccuggagggcaagcagggcaacuucaagaaccugcgggaguucguguucaagaacaucgacggcuacuucaagaucuacagcaagcacaccccaaucaaccuggugcgggaucugccccagggcuucucagcccuggagccccugguggaccugcccaucggcaucaacaucacccgguuccagacccugcuggcccugcaccggagcuaccugaccccaggcgacagcagcagcggguggacagcaggcgcggcugcuuacuacgugggcuaccugcagccccggaccuuccugcugaaguacaacgagaacggcaccaucaccgacgccguggacugcgcccuggacccucugagcgagaccaagugcacccugaagagcuucaccguggagaagggcaucuaccagaccagcaacuuccgggugcagcccaccgagagcaucgugcgguuccccaacaucaccaaccugugccccuucggcgagguguucaacgccacccgguucgccagcguguacgccuggaaccggaagcggaucagcaacugcguggccgacuacagcgugcuguacaacagcgccagcuucagcaccuucaagugcuacggcgugagccccaccaagcugaacgaccugugcuucaccaacguguacgccgacagcuucgugauccguggcgacgaggugcggcagaucgcacccggccagacaggcaacaucgccgacuacaacuacaagcugcccgacgacuucaccggcugcgugaucgccuggaacagcaacaaccucgacagcaaggugggcggcaacuacaacuaccuguaccggcuguuccggaagagcaaccugaagcccuucgagcgggacaucagcaccgagaucuaccaagccggcuccaccccuugcaacggcgugaagggcuucaacugcuacuucccucugcagagcuacggcuuccagcccaccuacggcgugggcuaccagcccuaccgggugguggugcugagcuucgagcugcugcacgccccagccaccguguguggccccaagaagagcaccaaccuggugaagaacaagugcgugaacuucaacuucaacggccuuaccggcaccggcgugcugaccgagagcaacaagaaauuccugcccuuucagcaguucggccgggacaucgccgacaccaccgacgcugugcgggauccccagacccuggagauccuggacaucaccccuugcagcuucggcggcgugagcgugaucaccccaggcaccaacaccagcaaccagguggccgugcuguaccagggcgugaacugcaccgaggugcccguggccauccacgccgaccagcugacacccaccuggcgggucuacagcaccggcagcaacguguuccagacccgggccgguugccugaucggcgccgagcacgugaacaacagcuacgagugcgacauccccaucggcgccggcaucugugccagcuaccagacccagaccaauucaccccggagggcaaggagcguggccagccagagcaucaucgccuacaccaugagccugggcgccgagaacagcguggccuacagcaacaacagcaucgccauccccaccaacuucaccaucagcgugaccaccgagauucugcccgugagcaugaccaagaccagcguggacugcaccauguacaucugcggcgacagcaccgagugcagcaaccugcugcugcaguacggcagcuucugcacccagcugaaccgggcccugaccggcaucgccguggagcaggacaagaacacccaggagguguucgcccaggugaagcagaucuacaagaccccucccaucaaggacuucggcggcuucaacuucagccagauccugcccgaccccagcaagcccagcaagcggagcuucaucgaggaccugcuguucaacaaggugacccuagccgacgccggcuucaucaagcaguacggcgacugccucggcgacauagccgcccgggaccugaucugcgcccagaaguucaacggccugaccgugcugccuccccugcugaccgacgagaugaucgcccaguacaccagcgcccuguuagccggaaccaucaccagcggcuggacuuucggcgcuggagccgcucugcagauccccuucgccaugcagauggccuaccgguucaacggcaucggcgugacccagaacgugcuguacgagaaccagaagcugaucgccaaccaguucaacagcgccaucggcaagauccaggacagccugagcagcaccgcuagcgcccugggcaagcugcaggacguggugaaccagaacgcccaggcccugaacacccuggugaagcagcugagcagcaacuucggcgccaucagcagcgugcugaacgacauccugagccggcuggacaaggucgaggccgaggugcagaucgaccggcugaucacuggccggcugcagagccugcagaccuacgugacccagcagcugauccgggccgccgagauucgggccagcgccaaccuggccgccaccaagaugagcgagugcgugcugggccagagcaagcggguggacuucugcggcaagggcuaccaccugaugagcuuuccccagagcgcaccccacggagugguguuccugcacgugaccuacgugcccgcccaggagaagaacuucaccaccgccccagccaucugccacgacggcaaggcccacuuuccccgggagggcguguucgugagcaacggcacccacugguucgugacccagcggaacuucuacgagccccagaucaucaccaccgacaacaccuucgugagcggcaacugcgacguggugaucggcaucgugaacaacaccguguacgauccccugcagcccgagcuggacagcuucaaggaggagcuggacaaguacuucaagaaucacaccagccccgacguggaccugggcgacaucagcggcaucaacgccagcguggugaacauccagaaggagaucgaucggcugaacgagguggccaagaaccugaacgagagccugaucgaccugcaggagcugggcaaguacgagcaguacaucaaguggcccugguacaucuggcugggcuucaucgccggccugaucgccaucgugauggugaccaucaugcugugcugcaugaccagcugcugcagcugccugaagggcuguugcagcugcggcagcugcugcaaguucgacgaggacgacagcgagcccgugcugaagggcgugaagcugcacuacaccugaggacuaguguccaccugucccuccugggcugcuggauugucucguuuuccugccaaauaaacaggaucagcgcuuuacagaucucaaaggcucuuuucagagccaccaaaaaaaaaaaaaaaaaaaaaaaaaaaaaaaaaaaaaaaaaaaaaaaaaaaaaaaaaaaaaaaaaaaaaaaaaaaaaaaaaaaaaaaaaaaaaaaaaaaaa

SEQ ID NO: 23899 - RNA, 4120 nt, Artificial Sequence
  SARS-CoV-2/Wuhan/WIV05/2019__EPI_ISL_402128 spike protein mRNA gc (1-1273)(L18F_D80A_D215G_L242del_A243del_L244del_R246I_K417N_E484 K_N501Y_D614G_A701V)
aggagacccgugacccggaaguuguacggcuacgcgacuuucccucccacaaacccucgcgcccuuccuuuccuacuugggcccggcagaaagcuuaccauguucguguuccuggugcugcugccccuggugagcagccagugcgugaacuucaccacccggacccagcugccaccagccuacaccaacagcuucacccggggcgucuacuaccccgacaagguguuccggagcagcguccugcacagcacccaggaccuguuccugcccuucuucagcaacgugaccugguuccacgccauccacgugagcggcaccaacggcaccaagcgguucgccaaccccgugcugcccuucaacgacggcguguacuucgccagcaccgagaagagcaacaucauccggggcuggaucuucggcaccacccuggacagcaagacccagagccugcugaucgugaauaacgccaccaacguggugaucaaggugugcgaguuccaguucugcaacgaccccuuccugggcguguacuaccacaagaacaacaagagcuggauggagagcgaguuccggguguacagcagcgccaacaacugcaccuucgaguacgugagccagcccuuccugauggaccuggagggcaagcagggcaacuucaagaaccugcgggaguucguguucaagaacaucgacggcuacuucaagaucuacagcaagcacaccccaaucaaccuggugcggggccugccccagggcuucucagcccuggagccccugguggaccugcccaucggcaucaacaucacccgguuccagacccugcacaucagcuaccugaccccaggcgacagcagcagcggguggacagcaggcgcggcugcuuacuacgugggcuaccugcagccccggaccuuccugcugaaguacaacgagaacggcaccaucaccgacgccguggacugcgcccuggacccucugagcgagaccaagugcacccugaagagcuucaccguggagaagggcaucuaccagaccagcaacuuccgggugcagcccaccgagagcaucgugcgguuccccaacaucaccaaccugugccccuucggcgagguguucaacgccacccgguucgccagcguguacgccuggaaccggaagcggaucagcaacugcguggccgacuacagcgugcuguacaacagcgccagcuucagcaccuucaagugcuacggcgugagccccaccaagcugaacgaccugugcuucaccaacguguacgccgacagcuucgugauccguggcgacgaggugcggcagaucgcacccggccagacaggcaacaucgccgacuacaacuacaagcugcccgacgacuucaccggcugcgugaucgccuggaacagcaacaaccucgacagcaaggugggcggcaacuacaacuaccuguaccggcuguuccggaagagcaaccugaagcccuucgagcgggacaucagcaccgagaucuaccaagccggcuccaccccuugcaacggcgugaagggcuucaacugcuacuucccucugcagagcuacggcuuccagcccaccuacggcgugggcuaccagcccuaccgggugguggugcugagcuucgagcugcugcacgccccagccaccguguguggccccaagaagagcaccaaccuggugaagaacaagugcgugaacuucaacuucaacggccuuaccggcaccggcgugcugaccgagagcaacaagaaauuccugcccuuucagcaguucggccgggacaucgccgacaccaccgacgcugugcgggauccccagacccuggagauccuggacaucaccccuugcagcuucggcggcgugagcgugaucaccccaggcaccaacaccagcaaccagguggccgugcuguaccagggcgugaacugcaccgaggugcccguggccauccacgccgaccagcugacacccaccuggcgggucuacagcaccggcagcaacguguuccagacccgggccgguugccugaucggcgccgagcacgugaacaacagcuacgagugcgacauccccaucggcgccggcaucugugccagcuaccagacccagaccaauucaccccggagggcaaggagcguggccagccagagcaucaucgccuacaccaugagccugggcguggagaacagcguggccuacagcaacaacagcaucgccauccccaccaacuucaccaucagcgugaccaccgagauucugcccgugagcaugaccaagaccagcguggacugcaccauguacaucugcggcgacagcaccgagugcagcaaccugcugcugcaguacggcagcuucugcacccagcugaaccgggcccugaccggcaucgccguggagcaggacaagaacacccaggagguguucgcccaggugaagcagaucuacaagaccccucccaucaaggacuucggcggcuucaacuucagccagauccugcccgaccccagcaagcccagcaagcggagcuucaucgaggaccugcuguucaacaaggugacccuagccgacgccggcuucaucaagcaguacggcgacugccucggcgacauagccgcccgggaccugaucugcgcccagaaguucaacggccugaccgugcugccuccccugcugaccgacgagaugaucgcccaguacaccagcgcccuguuagccggaaccaucaccagcggcuggacuuucggcgcuggagccgcucugcagauccccuucgccaugcagauggccuaccgguucaacggcaucggcgugacccagaacgugcuguacgagaaccagaagcugaucgccaaccaguucaacagcgccaucggcaagauccaggacagccugagcagcaccgcuagcgcccugggcaagcugcaggacguggugaaccagaacgcccaggcccugaacacccuggugaagcagcugagcagcaacuucggcgccaucagcagcgugcugaacgacauccugagccggcuggacaaggucgaggccgaggugcagaucgaccggcugaucacuggccggcugcagagccugcagaccuacgugacccagcagcugauccgggccgccgagauucgggccagcgccaaccuggccgccaccaagaugagcgagugcgugcugggccagagcaagcggguggacuucugcggcaagggcuaccaccugaugagcuuuccccagagcgcaccccacggagugguguuccugcacgugaccuacgugcccgcccaggagaagaacuucaccaccgccccagccaucugccacgacggcaaggcccacuuuccccgggagggcguguucgugagcaacggcacccacugguucgugacccagcggaacuucuacgagccccagaucaucaccaccgacaacaccuucgugagcggcaacugcgacguggugaucggcaucgugaacaacaccguguacgauccccugcagcccgagcuggacagcuucaaggaggagcuggacaaguacuucaagaaucacaccagccccgacguggaccugggcgacaucagcggcaucaacgccagcguggugaacauccagaaggagaucgaucggcugaacgagguggccaagaaccugaacgagagccugaucgaccugcaggagcugggcaaguacgagcaguacaucaaguggcccugguacaucuggcugggcuucaucgccggccugaucgccaucgugauggugaccaucaugcugugcugcaugaccagcugcugcagcugccugaagggcuguugcagcugcggcagcugcugcaaguucgacgaggacgacagcgagcccgugcugaagggcgugaagcugcacuacaccugaggacuaguguccaccugucccuccugggcugcuggauugucucguuuuccugccaaauaaacaggaucagcgcuuuacagaucucaaaggcucuuuucagagccaccaaaaaaaaaaaaaaaaaaaaaaaaaaaaaaaaaaaaaaaaaaaaaaaaaaaaaaaaaaaaaaaaaaaaaaaaaaaaaaaaaaaaaaaaaaaaaaaaaaaaa

SEQ ID NO: 23900 - RNA, 4129 nt, Artificial Sequence
  SARS-CoV-2/Wuhan/WIV05/2019__EPI_ISL_402128 spike protein mRNA gc (1-1273)(E484K_D614G)
aggagacccgugacccggaaguuguacggcuacgcgacuuucccucccacaaacccucgcgcccuuccuuuccuacuugggcccggcagaaagcuuaccauguucguguuccuggugcugcugccccuggugagcagccagugcgugaaccugaccacccggacccagcugccaccagccuacaccaacagcuucacccggggcgucuacuaccccgacaagguguuccggagcagcguccugcacagcacccaggaccuguuccugcccuucuucagcaacgugaccugguuccacgccauccacgugagcggcaccaacggcaccaagcgguucgacaaccccgugcugcccuucaacgacggcguguacuucgccagcaccgagaagagcaacaucauccggggcuggaucuucggcaccacccuggacagcaagacccagagccugcugaucgugaauaacgccaccaacguggugaucaaggugugcgaguuccaguucugcaacgaccccuuccugggcguguacuaccacaagaacaacaagagcuggauggagagcgaguuccggguguacagcagcgccaacaacugcaccuucgaguacgugagccagcccuuccugauggaccuggagggcaagcagggcaacuucaagaaccugcgggaguucguguucaagaacaucgacggcuacuucaagaucuacagcaagcacaccccaaucaaccuggugcgggaucugccccagggcuucucagcccuggagccccugguggaccugcccaucggcaucaacaucacccgguuccagacccugcuggcccugcaccggagcuaccugaccccaggcgacagcagcagcggguggacagcaggcgcggcugcuuacuacgugggcuaccugcagccccggaccuuccugcugaaguacaacgagaacggcaccaucaccgacgccguggacugcgcccuggacccucugagcgagaccaagugcacccugaagagcuucaccguggagaagggcaucuaccagaccagcaacuuccgggugcagcccaccgagagcaucgugcgguuccccaacaucaccaaccugugccccuucggcgagguguucaacgccacccgguucgccagcguguacgccuggaaccggaagcggaucagcaacugcguggccgacuacagcgugcuguacaacagcgccagcuucagcaccuucaagugcuacggcgugagccccaccaagcugaacgaccugugcuucaccaacguguacgccgacagcuucgugauccguggcgacgaggugcggcagaucgcacccggccagacaggcaagaucgccgacuacaacuacaagcugcccgacgacuucaccggcugcgugaucgccuggaacagcaacaaccucgacagcaaggugggcggcaacuacaacuaccuguaccggcuguuccggaagagcaaccugaagcccuucgagcgggacaucagcaccgagaucuaccaagccggcuccaccccuugcaacggcgugaagggcuucaacugcuacuucccucugcagagcuacggcuuccagcccaccaacggcgugggcuaccagcccuaccgggugguggugcugagcuucgagcugcugcacgccccagccaccguguguggccccaagaagagcaccaaccuggugaagaacaagugcgugaacuucaacuucaacggccuuaccggcaccggcgugcugaccgagagcaacaagaaauuccugcccuuucagcaguucggccgggacaucgccgacaccaccgacgcugugcgggauccccagacccuggagauccuggacaucaccccuugcagcuucggcggcgugagcgugaucaccccaggcaccaacaccagcaaccagguggccgugcuguaccagggcgugaacugcaccgaggugcccguggccauccacgccgaccagcugacacccaccuggcgggucuacagcaccggcagcaacguguuccagacccgggccgguugccugaucggcgccgagcacgugaacaacagcuacgagugcgacauccccaucggcgccggcaucugugccagcuaccagacccagaccaauucaccccggagggcaaggagcguggccagccagagcaucaucgccuacaccaugagccugggcgccgagaacagcguggccuacagcaacaacagcaucgccauccccaccaacuucaccaucagcgugaccaccgagauucugcccgugagcaugaccaagaccagcguggacugcaccauguacaucugcggcgacagcaccgagugcagcaaccugcugcugcaguacggcagcuucugcacccagcugaaccgggcccugaccggcaucgccguggagcaggacaagaacacccaggagguguucgcccaggugaagcagaucuacaagaccccucccaucaaggacuucggcggcuucaacuucagccagauccugcccgaccccagcaagcccagcaagcggagcuucaucgaggaccugcuguucaacaaggugacccuagccgacgccggcuucaucaagcaguacggcgacugccucggcgacauagccgcccgggaccugaucugcgcccagaaguucaacggccugaccgugcugccuccccugcugaccgacgagaugaucgcccaguacaccagcgcccuguuagccggaaccaucaccagcggcuggacuuucggcgcuggagccgcucugcagauccccuucgccaugcagauggccuaccgguucaacggcaucggcgugacccagaacgugcuguacgagaaccagaagcugaucgccaaccaguucaacagcgccaucggcaagauccaggacagccugagcagcaccgcuagcgcccugggcaagcugcaggacguggugaaccagaacgcccaggcccugaacacccuggugaagcagcugagcagcaacuucggcgccaucagcagcgugcugaacgacauccugagccggcuggacaaggucgaggccgaggugcagaucgaccggcugaucacuggccggcugcagagccugcagaccuacgugacccagcagcugauccgggccgccgagauucgggccagcgccaaccuggccgccaccaagaugagcgagugcgugcugggccagagcaagcggguggacuucugcggcaagggcuaccaccugaugagcuuuccccagagcgcaccccacggagugguguuccugcacgugaccuacgugcccgcccaggagaagaacuucaccaccgccccagccaucugccacgacggcaaggcccacuuuccccgggagggcguguucgugagcaacggcacccacugguucgugacccagcggaacuucuacgagccccagaucaucaccaccgacaacaccuucgugagcggcaacugcgacguggugaucggcaucgugaacaacaccguguacgauccccugcagcccgagcuggacagcuucaaggaggagcuggacaaguacuucaagaaucacaccagccccgacguggaccugggcgacaucagcggcaucaacgccagcguggugaacauccagaaggagaucgaucggcugaacgagguggccaagaaccugaacgagagccugaucgaccugcaggagcugggcaaguacgagcaguacaucaaguggcccugguacaucuggcugggcuucaucgccggccugaucgccaucgugauggugaccaucaugcugugcugcaugaccagcugcugcagcugccugaagggcuguugcagcugcggcagcugcugcaaguucgacgaggacgacagcgagcccgugcugaagggcgugaagcugcacuacaccugaggacuaguguccaccugucccuccugggcugcuggauugucucguuuuccugccaaauaaacaggaucagcgcuuuacagaucucaaaggcucuuuucagagccaccaaaaaaaaaaaaaaaaaaaaaaaaaaaaaaaaaaaaaaaaaaaaaaaaaaaaaaaaaaaaaaaaaaaaaaaaaaaaaaaaaaaaaaaaaaaaaaaaaaaaa

SEQ ID NO: 23901 - RNA, 4129 nt, Artificial Sequence
  SARS-CoV-2/Wuhan/WIV05/2019__EPI_ISL_402128 spike protein mRNA gc (1-1273)(L18F_T20N_P26S_D138Y_R190S_K417T_E484K_N501Y_D614G_H655Y _T1027I)
aggagacccgugacccggaaguuguacggcuacgcgacuuucccucccacaaacccucgcgcccuuccuuuccuacuugggcccggcagaaagcuuaccauguucguguuccuggugcugcugccccuggugagcagccagugcgugaacuucaccaaccggacccagcugccaagcgccuacaccaacagcuucacccggggcgucuacuaccccgacaagguguuccggagcagcguccugcacagcacccaggaccuguuccugcccuucuucagcaacgugaccugguuccacgccauccacgugagcggcaccaacggcaccaagcgguucgacaaccccgugcugcccuucaacgacggcguguacuucgccagcaccgagaagagcaacaucauccggggcuggaucuucggcaccacccuggacagcaagacccagagccugcugaucgugaauaacgccaccaacguggugaucaaggugugcgaguuccaguucugcaacuaccccuuccugggcguguacuaccacaagaacaacaagagcuggauggagagcgaguuccggguguacagcagcgccaacaacugcaccuucgaguacgugagccagcccuuccugauggaccuggagggcaagcagggcaacuucaagaaccugagcgaguucguguucaagaacaucgacggcuacuucaagaucuacagcaagcacaccccaaucaaccuggugcgggaucugccccagggcuucucagcccuggagccccugguggaccugcccaucggcaucaacaucacccgguuccagacccugcuggcccugcaccggagcuaccugaccccaggcgacagcagcagcggguggacagcaggcgcggcugcuuacuacgugggcuaccugcagccccggaccuuccugcugaaguacaacgagaacggcaccaucaccgacgccguggacugcgcccuggacccucugagcgagaccaagugcacccugaagagcuucaccguggagaagggcaucuaccagaccagcaacuuccgggugcagcccaccgagagcaucgugcgguuccccaacaucaccaaccugugccccuucggcgagguguucaacgccacccgguucgccagcguguacgccuggaaccggaagcggaucagcaacugcguggccgacuacagcgugcuguacaacagcgccagcuucagcaccuucaagugcuacggcgugagccccaccaagcugaacgaccugugcuucaccaacguguacgccgacagcuucgugauccguggcgacgaggugcggcagaucgcacccggccagacaggcaccaucgccgacuacaacuacaagcugcccgacgacuucaccggcugcgugaucgccuggaacagcaacaaccucgacagcaaggugggcggcaacuacaacuaccuguaccggcuguuccggaagagcaaccugaagcccuucgagcgggacaucagcaccgagaucuaccaagccggcuccaccccuugcaacggcgugaagggcuucaacugcuacuucccucugcagagcuacggcuuccagcccaccuacggcgugggcuaccagcccuaccgggugguggugcugagcuucgagcugcugcacgccccagccaccguguguggccccaagaagagcaccaaccuggugaagaacaagugcgugaacuucaacuucaacggccuuaccggcaccggcgugcugaccgagagcaacaagaaauuccugcccuuucagcaguucggccgggacaucgccgacaccaccgacgcugugcgggauccccagacccuggagauccuggacaucaccccuugcagcuucggcggcgugagcgugaucaccccaggcaccaacaccagcaaccagguggccgugcuguaccagggcgugaacugcaccgaggugcccguggccauccacgccgaccagcugacacccaccuggcgggucuacagcaccggcagcaacguguuccagacccgggccgguugccugaucggcgccgaguacgugaacaacagcuacgagugcgacauccccaucggcgccggcaucugugccagcuaccagacccagaccaauucaccccggagggcaaggagcguggccagccagagcaucaucgccuacaccaugagccugggcgccgagaacagcguggccuacagcaacaacagcaucgccauccccaccaacuucaccaucagcgugaccaccgagauucugcccgugagcaugaccaagaccagcguggacugcaccauguacaucugcggcgacagcaccgagugcagcaaccugcugcugcaguacggcagcuucugcacccagcugaaccgggcccugaccggcaucgccguggagcaggacaagaacacccaggagguguucgcccaggugaagcagaucuacaagaccccucccaucaaggacuucggcggcuucaacuucagccagauccugcccgaccccagcaagcccagcaagcggagcuucaucgaggaccugcuguucaacaaggugacccuagccgacgccggcuucaucaagcaguacggcgacugccucggcgacauagccgcccgggaccugaucugcgcccagaaguucaacggccugaccgugcugccuccccugcugaccgacgagaugaucgcccaguacaccagcgcccuguuagccggaaccaucaccagcggcuggacuuucggcgcuggagccgcucugcagauccccuucgccaugcagauggccuaccgguucaacggcaucggcgugacccagaacgugcuguacgagaaccagaagcugaucgccaaccaguucaacagcgccaucggcaagauccaggacagccugagcagcaccgcuagcgcccugggcaagcugcaggacguggugaaccagaacgcccaggcccugaacacccuggugaagcagcugagcagcaacuucggcgccaucagcagcgugcugaacgacauccugagccggcuggacaaggucgaggccgaggugcagaucgaccggcugaucacuggccggcugcagagccugcagaccuacgugacccagcagcugauccgggccgccgagauucgggccagcgccaaccuggccgccaucaagaugagcgagugcgugcugggccagagcaagcggguggacuucugcggcaagggcuaccaccugaugagcuuuccccagagcgcaccccacggagugguguuccugcacgugaccuacgugcccgcccaggagaagaacuucaccaccgccccagccaucugccacgacggcaaggcccacuuuccccgggagggcguguucgugagcaacggcacccacugguucgugacccagcggaacuucuacgagccccagaucaucaccaccgacaacaccuucgugagcggcaacugcgacguggugaucggcaucgugaacaacaccguguacgauccccugcagcccgagcuggacagcuucaaggaggagcuggacaaguacuucaagaaucacaccagccccgacguggaccugggcgacaucagcggcaucaacgccagcguggugaacauccagaaggagaucgaucggcugaacgagguggccaagaaccugaacgagagccugaucgaccugcaggagcugggcaaguacgagcaguacaucaaguggcccugguacaucuggcugggcuucaucgccggccugaucgccaucgugauggugaccaucaugcugugcugcaugaccagcugcugcagcugccugaagggcuguugcagcugcggcagcugcugcaaguucgacgaggacgacagcgagcccgugcugaagggcgugaagcugcacuacaccugaggacuaguguccaccugucccuccugggcugcuggauugucucguuuuccugccaaauaaacaggaucagcgcuuuacagaucucaaaggcucuuuucagagccaccaaaaaaaaaaaaaaaaaaaaaaaaaaaaaaaaaaaaaaaaaaaaaaaaaaaaaaaaaaaaaaaaaaaaaaaaaaaaaaaaaaaaaaaaaaaaaaaaaaaaa

SEQ ID NO: 23902 - RNA, 4129 nt, Artificial Sequence
  SARS-CoV-2/Wuhan/WIV05/2019__EPI_ISL_402128 spike protein mRNA gc (1-1273)(S13I_W152C_L452R_D614G)
aggagacccgugacccggaaguuguacggcuacgcgacuuucccucccacaaacccucgcgcccuuccuuuccuacuugggcccggcagaaagcuuaccauguucguguuccuggugcugcugccccuggugagcauccagugcgugaaccugaccacccggacccagcugccaccagccuacaccaacagcuucacccggggcgucuacuaccccgacaagguguuccggagcagcguccugcacagcacccaggaccuguuccugcccuucuucagcaacgugaccugguuccacgccauccacgugagcggcaccaacggcaccaagcgguucgacaaccccgugcugcccuucaacgacggcguguacuucgccagcaccgagaagagcaacaucauccggggcuggaucuucggcaccacccuggacagcaagacccagagccugcugaucgugaauaacgccaccaacguggugaucaaggugugcgaguuccaguucugcaacgaccccuuccugggcguguacuaccacaagaacaacaagagcugcauggagagcgaguuccggguguacagcagcgccaacaacugcaccuucgaguacgugagccagcccuuccugauggaccuggagggcaagcagggcaacuucaagaaccugcgggaguucguguucaagaacaucgacggcuacuucaagaucuacagcaagcacaccccaaucaaccuggugcgggaucugccccagggcuucucagcccuggagccccugguggaccugcccaucggcaucaacaucacccgguuccagacccugcuggcccugcaccggagcuaccugaccccaggcgacagcagcagcggguggacagcaggcgcggcugcuuacuacgugggcuaccugcagccccggaccuuccugcugaaguacaacgagaacggcaccaucaccgacgccguggacugcgcccuggacccucugagcgagaccaagugcacccugaagagcuucaccguggagaagggcaucuaccagaccagcaacuuccgggugcagcccaccgagagcaucgugcgguuccccaacaucaccaaccugugccccuucggcgagguguucaacgccacccgguucgccagcguguacgccuggaaccggaagcggaucagcaacugcguggccgacuacagcgugcuguacaacagcgccagcuucagcaccuucaagugcuacggcgugagccccaccaagcugaacgaccugugcuucaccaacguguacgccgacagcuucgugauccguggcgacgaggugcggcagaucgcacccggccagacaggcaagaucgccgacuacaacuacaagcugcccgacgacuucaccggcugcgugaucgccuggaacagcaacaaccucgacagcaaggugggcggcaacuacaacuaccgcuaccggcuguuccggaagagcaaccugaagcccuucgagcgggacaucagcaccgagaucuaccaagccggcuccaccccuugcaacggcguggagggcuucaacugcuacuucccucugcagagcuacggcuuccagcccaccaacggcgugggcuaccagcccuaccgggugguggugcugagcuucgagcugcugcacgccccagccaccguguguggccccaagaagagcaccaaccuggugaagaacaagugcgugaacuucaacuucaacggccuuaccggcaccggcgugcugaccgagagcaacaagaaauuccugcccuuucagcaguucggccgggacaucgccgacaccaccgacgcugugcgggauccccagacccuggagauccuggacaucaccccuugcagcuucggcggcgugagcgugaucaccccaggcaccaacaccagcaaccagguggccgugcuguaccagggcgugaacugcaccgaggugcccguggccauccacgccgaccagcugacacccaccuggcgggucuacagcaccggcagcaacguguuccagacccgggccgguugccugaucggcgccgagcacgugaacaacagcuacgagugcgacauccccaucggcgccggcaucugugccagcuaccagacccagaccaauucaccccggagggcaaggagcguggccagccagagcaucaucgccuacaccaugagccugggcgccgagaacagcguggccuacagcaacaacagcaucgccauccccaccaacuucaccaucagcgugaccaccgagauucugcccgugagcaugaccaagaccagcguggacugcaccauguacaucugcggcgacagcaccgagugcagcaaccugcugcugcaguacggcagcuucugcacccagcugaaccgggcccugaccggcaucgccguggagcaggacaagaacacccaggagguguucgcccaggugaagcagaucuacaagaccccucccaucaaggacuucggcggcuucaacuucagccagauccugcccgaccccagcaagcccagcaagcggagcuucaucgaggaccugcuguucaacaaggugacccuagccgacgccggcuucaucaagcaguacggcgacugccucggcgacauagccgcccgggaccugaucugcgcccagaaguucaacggccugaccgugcugccuccccugcugaccgacgagaugaucgcccaguacaccagcgcccuguuagccggaaccaucaccagcggcuggacuuucggcgcuggagccgcucugcagauccccuucgccaugcagauggccuaccgguucaacggcaucggcgugacccagaacgugcuguacgagaaccagaagcugaucgccaaccaguucaacagcgccaucggcaagauccaggacagccugagcagcaccgcuagcgcccugggcaagcugcaggacguggugaaccagaacgcccaggcccugaacacccuggugaagcagcugagcagcaacuucggcgccaucagcagcgugcugaacgacauccugagccggcuggacaaggucgaggccgaggugcagaucgaccggcugaucacuggccggcugcagagccugcagaccuacgugacccagcagcugauccgggccgccgagauucgggccagcgccaaccuggccgccaccaagaugagcgagugcgugcugggccagagcaagcggguggacuucugcggcaagggcuaccaccugaugagcuuuccccagagcgcaccccacggagugguguuccugcacgugaccuacgugcccgcccaggagaagaacuucaccaccgccccagccaucugccacgacggcaaggcccacuuuccccgggagggcguguucgugagcaacggcacccacugguucgugacccagcggaacuucuacgagccccagaucaucaccaccgacaacaccuucgugagcggcaacugcgacguggugaucggcaucgugaacaacaccguguacgauccccugcagcccgagcuggacagcuucaaggaggagcuggacaaguacuucaagaaucacaccagccccgacguggaccugggcgacaucagcggcaucaacgccagcguggugaacauccagaaggagaucgaucggcugaacgagguggccaagaaccugaacgagagccugaucgaccugcaggagcugggcaaguacgagcaguacaucaaguggcccugguacaucuggcugggcuucaucgccggccugaucgccaucgugauggugaccaucaugcugugcugcaugaccagcugcugcagcugccugaagggcuguugcagcugcggcagcugcugcaaguucgacgaggacgacagcgagcccgugcugaagggcgugaagcugcacuacaccugaggacuaguguccaccugucccuccugggcugcuggauugucucguuuuccugccaaauaaacaggaucagcgcuuuacagaucucaaaggcucuuuucagagccaccaaaaaaaaaaaaaaaaaaaaaaaaaaaaaaaaaaaaaaaaaaaaaaaaaaaaaaaaaaaaaaaaaaaaaaaaaaaaaaaaaaaaaaaaaaaaaaaaaaaaa

SEQ ID NO: 23903 - RNA, 4129 nt, Artificial Sequence
  SARS-CoV-2/Wuhan/WIV05/2019__EPI_ISL_402128 spike protein mRNA gc (1-1273)
aggagacccgugacccggaaguuguacggcuacgcgacuuucccucccacaaacccucgcgcccuuccuuuccuacuugggcccggcagaaagcuuaccauguucguguuccuggugcugcugccccuggugagcagccagugcgugaaccugaccacccggacccagcugcccccugccuacaccaacagcuucacccggggcguguacuaccccgacaagguguuccggagcagcgugcugcacagcacccaggaccuguuccugcccuucuucagcaacgugaccugguuccacgccauccacgugagcggcaccaacggcaccaagcgguucgacaacccagugcugcccuucaacgacggcguguacuucgccagcaccgagaagucaaacaucauccggggcuggaucuucggcaccacccuggacagcaagacacagagccugcugaucgugaacaacgccaccaacguggugaucaaggugugcgaguuucaguucugcaacgaccccuuccugggcguguacuaccacaagaacaacaagagcuggauggagagcgaguuccgggucuacagcagcgcuaacaauugcaccuucgaguacgugagccagcccuuccugauggaccucgagggcaagcagggcaacuucaagaaccugcgggaguucguguucaagaacaucgauggcuacuucaagaucuacagcaagcacacccccaucaaccuggugcgggaccugccccagggauucagcgcccuggagccucugguggaccugcccaucggcaucaacaucaccagguuccagacccugcuggcccugcaccggagcuaccugacccccggcgacagcagcagcggcuggaccgccggcgccgccgcauacuacgugggcuaccugcagccacggaccuuccugcugaaguacaacgagaacggcaccaucaccgacgccguggacugcgcccuggacccccugagcgagaccaagugcacccuaaagagcuucaccguggagaagggcaucuaccagaccagcaacuuccgggugcagcccacugagagcaucgugcgguuccccaacauuaccaaccugugucccuucggcgagguguucaacgccacccgguucgccagcguguacgccuggaaccggaagcggaucagcaacugcguggccgacuacagcgugcuguacaacagcgccagcuucagcaccuucaagugcuacggcgugagcccuaccaagcugaacgaccugugcuucaccaacguguacgcugacagcuucgugauccggggcgacgaggugcggcagaucgcccccggccagaccggcaagaucgccgacuacaacuacaagcugcccgacgacuucaccggcugcgugaucgccuggaacagcaacaaccuggacagcaaggugggcggcaacuacaacuaccuguaccggcuguuccguaagagcaaccugaagccauucgagcgggacaucagcaccgagaucuaccaggccggcagcacccccugcaacgguguggagggcuuuaacugcuacuucccccugcagagcuacggcuuccagcccaccaacggcgugggcuaccagcccuaccgggugguggugcugagcuucgagcugcugcacgcccccgccaccgugugcggcccuaaaaagagcaccaaccuggugaagaacaagugcgugaacuucaauuucaacggccugaccggcaccggcgugcugaccgagagcaacaagaaguuccugcccuuccagcaguucggccgggauaucgccgacaccaccgacgcagugcgggacccccagacccuggagauccuggacaucaccccaugcagcuucggcggcgugagcgucaucacccccggcacaaacaccagcaaccagguggccgugcuguaccaggacgugaacugcaccgaggugcccguggccauccacgccgaccagcugacccccaccuggcggguguacagcaccggaagcaacguguuccagacccgggccggcugccugaucggcgccgagcacgugaacaacuccuacgagugcgacauccccaucggcgcuggcaucugcgccagcuaccagacccagaccaacagcccccggcgggcccggagcguggccagccagagcaucaucgccuacaccaugagcuuaggcgccgagaacagcguggccuacagcaacaacagcaucgcgaucccuaccaacuucaccaucagcgugaccaccgagauacugcccgugagcaugaccaagaccagcguggacuguaccauguacaucugcggcgacagcaccgagugcagcaaccugcugcugcaguacggcagcuucugcacccagcugaaccgggcccugaccggcaucgccguggagcaggacaagaacacccaagagguguucgcccaggugaagcagaucuacaagacucccccaaucaaggacuucggcggcuucaacuucagccagauccugcccgaccccagcaagcccagcaagcggagcuucaucgaggaccugcuguucaacaaggugacccuggccgacgccggcuucaucaagcaguacggcgauugccugggcgacaucgccgcucgggaccugaucugcgcccagaaguucaacgggcugaccgugcugcccccucugcugaccgacgagaugaucgcccaguacaccagcgcccugcuugccggcaccaucaccagcggcuggaccuucggcgccggcgcagcccugcagauccccuucgccaugcagauggccuaccgguucaacggcaucggcgugacccagaacgugcuguacgagaaccagaagcugaucgccaaccaguucaacagcgccaucggcaagauccaggacagccugagcagcaccgccagcgcccugggcaagcugcaggacguggugaaccagaacgcucaggcccugaacacccuggugaagcagcugagcagcaacuucggcgccaucagcucagugcugaaugacauccugagcaggcuggacaagguggaggccgaggugcagaucgaccggcugaucaccggccggcugcagagccugcagaccuacgugacccagcagcugauccgggccgccgagauccgggccagcgccaaccuggcagccaccaagaugagcgagugcgugcugggccagagcaagcggguggacuuuugcggcaagggcuaccaccugaugagcuucccccagagcgccccacacggcgugguguuccuccacgucacauacgugcccgcccaggagaagaacuucaccaccgcccccgccauuugccacgacggcaaggcucacuucccccgggagggcguguucgugagcaacggaacccacugguucgugacccagcggaacuucuacgagccccagaucaucaccaccgacaacaccuucgugagcggcaacugcgacguggugaucggcaucgugaacaacaccguguacgacccccugcagccugagcuggacagcuucaaggaggagcuggacaaguacuucaagaaccacaccagccccgauguggaccugggcgacaucagcggcaucaacgccagcguggugaacauccagaaggagaucgaccggcugaacgagguggccaagaaccugaacgagagccugaucgaccugcaggagcugggcaaguacgagcaguacaucaaguggcccugguacaucuggcugggcuucaucgccggccugaucgccaucgugauggugaccaucaugcugugcugcaugaccagcugcuguagcugccugaagggcugcugcagcugcggcagcugcugcaaguucgacgaggacgacagcgagccagugcugaagggcgugaagcugcacuacaccugaggacuaguguccaccugucccuccugggcugcuggauugucucguuuuccugccaaauaaacaggaucagcgcuuuacagaucucaaaggcucuuuucagagccaccaaaaaaaaaaaaaaaaaaaaaaaaaaaaaaaaaaaaaaaaaaaaaaaaaaaaaaaaaaaaaaaaaaaaaaaaaaaaaaaaaaaaaaaaaaaaaaaaaaaaa

SEQ ID NO: 23904 - RNA, 4129 nt, Artificial Sequence
  SARS-CoV-2/Wuhan/WIV05/2019__EPI_ISL_402128 spike protein mRNA gc (1-1273)(D614G)
aggagacccgugacccggaaguuguacggcuacgcgacuuucccucccacaaacccucgcgcccuuccuuuccuacuugggcccggcagaaagcuuaccauguucguguuccuggugcugcugccccuggugagcagccagugcgugaaccugaccacccggacccagcugcccccugccuacaccaacagcuucacccggggcguguacuaccccgacaagguguuccggagcagcgugcugcacagcacccaggaccuguuccugcccuucuucagcaacgugaccugguuccacgccauccacgugagcggcaccaacggcaccaagcgguucgacaacccagugcugcccuucaacgacggcguguacuucgccagcaccgagaagucaaacaucauccggggcuggaucuucggcaccacccuggacagcaagacacagagccugcugaucgugaacaacgccaccaacguggugaucaaggugugcgaguuucaguucugcaacgaccccuuccugggcguguacuaccacaagaacaacaagagcuggauggagagcgaguuccgggucuacagcagcgcuaacaauugcaccuucgaguacgugagccagcccuuccugauggaccucgagggcaagcagggcaacuucaagaaccugcgggaguucguguucaagaacaucgauggcuacuucaagaucuacagcaagcacacccccaucaaccuggugcgggaccugccccagggauucagcgcccuggagccucugguggaccugcccaucggcaucaacaucaccagguuccagacccugcuggcccugcaccggagcuaccugacccccggcgacagcagcagcggcuggaccgccggcgccgccgcauacuacgugggcuaccugcagccacggaccuuccugcugaaguacaacgagaacggcaccaucaccgacgccguggacugcgcccuggacccccugagcgagaccaagugcacccuaaagagcuucaccguggagaagggcaucuaccagaccagcaacuuccgggugcagcccacugagagcaucgugcgguuccccaacauuaccaaccugugucccuucggcgagguguucaacgccacccgguucgccagcguguacgccuggaaccggaagcggaucagcaacugcguggccgacuacagcgugcuguacaacagcgccagcuucagcaccuucaagugcuacggcgugagcccuaccaagcugaacgaccugugcuucaccaacguguacgcugacagcuucgugauccggggcgacgaggugcggcagaucgcccccggccagaccggcaagaucgccgacuacaacuacaagcugcccgacgacuucaccggcugcgugaucgccuggaacagcaacaaccuggacagcaaggugggcggcaacuacaacuaccuguaccggcuguuccguaagagcaaccugaagccauucgagcgggacaucagcaccgagaucuaccaggccggcagcacccccugcaacgguguggagggcuuuaacugcuacuucccccugcagagcuacggcuuccagcccaccaacggcgugggcuaccagcccuaccgggugguggugcugagcuucgagcugcugcacgcccccgccaccgugugcggcccuaaaaagagcaccaaccuggugaagaacaagugcgugaacuucaauuucaacggccugaccggcaccggcgugcugaccgagagcaacaagaaguuccugcccuuccagcaguucggccgggauaucgccgacaccaccgacgcagugcgggacccccagacccuggagauccuggacaucaccccaugcagcuucggcggcgugagcgucaucacccccggcacaaacaccagcaaccagguggccgugcuguaccagggagugaacugcaccgaggugcccguggccauccacgccgaccagcugacccccaccuggcggguguacagcaccggcagcaacguguuccagacccgggccggcugccugaucggcgccgagcacgugaacaacuccuacgagugcgacauccccaucggcgcuggcaucugcgccagcuaccagacccagaccaacagcccccggcgggcccggagcguggccagccagagcaucaucgccuacaccaugagcuuaggcgccgagaacagcguggccuacagcaacaacagcaucgcgaucccuaccaacuucaccaucagcgugaccaccgagauacugcccgugagcaugaccaagaccagcguggacuguaccauguacaucugcggcgacagcaccgagugcagcaaccugcugcugcaguacggcagcuucugcacccagcugaaccgggcccugaccggcaucgccguggagcaggacaagaacacccaagagguguucgcccaggugaagcagaucuacaagacucccccaaucaaggacuucggcggcuucaacuucagccagauccugcccgaccccagcaagcccagcaagcggagcuucaucgaggaccugcuguucaacaaggugacccuggccgacgccggcuucaucaagcaguacggcgacugccugggggauaucgccgcucgggaccugaucugcgcccagaaguucaacggccugaccgugcugcccccucugcugaccgacgagaugaucgcccaguacaccagcgcccugcuugccggcaccaucaccagcggcuggaccuucggcgccggcgcagcccugcagauccccuucgccaugcagauggccuaccgguucaacggcaucggcgugacccagaacgugcuguacgagaaccagaagcugaucgccaaccaguucaacagcgccaucggcaagauccaggacagccugagcagcaccgccagcgcccugggcaagcugcaggacguggugaaccagaacgcucaggcccugaacacccuggugaagcagcugagcagcaacuucggcgccaucagcucagugcugaaugacauccugagcaggcuggacaagguggaggccgaggugcagaucgaccggcugaucaccggccggcugcagagccugcagaccuacgugacccagcagcugauccgggccgccgagauccgggccagcgccaaccuggcagccaccaagaugagcgagugcgugcugggccagagcaagcggguggacuuuugcggcaagggcuaccaccugaugagcuucccccagagcgccccacacggcgugguguuccuccacgucacauacgugcccgcccaggagaagaacuucaccaccgcccccgccauuugccacgacggcaaggcucacuucccccgggagggaguguucgugagcaacggcacccacugguucgugacccagcggaacuucuacgagccccagaucaucaccaccgacaacaccuucgugagcggcaacugcgacguggugaucggcaucgugaacaacaccguguacgacccccugcagccugagcuggacagcuucaaggaggagcuggacaaguacuucaagaaccacaccagccccgacguggaucugggcgacaucagcggcaucaacgccagcguggugaacauccagaaggagaucgaccggcugaacgagguggccaagaaccugaacgagagccugaucgaccugcaggagcugggcaaguacgagcaguacaucaaguggcccugguacaucuggcugggcuucaucgccggccugaucgccaucgugauggugaccaucaugcugugcugcaugaccagcugcuguagcugccugaagggcugcugcagcugcggcagcugcugcaaguucgacgaggacgacagcgagccagugcugaagggcgugaagcugcacuacaccugaggacuaguguccaccugucccuccugggcugcuggauugucucguuuuccugccaaauaaacaggaucagcgcuuuacagaucucaaaggcucuuuucagagccaccaaaaaaaaaaaaaaaaaaaaaaaaaaaaaaaaaaaaaaaaaaaaaaaaaaaaaaaaaaaaaaaaaaaaaaaaaaaaaaaaaaaaaaaaaaaaaaaaaaaaa

SEQ ID NO: 23905 - RNA, 4129 nt, Artificial Sequence
  SARS-CoV-2/Wuhan/WIV05/2019__EPI_ISL_402128 spike protein mRNA gc (1-1273)(A222V_D614G)
aggagacccgugacccggaaguuguacggcuacgcgacuuucccucccacaaacccucgcgcccuuccuuuccuacuugggcccggcagaaagcuuaccauguucguguuccuggugcugcugccccuggugagcagccagugcgugaaccugaccacccggacccagcugcccccugccuacaccaacagcuucacccggggcguguacuaccccgacaagguguuccggagcagcgugcugcacagcacccaggaccuguuccugcccuucuucagcaacgugaccugguuccacgccauccacgugagcggcaccaacggcaccaagcgguucgacaacccagugcugcccuucaacgacggcguguacuucgccagcaccgagaagucaaacaucauccggggcuggaucuucggcaccacccuggacagcaagacacagagccugcugaucgugaacaacgccaccaacguggugaucaaggugugcgaguuucaguucugcaacgaccccuuccugggcguguacuaccacaagaacaacaagagcuggauggagagcgaguuccgggucuacagcagcgcuaacaauugcaccuucgaguacgugagccagcccuuccugauggaccucgagggcaagcagggcaacuucaagaaccugcgggaguucguguucaagaacaucgauggcuacuucaagaucuacagcaagcacacccccaucaaccuggugcgggaccugccccagggauucagcgugcuggagccucugguggaccugcccaucggcaucaacaucaccagguuccagacccugcuggcccugcaccggagcuaccugacccccggcgacagcagcagcggcuggaccgccggcgccgccgccuacuacgugggcuaccugcagccacggaccuuccugcugaaguacaacgagaacggcaccaucaccgacgcaguggacugcgcccuggacccccugagcgagaccaagugcacccuaaagagcuucaccguggagaagggcaucuaccagaccagcaacuuccgggugcagcccacugagagcaucgugcgguuccccaacauuaccaaccugugucccuucggcgagguguucaacgccacccgguucgccagcguguacgccuggaaccggaagcggaucagcaacugcguggccgacuacagcgugcuguacaacagcgccagcuucagcaccuucaagugcuacggcgugagcccuaccaagcugaacgaccugugcuucaccaacguguacgccgacagcuucgugauccggggcgacgaggugcggcagaucgcucccggccagaccggcaagaucgccgacuacaacuacaagcugcccgacgacuucaccggcugcgugaucgccuggaacagcaacaaccuggacagcaaggugggcggcaacuacaacuaccuguaccggcuguuccguaagagcaaccugaagccauucgagcgggacaucagcaccgagaucuaccaggccggcagcacccccugcaacgguguggagggcuuuaacugcuacuucccccugcagagcuacggcuuccagcccaccaacggcgugggcuaccagcccuaccgggugguggugcugagcuucgagcugcugcacgcccccgccaccgugugcggcccuaaaaagagcaccaaccuggugaagaacaagugcgugaacuucaauuucaacggccugaccggcaccggcgugcugaccgagagcaacaagaaguuccugcccuuccagcaguucggccgggauaucgccgacaccaccgacgccgugcgggacccccagacccuggagauccuggacaucaccccaugcagcuucggcggcgucagcgugaucacccccggcacaaacaccagcaaccagguggcagugcuguaccagggagugaacugcaccgaggugcccguggccauccacgccgaccagcugacccccaccuggcggguguacagcaccggcagcaacguguuccagacccgggccggcugccugaucggcgccgagcacgugaacaacuccuacgagugcgacauccccaucggcgccggcaucugcgcuagcuaccagacccagaccaacagcccccggcgggcccggagcguggccagccagagcaucaucgccuacaccaugagcuuaggcgccgagaacagcguggccuacagcaacaacagcaucgccaucccuaccaacuucaccaucagcgugaccaccgagauacugcccgugagcaugaccaagaccagcguggacuguaccauguacaucugcggcgacagcaccgagugcagcaaccugcugcugcaguacggcagcuucugcacccagcugaaccgggcgcugaccggcaucgccguggagcaggacaagaacacccaagagguguucgcccaggugaagcagaucuacaagacucccccaaucaaggacuucggcggcuucaacuucagccagauccugcccgaccccagcaagcccagcaagcggagcuucaucgaggaccugcuguucaacaaggugacccuggccgacgccggcuucaucaagcaguacggcgacugccugggggauaucgccgcccgggaccugaucugcgcucagaaguucaacggccugaccgugcugcccccucugcugaccgacgagaugaucgcccaguacaccagcgcccugcuugccggcaccaucaccagcggcuggaccuucggcgccggcgccgcacugcagauccccuucgccaugcagauggccuaccgguucaacggcaucggcgugacccagaacgugcuguacgagaaccagaagcugaucgccaaccaguucaacagcgccaucggcaagauccaggacagccugagcagcaccgccagcgcccugggcaagcugcaggacguggugaaccagaacgcccaggcucugaacacccuggugaagcagcugagcagcaacuucggcgccaucagcucagugcugaaugacauccugagcaggcuggacaagguggaggccgaggugcagaucgaccggcugaucaccggccggcugcagagccugcagaccuacgugacccagcagcugauccgggccgccgagauccgggccagcgccaaccuggccgcaaccaagaugagcgagugcgugcugggccagagcaagcggguggacuuuugcggcaagggcuaccaccugaugagcuucccccagagcgccccacacggcguggucuuccuccacgugacauacgugcccgcccaggagaagaacuucaccaccgcccccgccauuugccacgacggcaaggcccacuucccccgggagggaguguucgugagcaacggcacccacugguucgugacccagcggaacuucuacgagccccagaucaucaccaccgacaacaccuucgugagcggcaacugcgacguggugaucggcaucgugaacaacaccguguacgacccccugcagccugagcuggacagcuucaaggaggagcuggacaaguacuucaagaaccacaccagccccgacguggaucugggcgacaucagcggcaucaacgcuagcguggugaacauccagaaggagaucgaccggcugaacgagguggccaagaaccugaacgagagccugaucgaccugcaggagcugggcaaguacgagcaguacaucaaguggcccugguacaucuggcugggcuucaucgccggccugaucgccaucgugauggugaccaucaugcugugcugcaugaccagcugcuguagcugccugaagggcugcugcagcugcggcagcugcugcaaguucgacgaggacgacagcgagccagugcugaagggcgugaagcugcacuacaccugaggacuaguguccaccugucccuccugggcugcuggauugucucguuuuccugccaaauaaacaggaucagcgcuuuacagaucucaaaggcucuuuucagagccaccaaaaaaaaaaaaaaaaaaaaaaaaaaaaaaaaaaaaaaaaaaaaaaaaaaaaaaaaaaaaaaaaaaaaaaaaaaaaaaaaaaaaaaaaaaaaaaaaaaaaa

SEQ ID NO: 23906 - RNA, 4129 nt, Artificial Sequence
  SARS-CoV-2/Wuhan/WIV05/2019__EPI_ISL_402128 spike protein mRNA gc (1-1273)(N439K_D614G)
aggagacccgugacccggaaguuguacggcuacgcgacuuucccucccacaaacccucgcgcccuuccuuuccuacuugggcccggcagaaagcuuaccauguucguguuccuggugcugcugccccuggugagcagccagugcgugaaccugaccacccggacccagcugcccccugccuacaccaacagcuucacccggggcguguacuaccccgacaagguguuccggagcagcgugcugcacagcacccaggaccuguuccugcccuucuucagcaacgugaccugguuccacgccauccacgugagcggcaccaacggcaccaagcgguucgacaacccagugcugcccuucaacgacggcguguacuucgccagcaccgagaagucaaacaucauccggggcuggaucuucggcaccacccuggacagcaagacacagagccugcugaucgugaacaacgccaccaacguggugaucaaggugugcgaguuucaguucugcaacgaccccuuccugggcguguacuaccacaagaacaacaagagcuggauggagagcgaguuccgggucuacagcagcgcuaacaauugcaccuucgaguacgugagccagcccuuccugauggaccucgagggcaagcagggcaacuucaagaaccugcgggaguucguguucaagaacaucgauggcuacuucaagaucuacagcaagcacacccccaucaaccuggugcgggaccugccccagggauucagcgcccuggagccucugguggaccugcccaucggcaucaacaucaccagguuccagacccugcuggcccugcaccggagcuaccugacccccggcgacagcagcagcggcuggaccgccggcgccgccgcauacuacgugggcuaccugcagccacggaccuuccugcugaaguacaacgagaacggcaccaucaccgacgccguggacugcgcccuggacccccugagcgagaccaagugcacccuaaagagcuucaccguggagaagggcaucuaccagaccagcaacuuccgggugcagcccacugagagcaucgugcgguuccccaacauuaccaaccugugucccuucggcgagguguucaacgccacccgguucgccagcguguacgccuggaaccggaagcggaucagcaacugcguggccgacuacagcgugcuguacaacagcgccagcuucagcaccuucaagugcuacggcgugagcccuaccaagcugaacgaccugugcuucaccaacguguacgcugacagcuucgugauccggggcgacgaggugcggcagaucgcccccggccagaccggcaagaucgccgacuacaacuacaagcugcccgacgacuucaccggcugcgugaucgccuggaacagcaagaaccuggacagcaaggugggcggcaacuacaacuaccuguaccggcuguuccguaagagcaaccugaagccauucgagcgggacaucagcaccgagaucuaccaggccggcagcacccccugcaacgguguggagggcuuuaacugcuacuucccccugcagagcuacggcuuccagcccaccaacggcgugggcuaccagcccuaccgggugguggugcugagcuucgagcugcugcacgcccccgccaccgugugcggcccuaaaaagagcaccaaccuggugaagaacaagugcgugaacuucaacuucaauggccugaccggcaccggcgugcugaccgagagcaacaagaaguuccugcccuuccagcaguucggccgggauaucgccgacaccaccgacgcagugcgggacccccagacccuggagauccuggacaucaccccaugcagcuucggcggcgugagcgucaucacccccggcacaaacaccagcaaccagguggccgugcuguaccagggagugaacugcaccgaggugcccguggccauccacgccgaccagcugacccccaccuggcggguguacagcaccggcagcaacguguuccagacccgggccggcugccugaucggcgccgagcacgugaacaacuccuacgagugcgacauccccaucggcgcuggcaucugcgccagcuaccagacccagaccaacagcccccggcgggcccggagcguggccagccagagcaucaucgccuacaccaugagcuuaggcgccgagaacagcguggccuacagcaacaacagcaucgcgaucccuaccaacuucaccaucagcgugaccaccgagauacugcccgugagcaugaccaagaccagcguggacuguaccauguacaucugcggcgacagcaccgagugcagcaaccugcugcugcaguacggcagcuucugcacccagcugaaccgggcccugaccggcaucgccguggagcaggacaagaacacccaagagguguucgcccaggugaagcagaucuacaagacucccccaaucaaggacuucggcggcuucaacuucagccagauccugcccgaccccagcaagcccagcaagcggagcuucaucgaggaccugcuguucaacaaggugacccuggccgacgccggcuucaucaagcaguacggcgacugccugggggauaucgccgcucgggaccugaucugcgcccagaaguucaacggccugaccgugcugcccccucugcugaccgacgagaugaucgcccaguacaccagcgcccugcuugccggcaccaucaccagcggcuggaccuucggcgccggcgcagcccugcagauccccuucgccaugcagauggccuaccgguucaacggcaucggcgugacccagaacgugcuguacgagaaccagaagcugaucgccaaccaguucaacagcgccaucggcaagauccaggacagccugagcagcaccgccagcgcccugggcaagcugcaggacguggugaaccagaacgcucaggcccugaacacccuggugaagcagcugagcagcaacuucggcgccaucagcucagugcugaacgacauccugagcaggcuggacaagguggaggccgaggugcagaucgaccggcugaucaccggccggcugcagagccugcagaccuacgugacccagcagcugauccgggccgccgagauccgggccagcgccaaucuggcagccaccaagaugagcgagugcgugcugggccagagcaagcggguggacuuuugcggcaagggcuaccaccugaugagcuucccccagagcgccccacacggcgugguguuccuccacgucacauacgugcccgcccaggagaagaacuucaccaccgcccccgccauuugccacgacggcaaggcucacuucccccgggagggaguguucgugagcaacggcacccacugguucgugacccagcggaacuucuacgagccccagaucaucaccaccgacaacaccuucgugagcggcaacugcgacguggugaucggcaucgugaacaacaccguguacgacccccugcagccugagcuggacagcuucaaggaggagcuggacaaguacuucaagaaccacaccagccccgacguggaucugggcgacaucagcggcaucaacgccagcguggugaacauccagaaggagaucgaccggcugaacgagguggccaagaaccugaacgagagccugaucgaccugcaggagcugggcaaguacgagcaguacaucaaguggcccugguacaucuggcugggcuucaucgccggccugaucgccaucgugauggugaccaucaugcugugcugcaugaccagcugcuguagcugccugaagggcugcugcagcugcggcagcugcugcaaguucgacgaggacgacagcgagccagugcugaagggcgugaagcugcacuacaccugaggacuaguguccaccugucccuccugggcugcuggauugucucguuuuccugccaaauaaacaggaucagcgcuuuacagaucucaaaggcucuuuucagagccaccaaaaaaaaaaaaaaaaaaaaaaaaaaaaaaaaaaaaaaaaaaaaaaaaaaaaaaaaaaaaaaaaaaaaaaaaaaaaaaaaaaaaaaaaaaaaaaaaaaaaa

SEQ ID NO: 23907 - RNA, 4129 nt, Artificial Sequence
  SARS-CoV-2/Wuhan/WIV05/2019__EPI_ISL_402128 spike protein mRNA gc (1-1273)(S477N_D614G)
aggagacccgugacccggaaguuguacggcuacgcgacuuucccucccacaaacccucgcgcccuuccuuuccuacuugggcccggcagaaagcuuaccauguucguguuccuggugcugcugccccuggugagcagccagugcgugaaccugaccacccggacccagcugcccccugccuacaccaacagcuucacccggggcguguacuaccccgacaagguguuccggagcagcgugcugcacagcacccaggaccuguuccugcccuucuucagcaacgugaccugguuccacgccauccacgugagcggcaccaacggcaccaagcgguucgacaacccagugcugcccuucaacgacggcguguacuucgccagcaccgagaagucaaacaucauccggggcuggaucuucggcaccacccuggacagcaagacacagagccugcugaucgugaacaacgccaccaacguggugaucaaggugugcgaguuucaguucugcaacgaccccuuccugggcguguacuaccacaagaacaacaagagcuggauggagagcgaguuccgggucuacagcagcgcuaacaauugcaccuucgaguacgugagccagcccuuccugauggaccucgagggcaagcagggcaacuucaagaaccugcgggaguucguguucaagaacaucgauggcuacuucaagaucuacagcaagcacacccccaucaaccuggugcgggaccugccccagggauucagcgcccuggagccucugguggaccugcccaucggcaucaacaucaccagguuccagacccugcuggcccugcaccggagcuaccugacccccggcgacagcagcagcggcuggaccgccggcgccgccgcauacuacgugggcuaccugcagccacggaccuuccugcugaaguacaacgagaacggcaccaucaccgacgccguggacugcgcccuggacccccugagcgagaccaagugcacccuaaagagcuucaccguggagaagggcaucuaccagaccagcaacuuccgggugcagcccacugagagcaucgugcgguuccccaacauuaccaaccugugucccuucggcgagguguucaacgccacccgguucgccagcguguacgccuggaaccggaagcggaucagcaacugcguggccgacuacagcgugcuguacaacagcgccagcuucagcaccuucaagugcuacggcgugagcccuaccaagcugaacgaccugugcuucaccaacguguacgcugacagcuucgugauccggggcgacgaggugcggcagaucgcccccggccagaccggcaagaucgccgacuacaacuacaagcugcccgacgacuucaccggcugcgugaucgccuggaacagcaacaaccuggacagcaaggugggcggcaacuacaacuaccuguaccggcuguuccguaagagcaaccugaagccauucgagcgggacaucagcaccgagaucuaccaggccggcaacacccccugcaacgguguggagggcuuuaacugcuacuucccccugcagagcuacggcuuccagcccaccaacggcgugggcuaccagcccuaccgggugguggugcugagcuucgagcugcugcacgcccccgccaccgugugcggcccuaaaaagagcaccaaccuggugaagaacaagugcgugaauuucaacuucaacggccugaccggcaccggcgugcugaccgagagcaacaagaaguuccugcccuuccagcaguucggccgggauaucgccgacaccaccgacgcagugcgggacccccagacccuggagauccuggacaucaccccaugcagcuucggcggcgugagcgucaucacccccggcacaaacaccagcaaccagguggccgugcuguaccagggagugaacugcaccgaggugcccguggccauccacgccgaccagcugacccccaccuggcggguguacagcaccggcagcaacguguuccagacccgggccggcugccugaucggcgccgagcacgugaacaacagcuacgagugcgacauccccaucggcgcuggcaucugcgccuccuaccagacccagaccaacagcccccggcgggcccggagcguggccagccagagcaucaucgccuacaccaugagcuuaggcgccgagaacagcguggccuacagcaacaacagcaucgcgaucccuaccaacuucaccaucagcgugaccaccgagauacugcccgugagcaugaccaagaccagcguggacuguaccauguacaucugcggcgacagcaccgagugcagcaaccugcugcugcaguacggcagcuucugcacccagcugaaccgggcccugaccggcaucgccguggagcaggacaagaacacccaagagguguucgcccaggugaagcagaucuacaagacucccccaaucaaggacuucggcggcuucaacuucagccagauccugcccgaccccagcaagcccagcaagcggagcuucaucgaggaccugcuguucaacaaggugacccuggccgacgccggcuucaucaagcaguacggcgacugccugggggauaucgccgcucgggaccugaucugcgcccagaaguucaacggccugaccgugcugcccccucugcugaccgacgagaugaucgcccaguacaccagcgcccugcuugccggcaccaucaccagcggcuggaccuucggcgccggcgcagcccugcagauccccuucgccaugcagauggccuaccgguucaacggcaucggcgugacccagaacgugcuguacgagaaccagaagcugaucgccaaccaguucaacagcgccaucggcaagauccaggacagccugagcagcaccgccagcgcccugggcaagcugcaggacguggugaaccagaacgcucaggcccugaacacccuggugaagcagcugagcagcaauuucggcgccaucagcagcgugcugaacgacauccugucaaggcuggacaagguggaggccgaggugcagaucgaccggcugaucaccggccggcugcagagccugcagaccuacgugacccagcagcugauccgggccgccgagauccgggccagcgccaaccuggcagccaccaagaugagcgagugcgugcugggccagagcaagcggguggacuuuugcggcaagggcuaccaccugaugagcuucccccagagcgccccacacggcgugguguuccuccacgucacauacgugcccgcccaggagaagaacuucaccaccgcccccgccauuugccacgacggcaaggcucacuucccccgggagggaguguucgugagcaacggcacccacugguucgugacccagcggaacuucuacgagccccagaucaucaccaccgacaacaccuucgugagcggcaacugcgacguggugaucggcaucgugaacaacaccguguacgacccccugcagccugagcuggacagcuucaaggaggagcuggacaaguacuucaagaaccacaccagccccgacguggaucugggcgacaucagcggcaucaacgccagcguggugaacauccagaaggagaucgaccggcugaacgagguggccaagaaccugaacgagagccugaucgaccugcaggagcugggcaaguacgagcaguacaucaaguggcccugguacaucuggcugggcuucaucgccggccugaucgccaucgugauggugaccaucaugcugugcugcaugaccagcugcuguagcugccugaagggcugcugcagcugcggcagcugcugcaaguucgacgaggacgacagcgagccagugcugaagggcgugaagcugcacuacaccugaggacuaguguccaccugucccuccugggcugcuggauugucucguuuuccugccaaauaaacaggaucagcgcuuuacagaucucaaaggcucuuuucagagccaccaaaaaaaaaaaaaaaaaaaaaaaaaaaaaaaaaaaaaaaaaaaaaaaaaaaaaaaaaaaaaaaaaaaaaaaaaaaaaaaaaaaaaaaaaaaaaaaaaaaaa

SEQ ID NO: 23908 - RNA, 4129 nt, Artificial Sequence
  SARS-CoV-2/Wuhan/WIV05/2019__EPI_ISL_402128 spike protein mRNA gc (1-1273)(N501Y_D614G)
aggagacccgugacccggaaguuguacggcuacgcgacuuucccucccacaaacccucgcgcccuuccuuuccuacuugggcccggcagaaagcuuaccauguucguguuccuggugcugcugccccuggugagcagccagugcgugaaccugaccacccggacccagcugcccccugccuacaccaacagcuucacccggggcguguacuaccccgacaagguguuccggagcagcgugcugcacagcacccaggaccuguuccugcccuucuucagcaacgugaccugguuccacgccauccacgugagcggcaccaacggcaccaagcgguucgacaacccagugcugcccuucaacgacggcguguacuucgccagcaccgagaagucaaacaucauccggggcuggaucuucggcaccacccuggacagcaagacacagagccugcugaucgugaacaacgccaccaacguggugaucaaggugugcgaguuucaguucugcaacgaccccuuccugggcguguacuaccacaagaacaacaagagcuggauggagagcgaguuccgggucuacagcagcgcuaacaauugcaccuucgaguacgugagccagcccuuccugauggaccucgagggcaagcagggcaacuucaagaaccugcgggaguucguguucaagaacaucgauggcuacuucaagaucuacagcaagcacacccccaucaaccuggugcgggaccugccccagggauucagcgcccuggagccucugguggaccugcccaucggcaucaacaucaccagguuccagacccugcuggcccugcaccggagcuaccugacccccggcgacagcagcagcggcuggaccgccggcgccgccgcauacuacgugggcuaccugcagccacggaccuuccugcugaaguacaacgagaacggcaccaucaccgacgccguggacugcgcccuggacccccugagcgagaccaagugcacccuaaagagcuucaccguggagaagggcaucuaccagaccagcaacuuccgggugcagcccacugagagcaucgugcgguuccccaacauuaccaaccugugucccuucggcgagguguucaacgccacccgguucgccagcguguacgccuggaaccggaagcggaucagcaacugcguggccgacuacagcgugcuguacaacagcgccagcuucagcaccuucaagugcuacggcgugagcccuaccaagcugaacgaccugugcuucaccaacguguacgcugacagcuucgugauccggggcgacgaggugcggcagaucgcccccggccagaccggcaagaucgccgacuacaacuacaagcugcccgacgacuucaccggcugcgugaucgccuggaacagcaacaaccuggacagcaaggugggcggcaacuacaacuaccuguaccggcuguuccguaagagcaaccugaagccauucgagcgggacaucagcaccgagaucuaccaggccggcagcacccccugcaacgguguggagggcuuuaacugcuacuucccccugcagagcuacggcuuccagcccaccuacggcgugggcuaccagcccuaccgggugguggugcugagcuucgagcugcugcacgcccccgccaccgugugcggcccuaaaaagagcaccaaccuggugaagaacaagugcgugaacuucaacuucaauggccugaccggcaccggcgugcugaccgagagcaacaagaaguuccugcccuuccagcaguucggccgggauaucgccgacaccaccgacgcagugcgggacccccagacccuggagauccuggacaucaccccaugcagcuucggcggcgugagcgucaucacccccggcacaaacaccagcaaccagguggccgugcuguaccagggagugaacugcaccgaggugcccguggccauccacgccgaccagcugacccccaccuggcggguguacagcaccggcagcaacguguuccagacccgggccggcugccugaucggcgccgagcacgugaacaacuccuacgagugcgacauccccaucggcgcuggcaucugcgccagcuaccagacccagaccaacagcccccggcgggcccggagcguggccagccagagcaucaucgccuacaccaugagcuuaggcgccgagaacagcguggccuacagcaacaacagcaucgcgaucccuaccaacuucaccaucagcgugaccaccgagauacugcccgugagcaugaccaagaccagcguggacuguaccauguacaucugcggcgacagcaccgagugcagcaaccugcugcugcaguacggcagcuucugcacccagcugaaccgggcccugaccggcaucgccguggagcaggacaagaacacccaagagguguucgcccaggugaagcagaucuacaagacucccccaaucaaggacuucggcggcuucaacuucagccagauccugcccgaccccagcaagcccagcaagcggagcuucaucgaggaccugcuguucaacaaggugacccuggccgacgccggcuucaucaagcaguacggcgacugccugggggauaucgccgcucgggaccugaucugcgcccagaaguucaacggccugaccgugcugcccccucugcugaccgacgagaugaucgcccaguacaccagcgcccugcuugccggcaccaucaccagcggcuggaccuucggcgccggcgcagcccugcagauccccuucgccaugcagauggccuaccgguucaacggcaucggcgugacccagaacgugcuguacgagaaccagaagcugaucgccaaccaguucaacagcgccaucggcaagauccaggacagccugagcagcaccgccagcgcccugggcaagcugcaggacguggugaaccagaacgcucaggcccugaacacccuggugaagcagcugagcagcaacuucggcgccaucagcucagugcugaacgacauccugagcaggcuggacaagguggaggccgaggugcagaucgaccggcugaucaccggccggcugcagagccugcagaccuacgugacccagcagcugauccgggccgccgagauccgggccagcgccaaucuggcagccaccaagaugagcgagugcgugcugggccagagcaagcggguggacuuuugcggcaagggcuaccaccugaugagcuucccccagagcgccccacacggcgugguguuccuccacgucacauacgugcccgcccaggagaagaacuucaccaccgcccccgccauuugccacgacggcaaggcucacuucccccgggagggaguguucgugagcaacggcacccacugguucgugacccagcggaacuucuacgagccccagaucaucaccaccgacaacaccuucgugagcggcaacugcgacguggugaucggcaucgugaacaacaccguguacgacccccugcagccugagcuggacagcuucaaggaggagcuggacaaguacuucaagaaccacaccagccccgacguggaucugggcgacaucagcggcaucaacgccagcguggugaacauccagaaggagaucgaccggcugaacgagguggccaagaaccugaacgagagccugaucgaccugcaggagcugggcaaguacgagcaguacaucaaguggcccugguacaucuggcugggcuucaucgccggccugaucgccaucgugauggugaccaucaugcugugcugcaugaccagcugcuguagcugccugaagggcugcugcagcugcggcagcugcugcaaguucgacgaggacgacagcgagccagugcugaagggcgugaagcugcacuacaccugaggacuaguguccaccugucccuccugggcugcuggauugucucguuuuccugccaaauaaacaggaucagcgcuuuacagaucucaaaggcucuuuucagagccaccaaaaaaaaaaaaaaaaaaaaaaaaaaaaaaaaaaaaaaaaaaaaaaaaaaaaaaaaaaaaaaaaaaaaaaaaaaaaaaaaaaaaaaaaaaaaaaaaaaaaa

SEQ ID NO: 23909 - RNA, 4123 nt, Artificial Sequence
  SARS-CoV-2/Wuhan/WIV05/2019__EPI_ISL_402128 spike protein mRNA gc (1-1273)(H69del_V70del_D614G)
aggagacccgugacccggaaguuguacggcuacgcgacuuucccucccacaaacccucgcgcccuuccuuuccuacuugggcccggcagaaagcuuaccauguucguguuccuggugcugcugccccuggugagcagccagugcgugaaccugaccacccggacccagcugcccccugccuacaccaacagcuucacccggggcguguacuaccccgacaagguguuccggagcagcgugcugcacagcacccaggaccuguuccugcccuucuucagcaacgugaccugguuccacgccaucagcggcaccaacggcaccaagcgguucgacaacccagugcugcccuucaacgacggcguguacuucgccagcaccgagaagucaaacaucauccggggcuggaucuucggcaccacccuggacagcaagacacagagccugcugaucgugaacaacgccaccaacguggugaucaaggugugcgaguuucaguucugcaacgaccccuuccugggcguguacuaccacaagaacaacaagagcuggauggagagcgaguuccggguguacagcagcgcuaacaauugcaccuucgaguacgucagccagcccuuccugauggaccucgagggcaagcagggcaacuucaagaaccugcgggaguucguguucaagaacaucgauggcuacuucaagaucuacagcaagcacacccccaucaaccuggugcgggaccugccccagggauucagcgcccuggagccucugguggaccugcccaucggcaucaacaucaccagguuccagacccugcuggcccugcaccggagcuaccugacccccggcgacagcagcagcggcuggaccgccggcgccgccgcauacuacgugggcuaccugcagccacggaccuuccugcugaaguacaacgagaacggcaccaucaccgacgccguggacugcgcccuggacccccugagcgagaccaagugcacccuaaagagcuucaccguggagaagggcaucuaccagaccagcaacuuccgggugcagcccacugagagcaucgugcgguuccccaacauuaccaaccugugucccuucggcgagguguucaacgccacccgguucgccagcguguacgccuggaaccggaagcggaucagcaacugcguggccgacuacagcgugcuguacaacagcgccagcuucagcaccuucaagugcuacggcgugagcccuaccaagcugaacgaccugugcuucaccaacguguacgcugacagcuucgugauccggggcgacgaggugcggcagaucgcccccggccagaccggcaagaucgccgacuacaacuacaagcugcccgacgacuucaccggcugcgugaucgccuggaacagcaacaaccuggacagcaaggugggcggcaacuacaacuaccuguaccggcuguuccguaagagcaaccugaagccauucgagcgggacaucagcaccgagaucuaccaggccggcagcacccccugcaacgguguggagggcuuuaacugcuacuucccccugcagagcuacggcuuccagcccaccaacggcgugggcuaccagcccuaccgggugguggugcugagcuucgagcugcugcacgcccccgccaccgugugcggcccuaaaaagagcaccaaccuggugaagaacaagugcgugaacuucaauuucaacggccugaccggcaccggcgugcugaccgagagcaacaagaaguuccugcccuuccagcaguucggccgggauaucgccgacaccaccgacgcagugcgggacccccagacccuggagauccuggacaucaccccaugcagcuucggcggcgugagcgugaucacccccggcacaaacaccagcaaccaggucgccgugcuguaccagggagugaacugcaccgaggugcccguggccauccacgccgaccagcugacccccaccuggcggguguacagcaccggcagcaacguguuccagacccgggccggcugccugaucggcgccgagcacgugaacaacuccuacgagugcgacauccccaucggcgcuggcaucugcgccagcuaccagacccagaccaacagcccccggcgggcccggagcguggccagccagagcaucaucgccuacaccaugagcuuaggcgccgagaacagcguggccuacagcaacaacagcaucgcgaucccuaccaacuucaccaucagcgugaccaccgagauacugcccgugagcaugaccaagaccagcguggacuguaccauguacaucugcggcgacagcaccgagugcagcaaccugcugcugcaguacggcagcuucugcacccagcugaaccgggcccugaccggcaucgccguggagcaggacaagaacacccaagagguguucgcccaggugaagcagaucuacaagacucccccaaucaaggacuucggcggcuucaacuucagccagauccugcccgaccccagcaagcccagcaagcggagcuucaucgaggaccugcuguucaacaaggugacccuggccgacgccggcuucaucaagcaguacggcgacugccugggggauaucgccgcucgggaccugaucugcgcccagaaguucaacggccugaccgugcugcccccucugcugaccgacgagaugaucgcccaguacaccagcgcccugcuugccggcaccaucaccagcggcuggaccuucggcgccggcgcagcccugcagauccccuucgccaugcagauggccuaccgguucaacggcaucggcgugacccagaacgugcuguacgagaaccagaagcugaucgccaaccaguucaacagcgccaucggcaagauccaggacagccugagcagcaccgccagcgcccugggcaagcugcaggacguggugaaccagaacgcucaggcccugaacacccuggugaagcagcugagcagcaacuucggcgccaucagcucagugcugaaugacauccugagcaggcuggacaagguggaggccgaggugcagaucgaccggcugaucaccggccggcugcagagccugcagaccuacgugacccagcagcugauccgggccgccgagauccgggccagcgccaaccuggcagccaccaagaugagcgagugcgugcugggccagagcaagcggguggacuuuugcggcaagggcuaccaccugaugagcuucccccagagcgccccacacggcgugguguuccuccacgugacauacguccccgcccaggagaagaacuucaccaccgcccccgccauuugccacgacggcaaggcucacuucccccgggagggaguguucgugagcaacggcacccacugguucgugacccagcggaacuucuacgagccccagaucaucaccaccgacaacaccuucgugagcggcaacugcgacguggugaucggcaucgugaacaacaccguguacgacccccugcagccugagcuggacagcuucaaggaggagcuggacaaguacuucaagaaccacaccagccccgacguggaucugggcgacaucagcggcaucaacgccagcguggugaacauccagaaggagaucgaccggcugaacgagguggccaagaaccugaacgagagccugaucgaccugcaggagcugggcaaguacgagcaguacaucaaguggcccugguacaucuggcugggcuucaucgccggccugaucgccaucgugauggugaccaucaugcugugcugcaugaccagcugcuguagcugccugaagggcugcugcagcugcggcagcugcugcaaguucgacgaggacgacagcgagccagugcugaagggcgugaagcugcacuacaccugaggacuaguguccaccugucccuccugggcugcuggauugucucguuuuccugccaaauaaacaggaucagcgcuuuacagaucucaaaggcucuuuucagagccaccaaaaaaaaaaaaaaaaaaaaaaaaaaaaaaaaaaaaaaaaaaaaaaaaaaaaaaaaaaaaaaaaaaaaaaaaaaaaaaaaaaaaaaaaaaaaaaaaaaaaa

SEQ ID NO: 23910 - RNA, 4129 nt, Artificial Sequence
  SARS-CoV-2/Wuhan/WIV05/2019__EPI_ISL_402128 spike protein mRNA gc (1-1273)(Y453F_D614G)
aggagacccgugacccggaaguuguacggcuacgcgacuuucccucccacaaacccucgcgcccuuccuuuccuacuugggcccggcagaaagcuuaccauguucguguuccuggugcugcugccccuggugagcagccagugcgugaaccugaccacccggacccagcugcccccugccuacaccaacagcuucacccggggcguguacuaccccgacaagguguuccggagcagcgugcugcacagcacccaggaccuguuccugcccuucuucagcaacgugaccugguuccacgccauccacgugagcggcaccaacggcaccaagcgguucgacaacccagugcugcccuucaacgacggcguguacuucgccagcaccgagaagucaaacaucauccggggcuggaucuucggcaccacccuggacagcaagacacagagccugcugaucgugaacaacgccaccaacguggugaucaaggugugcgaguuucaguucugcaacgaccccuuccugggcguguacuaccacaagaacaacaagagcuggauggagagcgaguuccgggucuacagcagcgcuaacaauugcaccuucgaguacgugagccagcccuuccugauggaccucgagggcaagcagggcaacuucaagaaccugcgggaguucguguucaagaacaucgauggcuacuucaagaucuacagcaagcacacccccaucaaccuggugcgggaccugccccagggauucagcgcccuggagccucugguggaccugcccaucggcaucaacaucaccagguuccagacccugcuggcccugcaccggagcuaccugacccccggcgacagcagcagcggcuggaccgccggcgccgccgcauacuacgugggcuaccugcagccacggaccuuccugcugaaguacaacgagaacggcaccaucaccgacgccguggacugcgcccuggacccccugagcgagaccaagugcacccuaaagagcuucaccguggagaagggcaucuaccagaccagcaacuuccgggugcagcccacugagagcaucgugcgguuccccaacauuaccaaccugugucccuucggcgagguguucaacgccacccgguucgccagcguguacgccuggaaccggaagcggaucagcaacugcguggccgacuacagcgugcuguacaacagcgccagcuucagcaccuucaagugcuacggcgugagcccuaccaagcugaacgaccugugcuucaccaacguguacgcugacagcuucgugauccggggcgacgaggugcggcagaucgcccccggccagaccggcaagaucgccgacuacaacuacaagcugcccgacgacuucaccggcugcgugaucgccuggaacagcaacaaccuggacagcaaggugggcggcaacuacaacuaccuguuccggcuguuccguaagagcaaccugaagccauuugagcgggacaucagcaccgagaucuaccaggccggcagcacccccugcaacgguguggagggcuucaacugcuacuucccccugcagagcuacggcuuccagcccaccaacggcgugggcuaccagcccuaccgggugguggugcugagcuucgagcugcugcacgcccccgccaccgugugcggcccuaaaaagagcaccaaccuggugaagaacaagugcgugaacuucaauuucaacggccugaccggcaccggcgugcugaccgagagcaacaagaaguuccugcccuuccagcaguucggccgggauaucgccgacaccaccgacgcagugcgggacccccagacccuggagauccuggacaucaccccaugcagcuucggcggcgugagcgucaucacccccggcacaaacaccagcaaccagguggccgugcuguaccagggagugaacugcaccgaggugcccguggccauccacgccgaccagcugacccccaccuggcggguguacagcaccggcagcaacguguuccagacccgggccggcugccugaucggcgccgagcacgugaacaacuccuacgagugcgacauccccaucggcgcuggcaucugcgccagcuaccagacccagaccaacagcccccggcgggcccggagcguggccagccagagcaucaucgccuacaccaugagcuuaggcgccgagaacagcguggccuacagcaacaacagcaucgcgaucccuaccaacuucaccaucagcgugaccaccgagauacugcccgugagcaugaccaagaccagcguggacuguaccauguacaucugcggcgacagcaccgagugcagcaaccugcugcugcaguacggcagcuucugcacccagcugaaccgggcccugaccggcaucgccguggagcaggacaagaacacccaagagguguucgcccaggugaagcagaucuacaagacucccccaaucaaggacuucggcggcuucaacuucagccagauccugcccgaccccagcaagcccagcaagcggagcuucaucgaggaccugcuguucaacaaggugacccuggccgacgccggcuucaucaagcaguacggcgacugccugggggauaucgccgcucgggaccugaucugcgcccagaaguucaacggccugaccgugcugcccccucugcugaccgacgagaugaucgcccaguacaccagcgcccugcuugccggcaccaucaccagcggcuggaccuucggcgccggcgcagcccugcagauccccuucgccaugcagauggccuaccgguucaacggcaucggcgugacccagaacgugcuguacgagaaccagaagcugaucgccaaccaguucaacagcgccaucggcaagauccaggacagccugagcagcaccgccagcgcccugggcaagcugcaggacguggugaaccagaacgcucaggcccugaacacccuggugaagcagcugagcagcaacuuuggcgccaucagcucagugcugaaugacauccugagcaggcuggacaagguggaggccgaggugcagaucgaccggcugaucaccggccggcugcagagccugcagaccuacgugacccagcagcugauccgggccgccgagauccgggccagcgccaaccuggcagccaccaagaugagcgagugcgugcugggccagagcaagcggguggacuucugcggcaagggcuaccaccugaugagcuucccccagagcgccccacacggcgugguguuccuccacgucacauacgugcccgcccaggagaagaacuucaccaccgcccccgccauuugccacgacggcaaggcucacuucccccgggagggaguguucgugagcaacggcacccacugguucgugacccagcggaacuucuacgagccccagaucaucaccaccgacaacaccuucgugagcggcaacugcgacguggugaucggcaucgugaacaacaccguguacgacccccugcagccugagcuggacagcuucaaggaggagcuggacaaguacuucaagaaccacaccagccccgacguggaucugggcgacaucagcggcaucaacgccagcguggugaacauccagaaggagaucgaccggcugaacgagguggccaagaaccugaacgagagccugaucgaccugcaggagcugggcaaguacgagcaguacaucaaguggcccugguacaucuggcugggcuucaucgccggccugaucgccaucgugauggugaccaucaugcugugcugcaugaccagcugcuguagcugccugaagggcugcugcagcugcggcagcugcugcaaguucgacgaggacgacagcgagccagugcugaagggcgugaagcugcacuacaccugaggacuaguguccaccugucccuccugggcugcuggauugucucguuuuccugccaaauaaacaggaucagcgcuuuacagaucucaaaggcucuuuucagagccaccaaaaaaaaaaaaaaaaaaaaaaaaaaaaaaaaaaaaaaaaaaaaaaaaaaaaaaaaaaaaaaaaaaaaaaaaaaaaaaaaaaaaaaaaaaaaaaaaaaaaa

SEQ ID NO: 23911 - RNA, 4129 nt, Artificial Sequence
  SARS-CoV-2/Wuhan/WIV05/2019__EPI_ISL_402128 spike protein mRNA gc (1-1273)(D614G_I692V)
aggagacccgugacccggaaguuguacggcuacgcgacuuucccucccacaaacccucgcgcccuuccuuuccuacuugggcccggcagaaagcuuaccauguucguguuccuggugcugcugccccuggugagcagccagugcgugaaccugaccacccggacccagcugcccccugccuacaccaacagcuucacccggggcguguacuaccccgacaagguguuccggagcagcgugcugcacagcacccaggaccuguuccugcccuucuucagcaacgugaccugguuccacgccauccacgugagcggcaccaacggcaccaagcgguucgacaacccagugcugcccuucaacgacggcguguacuucgccagcaccgagaagucaaacaucauccggggcuggaucuucggcaccacccuggacagcaagacacagagccugcugaucgugaacaacgccaccaacguggugaucaaggugugcgaguuucaguucugcaacgaccccuuccugggcguguacuaccacaagaacaacaagagcuggauggagagcgaguuccgggucuacagcagcgcuaacaauugcaccuucgaguacgugagccagcccuuccugauggaccucgagggcaagcagggcaacuucaagaaccugcgggaguucguguucaagaacaucgauggcuacuucaagaucuacagcaagcacacccccaucaaccuggugcgggaccugccccagggauucagcgcccuggagccucugguggaccugcccaucggcaucaacaucaccagguuccagacccugcuggcccugcaccggagcuaccugacccccggcgacagcagcagcggcuggaccgccggcgccgccgcauacuacgugggcuaccugcagccacggaccuuccugcugaaguacaacgagaacggcaccaucaccgacgccguggacugcgcccuggacccccugagcgagaccaagugcacccuaaagagcuucaccguggagaagggcaucuaccagaccagcaacuuccgggugcagcccacugagagcaucgugcgguuccccaacauuaccaaccugugucccuucggcgagguguucaacgccacccgguucgccagcguguacgccuggaaccggaagcggaucagcaacugcguggccgacuacagcgugcuguacaacagcgccagcuucagcaccuucaagugcuacggcgugagcccuaccaagcugaacgaccugugcuucaccaacguguacgcugacagcuucgugauccggggcgacgaggugcggcagaucgcccccggccagaccggcaagaucgccgacuacaacuacaagcugcccgacgacuucaccggcugcgugaucgccuggaacagcaacaaccuggacagcaaggugggcggcaacuacaacuaccuguaccggcuguuccguaagagcaaccugaagccauucgagcgggacaucagcaccgagaucuaccaggccggcagcacccccugcaacgguguggagggcuuuaacugcuacuucccccugcagagcuacggcuuccagcccaccaacggcgugggcuaccagcccuaccgggugguggugcugagcuucgagcugcugcacgcccccgccaccgugugcggcccuaaaaagagcaccaaccuggugaagaacaagugcgugaacuucaauuucaacggccugaccggcaccggcgugcugaccgagagcaacaagaaguuccugcccuuccagcaguucggccgggauaucgccgacaccaccgacgcagugcgggacccccagacccuggagauccuggacaucaccccaugcagcuucggcggcgugagcgucaucacccccggcacaaacaccagcaaccagguggccgugcuguaccagggagugaacugcaccgaggugcccguggccauccacgccgaccagcugacccccaccuggcggguguacagcaccggcagcaacguguuccagacccgggccggcugccugaucggcgccgagcacgugaacaacuccuacgagugcgacauccccaucggcgcuggcaucugcgccagcuaccagacccagaccaacagcccccggcgggcccggagcguggccagccagagcgugaucgccuacaccaugagcuuaggcgccgagaacagcguggccuacagcaacaacagcaucgcgaucccuaccaacuucaccaucagcgugaccaccgagauccugcccgugagcaugaccaagaccagcguggacuguaccauguacauaugcggcgacagcaccgagugcagcaaccugcugcugcaguacggcagcuucugcacccagcugaaccgggcccugaccggcaucgccguggagcaggacaagaacacccaagagguguucgcccaggugaagcagaucuacaagacucccccaaucaaggacuucggcggcuucaacuucagccagauccugcccgaccccagcaagcccagcaagcggagcuucaucgaggaccugcuguucaacaaggugacccuggccgacgccggcuucaucaagcaguacggcgacugccugggggauaucgccgcucgggaccugaucugcgcccagaaguucaacggccugaccgugcugcccccucugcugaccgacgagaugaucgcccaguacaccagcgcccugcuugccggcaccaucaccagcggcuggaccuucggcgccggcgcagcccugcagauccccuucgccaugcagauggccuaccgguucaacggcaucggcgugacccagaacgugcuguacgagaaccagaagcugaucgccaaccaguucaacagcgccaucggcaagauccaggacagccugagcagcaccgccagcgcccugggcaagcugcaggacguggugaaccagaacgcucaggcccugaacacccuggugaagcagcugagcagcaacuucggcgccaucagcucagugcugaaugacauccugagcaggcuggacaagguggaggccgaggugcagaucgaccggcugaucaccggccggcugcagagccugcagaccuacgugacccagcagcugauccgggccgccgagauccgggccagcgccaaccuggcagccaccaagaugagcgagugcgugcugggccagagcaagcggguggacuuuugcggcaagggcuaccaccugaugagcuucccccagagcgccccacacggcguggucuuccuccacgugacauacgugcccgcccaggagaagaacuucaccaccgcccccgccaucugccacgacggcaaggcucacuucccccgggagggaguguucgugagcaacggcacccacugguucgugacccagcggaacuucuacgagccccagauuaucaccaccgacaacaccuucgugagcggcaacugcgacguggugaucggcaucgugaacaacaccguguacgacccccugcagccugagcuggacagcuucaaggaggagcuggacaaguacuucaagaaccacaccagccccgacguggaucugggcgacaucagcggcaucaacgccagcguggugaacauccagaaggagaucgaccggcugaacgagguggccaagaaccugaacgagagccugaucgaccugcaggagcugggcaaguacgagcaguacaucaaguggcccugguacaucuggcugggcuucaucgccggccugaucgccaucgugauggugaccaucaugcugugcugcaugaccagcugcuguagcugccugaagggcugcugcagcugcggcagcugcugcaaguucgacgaggacgacagcgagccagugcugaagggcgugaagcugcacuacaccugaggacuaguguccaccugucccuccugggcugcuggauugucucguuuuccugccaaauaaacaggaucagcgcuuuacagaucucaaaggcucuuuucagagccaccaaaaaaaaaaaaaaaaaaaaaaaaaaaaaaaaaaaaaaaaaaaaaaaaaaaaaaaaaaaaaaaaaaaaaaaaaaaaaaaaaaaaaaaaaaaaaaaaaaaaa

SEQ ID NO: 23912 - RNA, 4129 nt, Artificial Sequence
  SARS-CoV-2/Wuhan/WIV05/2019__EPI_ISL_402128 spike protein mRNA gc (1-1273)(D614G_M1229I)
aggagacccgugacccggaaguuguacggcuacgcgacuuucccucccacaaacccucgcgcccuuccuuuccuacuugggcccggcagaaagcuuaccauguucguguuccuggugcugcugccccuggugagcagccagugcgugaaccugaccacccggacccagcugcccccugccuacaccaacagcuucacccggggcguguacuaccccgacaagguguuccggagcagcgugcugcacagcacccaggaccuguuccugcccuucuucagcaacgugaccugguuccacgccauccacgugagcggcaccaacggcaccaagcgguucgacaacccagugcugcccuucaacgacggcguguacuucgccagcaccgagaagucaaacaucauccggggcuggaucuucggcaccacccuggacagcaagacacagagccugcugaucgugaacaacgccaccaacguggugaucaaggugugcgaguuucaguucugcaacgaccccuuccugggcguguacuaccacaagaacaacaagagcuggauggagagcgaguuccgggucuacagcagcgcuaacaauugcaccuucgaguacgugagccagcccuuccugauggaccucgagggcaagcagggcaacuucaagaaccugcgggaguucguguucaagaacaucgauggcuacuucaagaucuacagcaagcacacccccaucaaccuggugcgggaccugccccagggauucagcgcccuggagccucugguggaccugcccaucggcaucaacaucaccagguuccagacccugcuggcccugcaccggagcuaccugacccccggcgacagcagcagcggcuggaccgccggcgccgccgcauacuacgugggcuaccugcagccacggaccuuccugcugaaguacaacgagaacggcaccaucaccgacgccguggacugcgcccuggacccccugagcgagaccaagugcacccuaaagagcuucaccguggagaagggcaucuaccagaccagcaacuuccgggugcagcccacugagagcaucgugcgguuccccaacauuaccaaccugugucccuucggcgagguguucaacgccacccgguucgccagcguguacgccuggaaccggaagcggaucagcaacugcguggccgacuacagcgugcuguacaacagcgccagcuucagcaccuucaagugcuacggcgugagcccuaccaagcugaacgaccugugcuucaccaacguguacgcugacagcuucgugauccggggcgacgaggugcggcagaucgcccccggccagaccggcaagaucgccgacuacaacuacaagcugcccgacgacuucaccggcugcgugaucgccuggaacagcaacaaccuggacagcaaggugggcggcaacuacaacuaccuguaccggcuguuccguaagagcaaccugaagccauucgagcgggacaucagcaccgagaucuaccaggccggcagcacccccugcaacgguguggagggcuuuaacugcuacuucccccugcagagcuacggcuuccagcccaccaacggcgugggcuaccagcccuaccgggugguggugcugagcuucgagcugcugcacgcccccgccaccgugugcggcccuaaaaagagcaccaaccuggugaagaacaagugcgugaacuucaauuucaacggccugaccggcaccggcgugcugaccgagagcaacaagaaguuccugcccuuccagcaguucggccgggauaucgccgacaccaccgacgcagugcgggacccccagacccuggagauccuggacaucaccccaugcagcuucggcggcgugagcgucaucacccccggcacaaacaccagcaaccagguggccgugcuguaccagggagugaacugcaccgaggugcccguggccauccacgccgaccagcugacccccaccuggcggguguacagcaccggcagcaacguguuccagacccgggccggcugccugaucggcgccgagcacgugaacaacuccuacgagugcgacauccccaucggcgcuggcaucugcgccagcuaccagacccagaccaacagcccccggcgggcccggagcguggccagccagagcaucaucgccuacaccaugagcuuaggcgccgagaacagcguggccuacagcaacaacagcaucgcgaucccuaccaacuucaccaucagcgugaccaccgagauacugcccgugagcaugaccaagaccagcguggacuguaccauguacaucugcggcgacagcaccgagugcagcaaccugcugcugcaguacggcagcuucugcacccagcugaaccgggcccugaccggcaucgccguggagcaggacaagaacacccaagagguguucgcccaggugaagcagaucuacaagacucccccaaucaaggacuucggcggcuucaacuucagccagauccugcccgaccccagcaagcccagcaagcggagcuucaucgaggaccugcuguucaacaaggugacccuggccgacgccggcuucaucaagcaguacggcgacugccugggggauaucgccgcucgggaccugaucugcgcccagaaguucaacggccugaccgugcugcccccucugcugaccgacgagaugaucgcccaguacaccagcgcccugcuugccggcaccaucaccagcggcuggaccuucggcgccggcgcagcccugcagauccccuucgccaugcagauggccuaccgguucaacggcaucggcgugacccagaacgugcuguacgagaaccagaagcugaucgccaaccaguucaacagcgccaucggcaagauccaggacagccugagcagcaccgccagcgcccugggcaagcugcaggacguggugaaccagaacgcucaggcccugaacacccuggugaagcagcugagcagcaacuucggcgccaucagcucagugcugaaugacauccugagcaggcuggacaagguggaggccgaggugcagaucgaccggcugaucaccggccggcugcagagccugcagaccuacgugacccagcagcugauccgggccgccgagauccgggccagcgccaaccuggcagccaccaagaugagcgagugcgugcugggccagagcaagcggguggacuuuugcggcaagggcuaccaccugaugagcuucccccagagcgccccacacggcgugguguuccuccacgucacauacgugcccgcccaggagaagaacuucaccaccgcccccgccauuugccacgacggcaaggcucacuucccccgggagggaguguucgugagcaacggcacccacugguucgugacccagcggaacuucuacgagccccagaucaucaccaccgacaacaccuucgugagcggcaacugcgacguggugaucggcaucgugaacaacaccguguacgacccccugcagccugagcuggacagcuucaaggaggagcuggacaaguacuucaagaaccacaccagccccgacguggaucugggcgacaucagcggcaucaacgccagcguggugaacauccagaaggagaucgaccggcugaacgagguggccaagaaccugaacgagagccugaucgaccugcaggagcugggcaaguacgagcaguacaucaaguggcccugguacaucuggcugggcuucaucgccggccugaucgccaucgugaucgugaccaucaugcugugcugcaugaccagcugcuguagcugccugaagggcugcugcagcugcggcagcugcugcaaguucgacgaggacgacagcgagccagugcugaagggcgugaagcugcacuacaccugaggacuaguguccaccugucccuccugggcugcuggauugucucguuuuccugccaaauaaacaggaucagcgcuuuacagaucucaaaggcucuuuucagagccaccaaaaaaaaaaaaaaaaaaaaaaaaaaaaaaaaaaaaaaaaaaaaaaaaaaaaaaaaaaaaaaaaaaaaaaaaaaaaaaaaaaaaaaaaaaaaaaaaaaaaa

SEQ ID NO: 23913 - RNA, 4123 nt, Artificial Sequence
  SARS-CoV-2/Wuhan/WIV05/2019__EPI_ISL_402128 spike protein mRNA gc (1-1273)(H69del_V70del_A222V_Y453F_S477N_D614G_I692V)
aggagacccgugacccggaaguuguacggcuacgcgacuuucccucccacaaacccucgcgcccuuccuuuccuacuugggcccggcagaaagcuuaccauguucguguuccuggugcugcugccccuggugagcagccagugcgugaaccugaccacccggacccagcugcccccugccuacaccaacagcuucacccggggcguguacuaccccgacaagguguuccggagcagcgugcugcacagcacccaggaccuguuccugcccuucuucagcaacgugaccugguuccacgccaucagcggcaccaacggcaccaagcgguucgacaacccagugcugcccuucaacgacggcguguacuucgccagcaccgagaagucaaacaucauccggggcuggaucuucggcaccacccuggacagcaagacacagagccugcugaucgugaacaacgccaccaacguggugaucaaggugugcgaguuucaguucugcaacgaccccuuccugggcguguacuaccacaagaacaacaagagcuggauggagagcgaguuccggguguacagcagcgcuaacaauugcaccuucgaguacgucagccagcccuuccugauggaccucgagggcaagcagggcaacuucaagaaccugcgggaguucguguucaagaacaucgauggcuacuucaagaucuacagcaagcacacccccaucaaccuggugcgggaccugccccagggauucagcgugcuggagccucugguggaccugcccaucggcaucaacaucaccagguuccagacccugcuggcccugcaccggagcuaccugacccccggcgacagcagcagcggcuggaccgccggcgccgccgccuacuacgugggcuaccugcagccacggaccuuccugcugaaguacaacgagaacggcaccaucaccgacgcaguggacugcgcccuggacccccugagcgagaccaagugcacccuaaagagcuucaccguggagaagggcaucuaccagaccagcaacuuccgggugcagcccacugagagcaucgugcgguuccccaacauuaccaaccugugucccuucggcgagguguucaacgccacccgguucgccagcguguacgccuggaaccggaagcggaucagcaacugcguggccgacuacagcgugcuguacaacagcgccagcuucagcaccuucaagugcuacggcgugagcccuaccaagcugaacgaccugugcuucaccaacguguacgccgacagcuucgugauccggggcgacgaggugcggcagaucgcucccggccagaccggcaagaucgccgacuacaacuacaagcugcccgacgacuucaccggcugcgugaucgccuggaacagcaacaaccuggacagcaaggugggcggcaacuacaacuaccuguuccggcuguuccguaagagcaaccugaagccauuugagcgggacaucagcaccgagaucuaccaggccggcaacacccccugcaacgguguggagggcuucaacugcuacuucccccugcagagcuacggcuuccagcccaccaacggcgugggcuaccagcccuaccgggugguggugcugagcuucgagcugcugcacgcccccgccaccgugugcggcccuaaaaagagcaccaaccuggugaagaacaagugcgugaauuucaacuucaacggccugaccggcaccggcgugcugaccgagagcaacaagaaguuccugcccuuccagcaguucggccgggauaucgccgacaccaccgacgccgugcgggacccccagacccuggagauccuggacaucaccccaugcagcuucggcggcgugagcgucaucacccccggcacaaacaccagcaaccagguggcagugcuguaccagggagugaacugcaccgaggugcccguggccauccacgccgaccagcugacccccaccuggcggguguacagcaccggcagcaacguguuccagacccgggccggcugccugaucggcgccgagcacgugaacaacagcuacgagugcgacauccccaucggcgccggcaucugcgcuuccuaccagacccagaccaacagcccccggcgggcccggagcguggccagccagagcgugaucgccuacaccaugagcuuaggcgccgagaacagcguggccuacagcaacaacagcaucgccaucccuaccaacuucaccaucagcgugaccaccgagauccugcccgugagcaugaccaagaccagcguggacuguaccauguacauaugcggcgacagcaccgagugcagcaaccugcugcugcaguacggcagcuucugcacccagcugaaccgggcgcugaccggcaucgccguggagcaggacaagaacacccaagagguguucgcccaggugaagcagaucuacaagacucccccaaucaaggacuucggcggcuucaacuucagccagauccugcccgaccccagcaagcccagcaagcggagcuucaucgaggaccugcuguucaacaaggugacccuggccgacgccggcuucaucaagcaguacggcgacugccugggggauaucgccgcccgggaccugaucugcgcucagaaguucaacggccugaccgugcugcccccucugcugaccgacgagaugaucgcccaguacaccagcgcccugcuugccggcaccaucaccagcggcuggaccuucggcgccggcgccgcacugcagauccccuucgccaugcagauggccuaccgguucaacggcaucggcgugacccagaacgugcuguacgagaaccagaagcugaucgccaaccaguucaacagcgccaucggcaagauccaggacagccugagcagcaccgccagcgcccugggcaagcugcaggacguggugaaccagaacgcccaggcucugaacacccuggugaagcagcugagcagcaauuuuggcgccaucagcagcgugcugaacgacauccugucaaggcuggacaagguggaggccgaggugcagaucgaccggcugaucaccggccggcugcagagccugcagaccuacgugacccagcagcugauccgggccgccgagauccgggccagcgccaaccuggccgcaaccaagaugagcgagugcgugcugggccagagcaagcggguggacuucugcggcaagggcuaccaccugaugagcuucccccagagcgccccacacggcguggucuuccuccacgugacauacgugcccgcccaggagaagaacuucaccaccgcccccgccaucugccacgacggcaaggcccacuucccccgggagggaguguucgugagcaacggcacccacugguucgugacccagcggaacuucuacgagccccagauuaucaccaccgacaacaccuucgugagcggcaacugcgacguggugaucggcaucgugaacaacaccguguacgacccccugcagccugagcuggacagcuucaaggaggagcuggacaaguacuucaagaaccacaccagccccgacguggaucugggcgacaucagcggcaucaacgcuagcguggugaacauccagaaggagaucgaccggcugaacgagguggccaagaaccugaacgagagccugaucgaccugcaggagcugggcaaguacgagcaguacaucaaguggcccugguacaucuggcugggcuucaucgccggccugaucgccaucgugauggugaccaucaugcugugcugcaugaccagcugcuguagcugccugaagggcugcugcagcugcggcagcugcugcaaguucgacgaggacgacagcgagccagugcugaagggcgugaagcugcacuacaccugaggacuaguguccaccugucccuccugggcugcuggauugucucguuuuccugccaaauaaacaggaucagcgcuuuacagaucucaaaggcucuuuucagagccaccaaaaaaaaaaaaaaaaaaaaaaaaaaaaaaaaaaaaaaaaaaaaaaaaaaaaaaaaaaaaaaaaaaaaaaaaaaaaaaaaaaaaaaaaaaaaaaaaaaaaa

SEQ ID NO: 23914 - RNA, 4123 nt, Artificial Sequence
  SARS-CoV-2/Wuhan/WIV05/2019__EPI_ISL_402128 spike protein mRNA gc (1-1273)(H69del_V70del_Y453F_D614G_I692V_M1229I)
aggagacccgugacccggaaguuguacggcuacgcgacuuucccucccacaaacccucgcgcccuuccuuuccuacuugggcccggcagaaagcuuaccauguucguguuccuggugcugcugccccuggugagcagccagugcgugaaccugaccacccggacccagcugcccccugccuacaccaacagcuucacccggggcguguacuaccccgacaagguguuccggagcagcgugcugcacagcacccaggaccuguuccugcccuucuucagcaacgugaccugguuccacgccaucagcggcaccaacggcaccaagcgguucgacaacccagugcugcccuucaacgacggcguguacuucgccagcaccgagaagucaaacaucauccggggcuggaucuucggcaccacccuggacagcaagacacagagccugcugaucgugaacaacgccaccaacguggugaucaaggugugcgaguuucaguucugcaacgaccccuuccugggcguguacuaccacaagaacaacaagagcuggauggagagcgaguuccggguguacagcagcgcuaacaauugcaccuucgaguacgucagccagcccuuccugauggaccucgagggcaagcagggcaacuucaagaaccugcgggaguucguguucaagaacaucgauggcuacuucaagaucuacagcaagcacacccccaucaaccuggugcgggaccugccccagggauucagcgcccuggagccucugguggaccugcccaucggcaucaacaucaccagguuccagacccugcuggcccugcaccggagcuaccugacccccggcgacagcagcagcggcuggaccgccggcgccgccgcauacuacgugggcuaccugcagccacggaccuuccugcugaaguacaacgagaacggcaccaucaccgacgccguggacugcgcccuggacccccugagcgagaccaagugcacccuaaagagcuucaccguggagaagggcaucuaccagaccagcaacuuccgggugcagcccacugagagcaucgugcgguuccccaacauuaccaaccugugucccuucggcgagguguucaacgccacccgguucgccagcguguacgccuggaaccggaagcggaucagcaacugcguggccgacuacagcgugcuguacaacagcgccagcuucagcaccuucaagugcuacggcgugagcccuaccaagcugaacgaccugugcuucaccaacguguacgcugacagcuucgugauccggggcgacgaggugcggcagaucgcccccggccagaccggcaagaucgccgacuacaacuacaagcugcccgacgacuucaccggcugcgugaucgccuggaacagcaacaaccuggacagcaaggugggcggcaacuacaacuaccuguuccggcuguuccguaagagcaaccugaagccauuugagcgggacaucagcaccgagaucuaccaggccggcagcacccccugcaacgguguggagggcuucaacugcuacuucccccugcagagcuacggcuuccagcccaccaacggcgugggcuaccagcccuaccgggugguggugcugagcuucgagcugcugcacgcccccgccaccgugugcggcccuaaaaagagcaccaaccuggugaagaacaagugcgugaacuucaauuucaacggccugaccggcaccggcgugcugaccgagagcaacaagaaguuccugcccuuccagcaguucggccgggauaucgccgacaccaccgacgcagugcgggacccccagacccuggagauccuggacaucaccccaugcagcuucggcggcgugagcgugaucacccccggcacaaacaccagcaaccaggucgccgugcuguaccagggagugaacugcaccgaggugcccguggccauccacgccgaccagcugacccccaccuggcggguguacagcaccggcagcaacguguuccagacccgggccggcugccugaucggcgccgagcacgugaacaacuccuacgagugcgacauccccaucggcgcuggcaucugcgccagcuaccagacccagaccaacagcccccggcgggcccggagcguggccagccagagcgugaucgccuacaccaugagcuuaggcgccgagaacagcguggccuacagcaacaacagcaucgcgaucccuaccaacuucaccaucagcgugaccaccgagauccugcccgugagcaugaccaagaccagcguggacuguaccauguacauaugcggcgacagcaccgagugcagcaaccugcugcugcaguacggcagcuucugcacccagcugaaccgggcccugaccggcaucgccguggagcaggacaagaacacccaagagguguucgcccaggugaagcagaucuacaagacucccccaaucaaggacuucggcggcuucaacuucagccagauccugcccgaccccagcaagcccagcaagcggagcuucaucgaggaccugcuguucaacaaggugacccuggccgacgccggcuucaucaagcaguacggcgacugccugggggauaucgccgcucgggaccugaucugcgcccagaaguucaacggccugaccgugcugcccccucugcugaccgacgagaugaucgcccaguacaccagcgcccugcuugccggcaccaucaccagcggcuggaccuucggcgccggcgcagcccugcagauccccuucgccaugcagauggccuaccgguucaacggcaucggcgugacccagaacgugcuguacgagaaccagaagcugaucgccaaccaguucaacagcgccaucggcaagauccaggacagccugagcagcaccgccagcgcccugggcaagcugcaggacguggugaaccagaacgcucaggcccugaacacccuggugaagcagcugagcagcaacuuuggcgccaucagcucagugcugaaugacauccugagcaggcuggacaagguggaggccgaggugcagaucgaccggcugaucaccggccggcugcagagccugcagaccuacgugacccagcagcugauccgggccgccgagauccgggccagcgccaaccuggcagccaccaagaugagcgagugcgugcugggccagagcaagcggguggacuucugcggcaagggcuaccaccugaugagcuucccccagagcgccccacacggcgugguguuccuccacgucacauacgugcccgcccaggagaagaacuucaccaccgcccccgccaucugccacgacggcaaggcucacuucccccgggagggaguguucgugagcaacggcacccacugguucgugacccagcggaacuucuacgagccccagauuaucaccaccgacaacaccuucgugagcggcaacugcgacguggugaucggcaucgugaacaacaccguguacgacccccugcagccugagcuggacagcuucaaggaggagcuggacaaguacuucaagaaccacaccagccccgacguggaucugggcgacaucagcggcaucaacgccagcguggugaacauccagaaggagaucgaccggcugaacgagguggccaagaaccugaacgagagccugaucgaccugcaggagcugggcaaguacgagcaguacaucaaguggcccugguacaucuggcugggcuucaucgccggccugaucgccaucgugaucgugaccaucaugcugugcugcaugaccagcugcuguagcugccugaagggcugcugcagcugcggcagcugcugcaaguucgacgaggacgacagcgagccagugcugaagggcgugaagcugcacuacaccugaggacuaguguccaccugucccuccugggcugcuggauugucucguuuuccugccaaauaaacaggaucagcgcuuuacagaucucaaaggcucuuuucagagccaccaaaaaaaaaaaaaaaaaaaaaaaaaaaaaaaaaaaaaaaaaaaaaaaaaaaaaaaaaaaaaaaaaaaaaaaaaaaaaaaaaaaaaaaaaaaaaaaaaaaaa

SEQ ID NO: 23915 - RNA, 4120 nt, Artificial Sequence
  SARS-CoV-2/Wuhan/WIV05/2019__EPI_ISL_402128 spike protein mRNA gc (1-1273)(H69del_V70del_Y144del_N501Y_A570D_D614G_P681H_T716I_S982 A_D1118H)
aggagacccgugacccggaaguuguacggcuacgcgacuuucccucccacaaacccucgcgcccuuccuuuccuacuugggcccggcagaaagcuuaccauguucguguuccuggugcugcugccccuggugagcagccagugcgugaaccugaccacccggacccagcugcccccugccuacaccaacagcuucacccggggcguguacuaccccgacaagguguuccggagcagcgugcugcacagcacccaggaccuguuccugcccuucuucagcaacgugaccugguuccacgccaucagcggcaccaacggcaccaagcgguucgacaacccagugcugcccuucaacgacggcguguacuucgccagcaccgagaagucaaacaucauccggggcuggaucuucggcaccacccuggacagcaagacacagagccugcugaucgugaacaacgccaccaacguggugaucaaggugugcgaguuucaguucugcaacgaccccuuccugggcguguaccacaagaacaacaagagcuggauggagagcgaguuccggguguacagcagcgcuaacaauugcaccuucgaguacgucagccagcccuuccugauggaccucgagggcaagcagggcaacuucaagaaccugcgggaguucguguucaagaacaucgauggcuacuucaagaucuacagcaagcacacccccaucaaccuggugcgggaccugccccagggauucagcgcccuggagccucugguggaccugcccaucggcaucaacaucaccagguuccagacccugcuggcccugcaccggagcuaccugacccccggcgacagcagcagcggcuggaccgccggcgccgccgcauacuacgugggcuaccugcagccacggaccuuccugcugaaguacaacgagaacggcaccaucaccgacgccguggacugcgcccuggacccccugagcgagaccaagugcacccuaaagagcuucaccguggagaagggcaucuaccagaccagcaacuuccgggugcagcccacugagagcaucgugcgguuccccaacauuaccaaccugugucccuucggcgagguguucaacgccacccgguucgccagcguguacgccuggaaccggaagcggaucagcaacugcguggccgacuacagcgugcuguacaacagcgccagcuucagcaccuucaagugcuacggcgugagcccuaccaagcugaacgaccugugcuucaccaacguguacgcugacagcuucgugauccggggcgacgaggugcggcagaucgcccccggccagaccggcaagaucgccgacuacaacuacaagcugcccgacgacuucaccggcugcgugaucgccuggaacagcaacaaccuggacagcaaggugggcggcaacuacaacuaccuguaccggcuguuccguaagagcaaccugaagccauucgagcgggacaucagcaccgagaucuaccaggccggcagcacccccugcaacgguguggagggcuuuaacugcuacuucccccugcagagcuacggcuuccagcccaccuacggcgugggcuaccagcccuaccgggugguggugcugagcuucgagcugcugcacgcccccgccaccgugugcggcccuaaaaagagcaccaaccuggugaagaacaagugcgugaacuucaacuucaauggccugaccggcaccggcgugcugaccgagagcaacaagaaguuccugcccuuccagcaguucggccgggauaucgacgacaccaccgacgccgugcgggacccccagacccuggagauccuggacaucaccccaugcagcuucggcggcgugagcgugaucacccccggcacaaacaccagcaaccaggucgcagugcuguaccagggagugaacugcaccgaggugcccguggccauccacgccgaccagcugacccccaccuggcggguguacagcaccggcagcaacguguuccagacccgggccggcugccugaucggcgccgagcacgugaacaacuccuacgagugcgacauccccaucggcgccggcaucugcgcuagcuaccagacccagaccaacagccaccggcgggcccggagcguggccagccagagcaucaucgccuacaccaugagcuuaggcgccgagaacagcguggccuacagcaacaacagcaucgccauccccaucaacuucaccauaagcgugaccaccgagauccugccugugagcaugaccaagaccagcguggacuguaccauguacaucugcggcgacagcaccgagugcagcaaccugcugcugcaguacggcagcuucugcacccagcugaaccgggcgcugaccggcaucgccguggagcaggacaagaacacccaagagguguucgcccaggugaagcagaucuacaagaccccacccaucaaggacuucggcggcuucaacuucagccagauccugcccgaccccagcaagcccagcaagcggagcuucaucgaggaccugcuguucaacaaggugacucuggccgacgccggcuucaucaagcaguacggcgauugccugggggacaucgccgcccgggaccugaucugcgcucagaaguucaacggccugaccgugcugccuccccugcugaccgacgagaugaucgcccaguacaccagcgcccugcuugccggcaccaucaccagcggcuggaccuucggcgccggcgccgcacugcagauccccuucgccaugcagauggccuaccgguucaacggcaucggcgugacccagaacgugcuguacgagaaccagaagcugaucgccaaccaguucaacagcgccaucggcaagauccaggacagccugagcagcaccgccagcgcccugggcaagcugcaggacguggugaaccagaacgcccaggcucugaacacccuggugaagcagcugagcagcaacuucggcgccaucagcucagugcugaacgacauccuggccaggcuggacaagguggaggccgaggugcagaucgaccggcugaucaccggccggcugcagagccugcagaccuacgugacccagcagcugauccgggccgccgagauucgggccagcgccaaucuggcagccaccaagaugagcgagugcgugcugggccagagcaagcggguggacuuuugcggcaagggcuaccaccugaugagcuucccccagagcgcuccccacggcgugguguuccuccacgugaccuacgucccagcccaggagaagaacuucacaaccgcccccgccaucugccacgacggcaaggcccacuucccccgggagggaguguucgugagcaacggcacccacugguucgugacccagcggaacuucuacgagccccagaucaucaccacccacaacaccuucgugagcggcaacugcgacguggugaucggcaucgugaacaacaccguguacgacccccugcagcccgagcuggacagcuucaaggaggagcuggacaaguacuucaagaaccacaccagcccugacguggaucugggcgacaucagcggcaucaacgccagcguggugaacauccagaaggagaucgaccggcugaacgagguggccaagaaccugaacgagagccugaucgaccugcaggagcugggcaaguacgagcaguacaucaaguggcccugguacaucuggcugggcuucaucgccggccugaucgccaucgugauggugaccaucaugcugugcugcaugaccagcugcuguagcugccugaagggcugcugcagcugcggcagcugcugcaaguucgacgaggacgacagcgagcccgugcugaagggcgugaagcugcacuacaccugaggacuaguguccaccugucccuccugggcugcuggauugucucguuuuccugccaaauaaacaggaucagcgcuuuacagaucucaaaggcucuuuucagagccaccaaaaaaaaaaaaaaaaaaaaaaaaaaaaaaaaaaaaaaaaaaaaaaaaaaaaaaaaaaaaaaaaaaaaaaaaaaaaaaaaaaaaaaaaaaaaaaaaaaaaa

SEQ ID NO: 23916 - RNA, 4129 nt, Artificial Sequence
  SARS-CoV-2/Wuhan/WIV05/2019__EPI_ISL_402128 spike protein mRNA gc (1-1273)(K417N_E484K_N501Y_D614G)
aggagacccgugacccggaaguuguacggcuacgcgacuuucccucccacaaacccucgcgcccuuccuuuccuacuugggcccggcagaaagcuuaccauguucguguuccuggugcugcugccccuggugagcagccagugcgugaaccugaccacccggacccagcugcccccugccuacaccaacagcuucacccggggcguguacuaccccgacaagguguuccggagcagcgugcugcacagcacccaggaccuguuccugcccuucuucagcaacgugaccugguuccacgccauccacgugagcggcaccaacggcaccaagcgguucgacaacccagugcugcccuucaacgacggcguguacuucgccagcaccgagaagucaaacaucauccggggcuggaucuucggcaccacccuggacagcaagacacagagccugcugaucgugaacaacgccaccaacguggugaucaaggugugcgaguuucaguucugcaacgaccccuuccugggcguguacuaccacaagaacaacaagagcuggauggagagcgaguuccgggucuacagcagcgcuaacaauugcaccuucgaguacgugagccagcccuuccugauggaccucgagggcaagcagggcaacuucaagaaccugcgggaguucguguucaagaacaucgauggcuacuucaagaucuacagcaagcacacccccaucaaccuggugcgggaccugccccagggauucagcgcccuggagccucugguggaccugcccaucggcaucaacaucaccagguuccagacccugcuggcccugcaccggagcuaccugacccccggcgacagcagcagcggcuggaccgccggcgccgccgcauacuacgugggcuaccugcagccacggaccuuccugcugaaguacaacgagaacggcaccaucaccgacgccguggacugcgcccuggacccccugagcgagaccaagugcacccuaaagagcuucaccguggagaagggcaucuaccagaccagcaacuuccgggugcagcccacugagagcaucgugcgguuccccaacauuaccaaccugugucccuucggcgagguguucaacgccacccgguucgccagcguguacgccuggaaccggaagcggaucagcaacugcguggccgacuacagcgugcuguacaacagcgccagcuucagcaccuucaagugcuacggcgugagcccuaccaagcugaacgaccugugcuucaccaacguguacgcugacagcuucgugauccggggcgacgaggugcggcagaucgcccccggccagaccggcaacaucgccgacuacaacuacaagcugcccgacgacuucaccggcugcgugaucgccuggaacagcaacaaccuggacagcaaggugggcggcaacuacaacuaccuguaccggcuguuccguaagagcaaccugaagccauucgagcgggacaucagcaccgagaucuaccaggccggcagcacccccugcaacggugugaagggcuuuaacugcuacuucccccugcagagcuacggcuuccagcccaccuacggcgugggcuaccagcccuaccgggugguggugcugagcuucgagcugcugcacgcccccgccaccgugugcggcccuaaaaagagcaccaaccuggugaagaacaagugcgugaacuucaauuucaacggccugaccggcaccggcgugcugaccgagagcaacaagaaguuccugcccuuccagcaguucggccgggauaucgccgacaccaccgacgcagugcgggacccccagacccuggagauccuggacaucaccccaugcagcuucggcggcgugagcgucaucacccccggcacaaacaccagcaaccagguggccgugcuguaccagggagugaacugcaccgaggugcccguggccauccacgccgaccagcugacccccaccuggcggguguacagcaccggcagcaacguguuccagacccgggccggcugccugaucggcgccgagcacgugaacaacuccuacgagugcgacauccccaucggcgcuggcaucugcgccagcuaccagacccagaccaacagcccccggcgggcccggagcguggccagccagagcaucaucgccuacaccaugagcuuaggcgccgagaacagcguggccuacagcaacaacagcaucgcgaucccuaccaacuucaccaucagcgugaccaccgagauacugcccgugagcaugaccaagaccagcguggacuguaccauguacaucugcggcgacagcaccgagugcagcaaccugcugcugcaguacggcagcuucugcacccagcugaaccgggcccugaccggcaucgccguggagcaggacaagaacacccaagagguguucgcccaggugaagcagaucuacaagacucccccaaucaaggacuucggcggcuucaacuucagccagauccugcccgaccccagcaagcccagcaagcggagcuucaucgaggaccugcuguucaacaaggugacccuggccgacgccggcuucaucaagcaguacggcgacugccugggggauaucgccgcucgggaccugaucugcgcccagaaguucaacggccugaccgugcugcccccucugcugaccgacgagaugaucgcccaguacaccagcgcccugcuugccggcaccaucaccagcggcuggaccuucggcgccggcgcagcccugcagauccccuucgccaugcagauggccuaccgguucaacggcaucggcgugacccagaacgugcuguacgagaaccagaagcugaucgccaaccaguucaacagcgccaucggcaagauccaggacagccugagcagcaccgccagcgcccugggcaagcugcaggacguggugaaccagaacgcucaggcccugaacacccuggugaagcagcugagcagcaacuucggcgccaucagcucagugcugaaugacauccugagcaggcuggacaagguggaggccgaggugcagaucgaccggcugaucaccggccggcugcagagccugcagaccuacgugacccagcagcugauccgggccgccgagauccgggccagcgccaaccuggcagccaccaagaugagcgagugcgugcugggccagagcaagcggguggacuuuugcggcaagggcuaccaccugaugagcuucccccagagcgccccacacggcgugguguuccuccacgucacauacgugcccgcccaggagaagaacuucaccaccgcccccgccauuugccacgacggcaaggcucacuucccccgggagggaguguucgugagcaacggcacccacugguucgugacccagcggaacuucuacgagccccagaucaucaccaccgacaacaccuucgugagcggcaacugcgacguggugaucggcaucgugaacaacaccguguacgacccccugcagccugagcuggacagcuucaaggaggagcuggacaaguacuucaagaaccacaccagccccgacguggaucugggcgacaucagcggcaucaacgccagcguggugaacauccagaaggagaucgaccggcugaacgagguggccaagaaccugaacgagagccugaucgaccugcaggagcugggcaaguacgagcaguacaucaaguggcccugguacaucuggcugggcuucaucgccggccugaucgccaucgugauggugaccaucaugcugugcugcaugaccagcugcuguagcugccugaagggcugcugcagcugcggcagcugcugcaaguucgacgaggacgacagcgagccagugcugaagggcgugaagcugcacuacaccugaggacuaguguccaccugucccuccugggcugcuggauugucucguuuuccugccaaauaaacaggaucagcgcuuuacagaucucaaaggcucuuuucagagccaccaaaaaaaaaaaaaaaaaaaaaaaaaaaaaaaaaaaaaaaaaaaaaaaaaaaaaaaaaaaaaaaaaaaaaaaaaaaaaaaaaaaaaaaaaaaaaaaaaaaaa

SEQ ID NO: 23917 - RNA, 4120 nt, Artificial Sequence
  SARS-CoV-2/Wuhan/WIV05/2019__EPI_ISL_402128 spike protein mRNA gc (1-1273)(L18F_D80A_D215G_L242del_A243del_L244del_R246I_K417N_E484 K_N501Y_D614G_A701V)
aggagacccgugacccggaaguuguacggcuacgcgacuuucccucccacaaacccucgcgcccuuccuuuccuacuugggcccggcagaaagcuuaccauguucguguuccuggugcugcugccccuggugagcagccagugcgugaacuucaccacccggacccagcugcccccugccuacaccaacagcuucacccggggcguguacuaccccgacaagguguuccggagcagcgugcugcacagcacccaggaccuguuccugcccuucuucagcaacgugaccugguuccacgccauccacgugagcggcaccaacggcaccaagcgguucgccaacccagugcugcccuucaacgacggcguguacuucgccagcaccgagaagucaaacaucauccggggcuggaucuuuggcaccacccuggacagcaagacacagagccugcugaucgugaacaacgcuaccaacguggugaucaaggugugcgaguuccaguucugcaacgaccccuuccugggcguguacuaccacaagaacaacaagagcuggauggagagcgaguuccgggucuacagcagcgccaacaauugcaccuucgaguacgugagccagcccuuccugauggaccuggagggcaagcagggcaacuucaagaaccuccgggaguucguguucaagaacaucgacggcuacuucaagaucuacagcaagcacacccccaucaaccuggugcggggacugccccagggcuucagcgcccuggagccucugguggaucugcccaucggcaucaacaucaccagguuccagacccugcacaucagcuaccugacccccggcgacagcagcagcggcuggaccgccggcgccgccgcauacuacgugggcuaccugcagccacggaccuuccugcugaaguacaacgagaacggcaccaucaccgacgccguggacugcgcccuggacccccugagcgagaccaagugcacccuuaagagcuucaccguggagaagggcaucuaccagaccagcaacuuccgggugcagcccacugagagcauugugcgguuccccaacaucaccaaccugugucccuucggcgagguguucaacgccacccgguucgccagcguguacgccuggaaccggaagcggaucagcaacugcguggccgacuacagcgugcuguacaacagcgccagcuucagcaccuucaagugcuacggcgugagcccuaccaagcugaacgaccugugcuucaccaacguguacgcugacagcuucgugauccggggcgacgaggugcggcagaucgcccccggccagaccggcaacaucgccgacuacaacuacaagcugcccgacgacuucaccggcugcgugaucgccuggaacagcaacaaccuggacagcaaggugggcggcaacuacaacuaccuguaccggcuauuccguaagagcaaccugaagccauuugagcgggacaucagcaccgagaucuaccaggccgguagcacccccugcaacggcgugaagggcuucaacugcuacuucccccugcagagcuacggcuuccagcccaccuacggcgugggcuaccagcccuaccgggugguggugcugagcuucgagcugcugcacgcccccgccaccgugugcggcccuaaaaagagcaccaaccuggugaagaacaagugcgugaacuucaauuucaacggccugaccggcaccggcgugcugaccgagagcaacaagaaguuccugcccuuccagcaguucggccgggacaucgccgacaccaccgaugcagugcgggacccccagacccuggagauccuggacaucaccccaugcagcuucggcggcgugagcgucaucacccccggaacaaacaccagcaaccagguggccgugcuguaccagggcgugaacugcaccgaggugcccguggccauccacgccgaccagcugacccccaccuggcggguguacagcaccggcagcaacguguuccagacccgggccggcugccugaucggcgccgagcacgugaacaacuccuacgagugcgacauccccaucggcgcuggcaucugcgccagcuaccagacccagaccaacagcccccggcgggcccggagcguggccagccagagcaucaucgccuacaccaugagccugggcguggagaacagcguggccuacagcaacaacagcaucgccaucccuaccaacuucaccauaagcgugaccaccgagauccugcccgugagcaugaccaagaccagcguggacuguaccauguacaucugcggcgacagcaccgagugcagcaaccuguuacugcaguacggcagcuucugcacccagcugaaccgggcgcugaccggcaucgccguggagcaggacaagaacacccaagagguguucgcccaggugaagcagaucuacaagacucccccaaucaaggacuucggcggcuucaacuucagccagauccugcccgaccccagcaagcccagcaagcggagcuucaucgaggaccugcuguucaacaaggugacccuggccgacgccggcuucaucaagcaguacggggacugccugggcgacaucgccgcccgggaccugaucugcgcucagaaguucaacggccugaccgugcugcccccucugcugaccgaugagaugaucgcccaguacaccagcgcccugcuggccggcaccaucaccagcggcuggaccuucggcgccggcgccgcacugcagauccccuucgccaugcagauggccuaccgguucaacggcaucggcgugacccagaacgugcuguacgagaaccagaagcugaucgccaaccaguucaacagcgccaucggcaagauccaggacagccugagcagcaccgccagcgcccugggcaagcugcaggacguggugaaccagaacgcccaggcucugaacacccuggugaagcagcugagcagcaacuuuggcgccaucagcucagugcugaaugacauccugagccggcuggacaagguggaggccgaggugcagaucgacaggcugaucaccggccggcugcagagccugcagaccuacgugacccagcagcugauccgggccgccgagauucgggccagcgccaaccuggccgcaaccaagaugagcgagugcgugcugggccagagcaagcggguggacuucugcggcaagggcuaccaccugaugagcuucccccagagcgccccacacggcguggucuuccugcacgugacauacgugcccgcccaggagaagaacuucaccaccgcccccgccaucugccacgacggaaaggcccacuucccccgggagggcguguucgugagcaacggcacccacugguucgugacccagcggaacuucuacgagccccagaucaucaccaccgacaacaccuucgugagcggcaacugcgacguggugaucggcaucgugaacaacaccguguacgacccccugcagccugagcuggacagcuucaaggaggagcucgacaaguacuucaagaaccacaccagccccgacguggaccugggcgacaucagcggcaucaacgcuagcguggugaacauccagaaggagaucgaucggcugaacgagguggccaagaaccugaacgagagccugaucgaccugcaggagcugggcaaguacgagcaguacaucaaguggcccugguacaucuggcugggcuucaucgccggccugaucgccaucgugauggugaccaucaugcugugcugcaugaccagcugcuguagcugccugaagggcugcugcagcugcggcagcugcugcaaguucgacgaggacgacagcgagccagugcugaagggcgugaagcugcacuacaccugaggacuaguguccaccugucccuccugggcugcuggauugucucguuuuccugccaaauaaacaggaucagcgcuuuacagaucucaaaggcucuuuucagagccaccaaaaaaaaaaaaaaaaaaaaaaaaaaaaaaaaaaaaaaaaaaaaaaaaaaaaaaaaaaaaaaaaaaaaaaaaaaaaaaaaaaaaaaaaaaaaaaaaaaaaa

SEQ ID NO: 23918 - RNA, 4129 nt, Artificial Sequence
  SARS-CoV-2/Wuhan/WIV05/2019__EPI_ISL_402128 spike protein mRNA gc (1-1273)(E484K_D614G)
aggagacccgugacccggaaguuguacggcuacgcgacuuucccucccacaaacccucgcgcccuuccuuuccuacuugggcccggcagaaagcuuaccauguucguguuccuggugcugcugccccuggugagcagccagugcgugaaccugaccacccggacccagcugcccccugccuacaccaacagcuucacccggggcguguacuaccccgacaagguguuccggagcagcgugcugcacagcacccaggaccuguuccugcccuucuucagcaacgugaccugguuccacgccauccacgugagcggcaccaacggcaccaagcgguucgacaacccagugcugcccuucaacgacggcguguacuucgccagcaccgagaagucaaacaucauccggggcuggaucuucggcaccacccuggacagcaagacacagagccugcugaucgugaacaacgccaccaacguggugaucaaggugugcgaguuucaguucugcaacgaccccuuccugggcguguacuaccacaagaacaacaagagcuggauggagagcgaguuccgggucuacagcagcgcuaacaauugcaccuucgaguacgugagccagcccuuccugauggaccucgagggcaagcagggcaacuucaagaaccugcgggaguucguguucaagaacaucgauggcuacuucaagaucuacagcaagcacacccccaucaaccuggugcgggaccugccccagggauucagcgcccuggagccucugguggaccugcccaucggcaucaacaucaccagguuccagacccugcuggcccugcaccggagcuaccugacccccggcgacagcagcagcggcuggaccgccggcgccgccgcauacuacgugggcuaccugcagccacggaccuuccugcugaaguacaacgagaacggcaccaucaccgacgccguggacugcgcccuggacccccugagcgagaccaagugcacccuaaagagcuucaccguggagaagggcaucuaccagaccagcaacuuccgggugcagcccacugagagcaucgugcgguuccccaacauuaccaaccugugucccuucggcgagguguucaacgccacccgguucgccagcguguacgccuggaaccggaagcggaucagcaacugcguggccgacuacagcgugcuguacaacagcgccagcuucagcaccuucaagugcuacggcgugagcccuaccaagcugaacgaccugugcuucaccaacguguacgcugacagcuucgugauccggggcgacgaggugcggcagaucgcccccggccagaccggcaagaucgccgacuacaacuacaagcugcccgacgacuucaccggcugcgugaucgccuggaacagcaacaaccuggacagcaaggugggcggcaacuacaacuaccuguaccggcuguuccguaagagcaaccugaagccauucgagcgggacaucagcaccgagaucuaccaggccggcagcacccccugcaacggugugaagggcuuuaacugcuacuucccccugcagagcuacggcuuccagcccaccaacggcgugggcuaccagcccuaccgggugguggugcugagcuucgagcugcugcacgcccccgccaccgugugcggcccuaaaaagagcaccaaccuggugaagaacaagugcgugaacuucaauuucaacggccugaccggcaccggcgugcugaccgagagcaacaagaaguuccugcccuuccagcaguucggccgggauaucgccgacaccaccgacgcagugcgggacccccagacccuggagauccuggacaucaccccaugcagcuucggcggcgugagcgucaucacccccggcacaaacaccagcaaccagguggccgugcuguaccagggagugaacugcaccgaggugcccguggccauccacgccgaccagcugacccccaccuggcggguguacagcaccggcagcaacguguuccagacccgggccggcugccugaucggcgccgagcacgugaacaacuccuacgagugcgacauccccaucggcgcuggcaucugcgccagcuaccagacccagaccaacagcccccggcgggcccggagcguggccagccagagcaucaucgccuacaccaugagcuuaggcgccgagaacagcguggccuacagcaacaacagcaucgcgaucccuaccaacuucaccaucagcgugaccaccgagauacugcccgugagcaugaccaagaccagcguggacuguaccauguacaucugcggcgacagcaccgagugcagcaaccugcugcugcaguacggcagcuucugcacccagcugaaccgggcccugaccggcaucgccguggagcaggacaagaacacccaagagguguucgcccaggugaagcagaucuacaagacucccccaaucaaggacuucggcggcuucaacuucagccagauccugcccgaccccagcaagcccagcaagcggagcuucaucgaggaccugcuguucaacaaggugacccuggccgacgccggcuucaucaagcaguacggcgacugccugggggauaucgccgcucgggaccugaucugcgcccagaaguucaacggccugaccgugcugcccccucugcugaccgacgagaugaucgcccaguacaccagcgcccugcuugccggcaccaucaccagcggcuggaccuucggcgccggcgcagcccugcagauccccuucgccaugcagauggccuaccgguucaacggcaucggcgugacccagaacgugcuguacgagaaccagaagcugaucgccaaccaguucaacagcgccaucggcaagauccaggacagccugagcagcaccgccagcgcccugggcaagcugcaggacguggugaaccagaacgcucaggcccugaacacccuggugaagcagcugagcagcaacuucggcgccaucagcucagugcugaaugacauccugagcaggcuggacaagguggaggccgaggugcagaucgaccggcugaucaccggccggcugcagagccugcagaccuacgugacccagcagcugauccgggccgccgagauccgggccagcgccaaccuggcagccaccaagaugagcgagugcgugcugggccagagcaagcggguggacuuuugcggcaagggcuaccaccugaugagcuucccccagagcgccccacacggcgugguguuccuccacgucacauacgugcccgcccaggagaagaacuucaccaccgcccccgccauuugccacgacggcaaggcucacuucccccgggagggaguguucgugagcaacggcacccacugguucgugacccagcggaacuucuacgagccccagaucaucaccaccgacaacaccuucgugagcggcaacugcgacguggugaucggcaucgugaacaacaccguguacgacccccugcagccugagcuggacagcuucaaggaggagcuggacaaguacuucaagaaccacaccagccccgacguggaucugggcgacaucagcggcaucaacgccagcguggugaacauccagaaggagaucgaccggcugaacgagguggccaagaaccugaacgagagccugaucgaccugcaggagcugggcaaguacgagcaguacaucaaguggcccugguacaucuggcugggcuucaucgccggccugaucgccaucgugauggugaccaucaugcugugcugcaugaccagcugcuguagcugccugaagggcugcugcagcugcggcagcugcugcaaguucgacgaggacgacagcgagccagugcugaagggcgugaagcugcacuacaccugaggacuaguguccaccugucccuccugggcugcuggauugucucguuuuccugccaaauaaacaggaucagcgcuuuacagaucucaaaggcucuuuucagagccaccaaaaaaaaaaaaaaaaaaaaaaaaaaaaaaaaaaaaaaaaaaaaaaaaaaaaaaaaaaaaaaaaaaaaaaaaaaaaaaaaaaaaaaaaaaaaaaaaaaaaa

SEQ ID NO: 23919 - RNA, 4129 nt, Artificial Sequence
  SARS-CoV-2/Wuhan/WIV05/2019__EPI_ISL_402128 spike protein mRNA gc (1-1273)(L18F_T20N_P26S_D138Y_R190S_K417T_E484K_N501Y_D614G_H655Y _T1027I)
aggagacccgugacccggaaguuguacggcuacgcgacuuucccucccacaaacccucgcgcccuuccuuuccuacuugggcccggcagaaagcuuaccauguucguguuccuggugcugcugccccuggugagcagccagugcgugaacuucaccaaccggacccagcugcccagcgccuacaccaacagcuucacccggggcguguacuacccugacaagguguuccggagcagcgugcugcacagcacccaggaccuguuccugcccuucuucagcaacgugaccugguuccacgccauccacgugagcggcaccaacggcaccaagcgguucgacaaccccgugcugccauucaacgacggcguguacuucgccagcaccgagaagucaaacaucauccggggcuggaucuuuggcaccacccuggacagcaagacccagagccugcugaucgugaacaacgccacaaacguggugaucaaggugugcgaguuccaguucugcaacuaccccuuccugggcguguacuaccacaagaacaacaagagcuggauggagagcgaguuccgggucuacagcagcgcuaauaacugcaccuucgaguacgugagccagcccuuccugauggaccuggagggcaagcagggcaacuucaagaaccucagcgaguucguguucaagaacaucgacggcuacuucaagaucuacagcaagcacacccccaucaaccuggugcgggaucugccccagggauucagcgcccuggagccccugguggaccugccuaucggcaucaacaucacccgguuccagacccugcuggcccugcacaggagcuaccugacccccggcgacagcagcagcggcuggaccgccggcgccgccgcauacuacgugggcuaccugcagccccggaccuuccugcugaaguacaacgagaacggcaccaucaccgacgccguggacugcgcccuggacccacugagcgagaccaagugcacccuaaagagcuucaccguggagaagggcaucuaccagaccagcaacuuccgggugcagcccaccgagagcaucgugcgguuccccaacauuacuaaccugugucccuucggcgagguguucaacgccacccgguucgccagcguguacgccuggaaccggaagcggaucagcaacugcguggccgacuacagcgugcuguacaacagcgccagcuucagcaccuucaagugcuacggcgugagccccaccaagcugaacgaccugugcuucaccaacguguacgcugacagcuucgugauccggggcgacgaggugcggcagaucgccccuggccagaccggcaccaucgccgacuacaacuacaagcugcccgacgacuucaccggcugcgugaucgccuggaacagcaacaaccuggacagcaaggugggcggcaacuacaacuaccuguaccggcuguuccguaagagcaaccugaagcccuuugagcgggacaucagcaccgagaucuaccaggccggcagcaccccaugcaacggugugaagggcuucaacugcuacuucccccugcagagcuacggcuuccagcccaccuacggcgugggcuaccagcccuaccgggugguggugcugagcuucgagcugcugcacgcccccgccaccgugugcggccccaaaaagagcaccaaccuggugaagaacaagugcgugaacuucaauuucaacggccugaccggcaccggcgugcugaccgagagcaacaagaaguuccugccuuuccagcaguucggccgggacaucgccgauaccaccgacgcagugcgggacccccagacccuggagauccuggacaucacccccugcagcuucggcggcgugagcgucaucaccccaggcacaaacaccagcaaccagguggccgugcuguaccagggagugaacugcaccgaggugcccguggccauccacgccgaccagcugacccccaccuggcggguguacuccaccggcagcaacguguuccagacccgggccggcugccugaucggcgccgaguacgugaacaacagcuacgagugcgacauccccaucggcgcuggcaucugcgccagcuaccagacccagaccaacagcccccggcgggcccggagcguggccagccagagcaucaucgccuacaccaugagccugggcgccgagaacagcguggccuacagcaacaacagcaucgcgauccccaccaacuucaccaucagcgugaccaccgagauauuaccugugagcaugaccaagaccagcguggacuguaccauguacaucugcggcgacagcaccgagugcagcaaccugcugcugcaguacggcagcuucugcacccagcugaaccgggcccugaccggcaucgccguggagcaggacaagaacacccaagagguguucgcccaggugaagcagaucuacaagacuccacccaucaaggacuucggcggcuucaacuucagccagauccugcccgaccccagcaagcccagcaagcggagcuucaucgaggaccugcuguucaacaaggugacccuggccgacgccggcuucaucaagcaguacggcgacugccugggggacaucgccgcucgggaucugaucugcgcccagaaguucaacggccugaccgugcugccuccccugcugaccgacgagaugaucgcccaguacaccagcgcccugcuggccggcaccaucaccagcggcuggaccuucggcgccggcgcagcccuucagauccccuucgccaugcagauggccuaccgguucaacggcaucggcgugacccagaacgugcuguacgagaaccagaagcugaucgccaaccaguucaacagcgccaucggcaagauccaggacagccugagcagcaccgccagcgcccugggcaagcugcaggacguggugaaccagaacgcucaggcccugaacacccuggugaagcagcugagcucaaacuuuggcgccaucagcagcgugcugaaugacauccugagccggcuggacaagguggaggccgaggugcagaucgacaggcugaucaccggccggcugcagagccugcagaccuacgugacccagcagcugauccgggccgccgagauccgggccagcgccaaccuggcagccauuaagaugagcgagugcgugcugggccagagcaagcggguggacuucugcggcaagggcuaccaccugaugagcuucccccagagcgcuccccacggcgugguguuccugcacgucaccuacgugccagcccaggagaagaacuucacaaccgcccccgccaucugccacgacggcaaggcccacuucccccgggagggaguguucgugagcaacggcacccacugguucgugacccagcggaacuucuacgagccccagaucaucaccaccgacaacaccuucgugagcggcaacugcgacguggugaucggcaucgugaacaacaccguguacgacccccuccagcccgagcuggacagcuucaaggaggagcuggacaaguacuucaagaaccacaccagcccugacguggaccugggcgauaucagcggcaucaacgccagcguggugaacauccagaaggagaucgaccggcugaacgagguggccaagaaccugaacgagagccugaucgaccugcaggagcugggcaaguacgagcaguacaucaaguggcccugguacaucuggcugggcuucaucgccggccugaucgccaucgugauggugaccaucaugcugugcugcaugaccagcugcuguagcugccugaagggcugcugcagcugcggcagcugcugcaaguucgacgaggacgacagcgagcccgugcugaagggcgugaagcugcacuacaccugaggacuaguguccaccugucccuccugggcugcuggauugucucguuuuccugccaaauaaacaggaucagcgcuuuacagaucucaaaggcucuuuucagagccaccaaaaaaaaaaaaaaaaaaaaaaaaaaaaaaaaaaaaaaaaaaaaaaaaaaaaaaaaaaaaaaaaaaaaaaaaaaaaaaaaaaaaaaaaaaaaaaaaaaaaa

SEQ ID NO: 23920 - RNA, 4129 nt, Artificial Sequence
  SARS-CoV-2/Wuhan/WIV05/2019__EPI_ISL_402128 spike protein mRNA gc (1-1273)(S13I_W152C_L452R_D614G)
aggagacccgugacccggaaguuguacggcuacgcgacuuucccucccacaaacccucgcgcccuuccuuuccuacuugggcccggcagaaagcuuaccauguucguguuccuggugcugcugccccuggugagcauccagugcgugaaccugaccacccggacccagcugcccccugccuacaccaacagcuucacccggggcguguacuaccccgacaagguguuccggagcagcgugcugcacagcacccaggaccuguuccugcccuucuucagcaacgugaccugguuccacgccauccacgugagcggcaccaacggcaccaagcgguucgacaacccagugcugcccuucaacgacggcguguacuucgccagcaccgagaagucaaacaucauccggggcuggaucuucggcaccacccuggacagcaagacacagagccugcugaucgugaacaacgccaccaacguggugaucaaggugugcgaguuucaguucugcaacgaccccuuccugggcguguacuaccacaagaacaacaagagcugcauggagagcgaguuccgggucuacagcagcgcuaacaauugcaccuucgaguacgugagccagcccuuccugauggaccucgagggcaagcagggcaacuucaagaaccugcgggaguucguguucaagaacaucgauggcuacuucaagaucuacagcaagcacacccccaucaaccuggugcgggaccugccccagggauucagcgcccuggagccucugguggaccugcccaucggcaucaacaucaccagguuccagacccugcuggcccugcaccggagcuaccugacccccggcgacagcagcagcggcuggaccgccggcgccgccgcauacuacgugggcuaccugcagccacggaccuuccugcugaaguacaacgagaacggcaccaucaccgacgccguggacugcgcccuggacccccugagcgagaccaaguguacccuaaagagcuucaccguggagaagggcaucuaccagaccagcaacuuccgggugcagcccacugagagcauugugcgguuccccaacaucaccaaccugugccccuucggcgagguguucaacgccacccgguucgccagcguguacgccuggaaccggaagcggaucagcaacugcguggccgacuacagcgugcuguacaacagcgccagcuucagcaccuucaagugcuacggcgugagcccuaccaagcugaacgaccugugcuucaccaacguguacgcugacagcuucgugauccggggcgacgaggugcggcagaucgcccccggccagaccggcaagaucgccgacuacaacuacaagcugcccgacgacuucaccggcugcgugaucgccuggaacagcaacaaccuggacagcaaggugggcggcaacuacaacuaccgguaccggcuguuccguaagagcaaccugaagccauucgagcgggacaucagcaccgagaucuaccaggccggcagcacccccugcaacgguguggagggcuuuaacugcuacuucccccugcagagcuacggcuuccagcccaccaacggcgugggcuaccagcccuaccgggugguggugcugagcuucgagcugcugcacgcccccgccaccgugugcggcccuaaaaagagcaccaaccuggugaagaacaagugcgugaacuucaauuucaacggccugaccggcaccggcgugcugaccgagagcaacaagaaguuccugcccuuccagcaguucggccgggauaucgccgacaccaccgacgcagugcgggacccccagacccuggagauccuggacaucaccccaugcagcuucggcggcgugagcgucaucacccccggcacaaacaccagcaaccagguggccgugcuguaccagggagugaacugcaccgaggugcccguggccauccacgccgaccagcugacccccaccuggcggguguacagcaccggcagcaacguguuccagacccgggccggcugccugaucggcgccgagcacgugaacaacagcuacgagugcgacauccccaucggcgcuggcaucugugccuccuaccagacccagaccaacagcccccggcgggcccggagcguggccagccagagcaucaucgccuacaccaugagccugggcgccgagaacagcguggccuacagcaacaacagcaucgcgaucccuaccaacuucaccauaagcgugaccaccgagaucuuacccgugagcaugaccaagaccagcguggacugcaccauguacaucugcggcgacagcaccgagugcagcaaccugcugcugcaguacggcagcuucugcacccagcugaaccgggcccugaccggcaucgccguggagcaggacaagaacacccaagagguguucgcccaggugaagcagaucuacaagacucccccaaucaaggacuucggcggcuucaacuucagccagauccugcccgaccccagcaagcccagcaagcggagcuucaucgaggaccugcuguucaacaaggugacccuggccgacgccggcuucaucaagcaguacggcgacugccugggggauaucgccgcucgggaccugaucugcgcccagaaguucaacggccugaccgugcugcccccucugcugaccgacgagaugaucgcccaguacaccagcgcccugcuggccggcaccaucaccagcggcuggaccuucggcgccggcgcagcccuucagauccccuucgccaugcagauggccuacagguucaacggcaucggcgugacccagaacgugcuguacgagaaccagaagcugaucgccaaccaguucaacagcgccaucggcaagauccaggacagccugagcagcaccgccagcgcccugggcaagcugcaggacguggugaaccagaacgcucaggcccugaacacccuggugaagcagcugagcagcaacuucggcgccaucagcagcgugcugaaugacauccugucacggcuggacaagguggaggccgaggugcagaucgaccggcugaucaccggccggcugcagagccugcagaccuacgugacccagcagcugauccgggccgccgagauucgggccagcgccaaccuggcagccaccaagaugagcgagugcgugcugggccagagcaagcggguggacuuuugcggcaagggcuaccaccugaugagcuucccccagagcgccccacacggcgugguguuccugcacgucacauacgugcccgcccaggagaagaacuucaccaccgcccccgccaucugccacgacggcaaggcucacuucccccgggagggaguguucgugagcaacggcacccacugguucgugacccagcggaacuucuacgagccccagaucaucaccaccgacaacaccuucgugagcggcaacugcgacguggugaucggcaucgugaacaacaccguguacgacccccuccagccugagcuggacagcuucaaggaggagcuggacaaguacuucaagaaccacaccagccccgacguggaucugggcgacaucagcggcaucaacgccagcguggugaacauccagaaggagaucgaccggcugaacgagguggccaagaaccugaacgagagccugaucgaccugcaggagcugggcaaguacgagcaguacaucaaguggcccugguacaucuggcugggcuucaucgccggccugaucgccaucgugauggugaccaucaugcugugcugcaugaccagcuguugcagcugccugaagggcugcugcagcugcggcagcugcugcaaguucgacgaggacgacagcgagccagugcugaagggcgugaagcugcacuacaccugaggacuaguguccaccugucccuccugggcugcuggauugucucguuuuccugccaaauaaacaggaucagcgcuuuacagaucucaaaggcucuuuucagagccaccaaaaaaaaaaaaaaaaaaaaaaaaaaaaaaaaaaaaaaaaaaaaaaaaaaaaaaaaaaaaaaaaaaaaaaaaaaaaaaaaaaaaaaaaaaaaaaaaaaaaa

SEQ ID NO: 23921 - RNA, 4129 nt, Artificial Sequence
  SARS-CoV-2/Wuhan/WIV05/2019__EPI_ISL_402128 spike protein mRNA gc mod (1-1273)
aggagacccgugacccggaaguuguacggcuacgcgacuuucccucccacaaacccucgcgcccuuccuuuccuacuugggcccggcagaaagcuuaccauguucguguuucuggugcugcugccccugguguccagccagugugugaaccugaccaccagaacacagcugccuccagccuacaccaacagcuucaccagaggcguguacuaccccgacaagguguucagauccagcgugcugcacucuacccaggaccuguuccugccuuucuucagcaacgugaccugguuccacgccauccacguguccggcaccaauggcaccaagagauucgacaaccccgugcugcccuucaacgacgggguguacuuugccagcaccgagaaguccaacaucaucagaggcuggaucuucggcaccacacuggacagcaagacccagagccugcugaucgugaacaacgccaccaacguggucaucaaagugugcgaguuccaguucugcaacgaccccuuccugggcgucuacuaccacaagaacaacaagagcuggauggaaagcgaguuccggguguacagcagcgccaacaacugcaccuucgaguacgugucccagccuuuccugauggaccuggaaggcaagcagggcaacuucaagaaccugcgcgaguucguguucaagaacaucgacggcuacuucaaaaucuacagcaagcacaccccuaucaaccucgugcgggaucugccucagggcuucucugcucuggaaccccugguggaucugcccaucggcaucaacaucacccgguuucagacacugcuggcccugcacagaagcuaccugacaccuggcgauagcagcagcggauggacagcuggugccgccgcuuacuaugugggcuaccugcagccuagaaccuuccugcugaaguacaacgagaacggcaccaucaccgacgccguggauugugcucuggauccucugagcgagacaaagugcacccugaaguccuucaccguggaaaagggcaucuaccagaccagcaacuuccgggugcagcccaccgaauccaucgugcgguuccccaauaucaccaaucugugccccuucggcgagguguucaaugccaccagauucgccucuguguacgccuggaaccggaagcggaucagcaauugcguggccgacuacuccgugcuguacaacuccgccagcuucagcaccuucaagugcuacggcguguccccuaccaagcugaacgaccugugcuucacaaacguguacgccgacagcuucgugauccggggagaugaagugcggcagauugccccuggacagacaggcaagaucgccgacuacaacuacaagcugcccgacgacuucaccggcugugugauugccuggaacagcaacaaccuggacuccaaagucggcggcaacuacaauuaccuguaccggcuguuccggaaguccaaucugaagcccuucgagcgggacaucagcaccgaaaucuaucaggccggcagcaccccuugcaacggcguggaaggcuucaacugcuacuucccacugcaguccuacggcuuucagcccacaaauggcgugggcuaucagcccuacagagugguggugcugagcuucgaacugcugcaugcuccugccacagugugcggcccuaagaaaagcaccaaucucgugaagaacaaaugcgugaacuucaacuucaacggccugaccggcaccggcgugcugacagagagcaacaagaaguuccugccauuccagcaguuuggccgggauaucgccgauaccacagacgccguuagagauccccagacacuggaaauccuggacaucaccccaugcagcuucggcggagugucugugaucaccccuggcaccaacaccagcaaucagguggcagugcuguaccaggacgugaacuguaccgaagugcccguggccauucacgccgaucagcugacaccuacauggcggguguacuccaccggcagcaauguguuucagaccagagccggcugucugaucggagccgagcacgugaacaauagcuacgagugcgacauccccaucggcgcuggcaucugugccagcuaccagacacagacaaacagccccagacgggcuagaagcguggccagccagagcaucauugccuacacaaugucucugggcgccgagaacagcguggccuacuccaacaacucuaucgcuauccccaccaacuucaccaucagcgugaccaccgagauccugccuguguccaugaccaagaccagcguggacugcaccauguacaucugcggcgauuccaccgagugcuccaaccugcugcugcaguacggcagcuucugcacccagcugaauagagcccugacagggaucgccguggaacaggacaagaacacccaagagguguucgcccaagugaagcaaaucuacaagaccccuccuaucaaggacuucggcggcuucaauuucagccagauucugcccgauccuagcaagcccagcaagcggagcuucaucgaggaccugcuguucaacaaagugacacuggccgacgccggcuucaucaagcaguauggcgauugucugggcgacauugccgccagggaucugauuugcgcccagaaguuuaacggacugacagugcugccuccucugcugaccgaugagaugaucgcccaguacacaucugcccugcuggccggcacaaucacaagcggcuggacauuuggagcuggcgccgcucugcagauccccuuugcuaugcagauggccuaccgguucaacggcaucggagugacccagaaugugcuguacgagaaccagaagcugaucgccaaccaguucaacagcgccaucggcaagauccaggacagccugagcagcacagcaagcgcccugggaaagcugcaggacguggucaaccagaaugcccaggcacugaacacccuggucaagcagcuguccuccaacuucggcgccaucagcucugugcugaacgauauccugagcagacuggacaaggucgaggccgaggugcagaucgacagacugaucacaggcagacugcagagccuccagacauacgugacccagcagcugaucagagccgccgagauuagagccucugccaaucuggccgccaccaagaugucugagugugugcugggccagagcaagagaguggacuuuugcggcaagggcuaccaccugaugagcuucccucagucugccccucacggcgugguguuucugcacgugacauaugugcccgcucaagagaagaauuucaccaccgcuccagccaucugccacgacggcaaagcccacuuuccuagagaaggcguguucguguccaacggcacccauugguucgugacacagcggaacuucuacgagccccagaucaucaccaccgacaacaccuucgugucuggcaacugcgacguugugaucggcauugugaacaauaccguguacgacccucugcagcccgagcuggacagcuucaaagaggaacuggacaaguacuuuaagaaccacacaagccccgacguggaccugggcgauaucagcggaaucaaugccagcgucgugaacauccagaaagagaucgaccggcugaacgagguggccaagaaucugaacgagagccugaucgaccugcaagaacuggggaaguacgagcaguacaucaaguggcccugguacaucuggcugggcuuuaucgccggacugauugccaucgugauggucacaaucaugcuguguugcaugaccagcugcuguagcugccugaagggcuguuguagcuguggcagcugcugcaaguucgacgaggacgauucugagcccgugcugaagggcgugaaacugcacuacaccugaggacuaguguccaccugucccuccugggcugcuggauugucucguuuuccugccaaauaaacaggaucagcgcuuuacagaucucaaaggcucuuuucagagccaccaaaaaaaaaaaaaaaaaaaaaaaaaaaaaaaaaaaaaaaaaaaaaaaaaaaaaaaaaaaaaaaaaaaaaaaaaaaaaaaaaaaaaaaaaaaaaaaaaaaaa

SEQ ID NO: 23922 - RNA, 4129 nt, Artificial Sequence
  SARS-CoV-2/Wuhan/WIV05/2019__EPI_ISL_402128 spike protein mRNA gc mod (1-1273)(D614G)
aggagacccgugacccggaaguuguacggcuacgcgacuuucccucccacaaacccucgcgcccuuccuuuccuacuugggcccggcagaaagcuuaccauguucguguuucuggugcugcugccccugguguccagccagugugugaaccugaccaccagaacacagcugccuccagccuacaccaacagcuucaccagaggcguguacuaccccgacaagguguucagauccagcgugcugcacucuacccaggaccuguuccugccuuucuucagcaacgugaccugguuccacgccauccacguguccggcaccaauggcaccaagagauucgacaaccccgugcugcccuucaacgacgggguguacuuugccagcaccgagaaguccaacaucaucagaggcuggaucuucggcaccacacuggacagcaagacccagagccugcugaucgugaacaacgccaccaacguggucaucaaagugugcgaguuccaguucugcaacgaccccuuccugggcgucuacuaccacaagaacaacaagagcuggauggaaagcgaguuccggguguacagcagcgccaacaacugcaccuucgaguacgugucccagccuuuccugauggaccuggaaggcaagcagggcaacuucaagaaccugcgcgaguucguguucaagaacaucgacggcuacuucaaaaucuacagcaagcacaccccuaucaaccucgugcgggaucugccucagggcuucucugcucuggaaccccugguggaucugcccaucggcaucaacaucacccgguuucagacacugcuggcccugcacagaagcuaccugacaccuggcgauagcagcagcggauggacagcuggugccgccgcuuacuaugugggcuaccugcagccuagaaccuuccugcugaaguacaacgagaacggcaccaucaccgacgccguggauugugcucuggauccucugagcgagacaaagugcacccugaaguccuucaccguggaaaagggcaucuaccagaccagcaacuuccgggugcagcccaccgaauccaucgugcgguuccccaauaucaccaaucugugccccuucggcgagguguucaaugccaccagauucgccucuguguacgccuggaaccggaagcggaucagcaauugcguggccgacuacuccgugcuguacaacuccgccagcuucagcaccuucaagugcuacggcguguccccuaccaagcugaacgaccugugcuucacaaacguguacgccgacagcuucgugauccggggagaugaagugcggcagauugccccuggacagacaggcaagaucgccgacuacaacuacaagcugcccgacgacuucaccggcugugugauugccuggaacagcaacaaccuggacuccaaagucggcggcaacuacaauuaccuguaccggcuguuccggaaguccaaucugaagcccuucgagcgggacaucagcaccgaaaucuaucaggccggcagcaccccuugcaacggcguggaaggcuucaacugcuacuucccacugcaguccuacggcuuucagcccacaaauggcgugggcuaucagcccuacagagugguggugcugagcuucgaacugcugcaugcuccugccacagugugcggcccuaagaaaagcaccaaucucgugaagaacaaaugcgugaacuucaacuucaacggccugaccggcaccggcgugcugacagagagcaacaagaaguuccugccauuccagcaguuuggccgggauaucgccgauaccacagacgccguuagagauccccagacacuggaaauccuggacaucaccccaugcagcuucggcggagugucugugaucaccccuggcaccaacaccagcaaucagguggcagugcuguaccagggcgugaacuguaccgaagugcccguggccauucacgccgaucagcugacaccuacauggcggguguacuccaccggcagcaauguguuucagaccagagccggcugucugaucggagccgagcacgugaacaauagcuacgagugcgacauccccaucggcgcuggcaucugugccagcuaccagacacagacaaacagccccagacgggcuagaagcguggccagccagagcaucauugccuacacaaugucucugggcgccgagaacagcguggccuacuccaacaacucuaucgcuauccccaccaacuucaccaucagcgugaccaccgagauccugccuguguccaugaccaagaccagcguggacugcaccauguacaucugcggcgauuccaccgagugcuccaaccugcugcugcaguacggcagcuucugcacccagcugaauagagcccugacagggaucgccguggaacaggacaagaacacccaagagguguucgcccaagugaagcaaaucuacaagaccccuccuaucaaggacuucggcggcuucaauuucagccagauucugcccgauccuagcaagcccagcaagcggagcuucaucgaggaccugcuguucaacaaagugacacuggccgacgccggcuucaucaagcaguauggcgauugucugggcgacauugccgccagggaucugauuugcgcccagaaguuuaacggacugacagugcugccuccucugcugaccgaugagaugaucgcccaguacacaucugcccugcuggccggcacaaucacaagcggcuggacauuuggagcuggcgccgcucugcagauccccuuugcuaugcagauggccuaccgguucaacggcaucggagugacccagaaugugcuguacgagaaccagaagcugaucgccaaccaguucaacagcgccaucggcaagauccaggacagccugagcagcacagcaagcgcccugggaaagcugcaggacguggucaaccagaaugcccaggcacugaacacccuggucaagcagcuguccuccaacuucggcgccaucagcucugugcugaacgauauccugagcagacuggacaaggucgaggccgaggugcagaucgacagacugaucacaggcagacugcagagccuccagacauacgugacccagcagcugaucagagccgccgagauuagagccucugccaaucuggccgccaccaagaugucugagugugugcugggccagagcaagagaguggacuuuugcggcaagggcuaccaccugaugagcuucccucagucugccccucacggcgugguguuucugcacgugacauaugugcccgcucaagagaagaauuucaccaccgcuccagccaucugccacgacggcaaagcccacuuuccuagagaaggcguguucguguccaacggcacccauugguucgugacacagcggaacuucuacgagccccagaucaucaccaccgacaacaccuucgugucuggcaacugcgacguugugaucggcauugugaacaauaccguguacgacccucugcagcccgagcuggacagcuucaaagaggaacuggacaaguacuuuaagaaccacacaagccccgacguggaccugggcgauaucagcggaaucaaugccagcgucgugaacauccagaaagagaucgaccggcugaacgagguggccaagaaucugaacgagagccugaucgaccugcaagaacuggggaaguacgagcaguacaucaaguggcccugguacaucuggcugggcuuuaucgccggacugauugccaucgugauggucacaaucaugcuguguugcaugaccagcugcuguagcugccugaagggcuguuguagcuguggcagcugcugcaaguucgacgaggacgauucugagcccgugcugaagggcgugaaacugcacuacaccugaggacuaguguccaccugucccuccugggcugcuggauugucucguuuuccugccaaauaaacaggaucagcgcuuuacagaucucaaaggcucuuuucagagccaccaaaaaaaaaaaaaaaaaaaaaaaaaaaaaaaaaaaaaaaaaaaaaaaaaaaaaaaaaaaaaaaaaaaaaaaaaaaaaaaaaaaaaaaaaaaaaaaaaaaaa

SEQ ID NO: 23923 - RNA, 4129 nt, Artificial Sequence
  SARS-CoV-2/Wuhan/WIV05/2019__EPI_ISL_402128 spike protein mRNA gc mod (1-1273)(A222V_D614G)
aggagacccgugacccggaaguuguacggcuacgcgacuuucccucccacaaacccucgcgcccuuccuuuccuacuugggcccggcagaaagcuuaccauguucguguuucuggugcugcugccccugguguccagccagugugugaaccugaccaccagaacacagcugccuccagccuacaccaacagcuucaccagaggcguguacuaccccgacaagguguucagauccagcgugcugcacucuacccaggaccuguuccugccuuucuucagcaacgugaccugguuccacgccauccacguguccggcaccaauggcaccaagagauucgacaaccccgugcugcccuucaacgacgggguguacuuugccagcaccgagaaguccaacaucaucagaggcuggaucuucggcaccacacuggacagcaagacccagagccugcugaucgugaacaacgccaccaacguggucaucaaagugugcgaguuccaguucugcaacgaccccuuccugggcgucuacuaccacaagaacaacaagagcuggauggaaagcgaguuccggguguacagcagcgccaacaacugcaccuucgaguacgugucccagccuuuccugauggaccuggaaggcaagcagggcaacuucaagaaccugcgcgaguucguguucaagaacaucgacggcuacuucaaaaucuacagcaagcacaccccuaucaaccucgugcgggaucugccucagggcuucucugugcuggaaccccugguggaucugcccaucggcaucaacaucacccgguuucagacacugcuggcccugcacagaagcuaccugacaccuggcgauagcagcagcggauggacagcuggugccgccgcuuacuaugugggcuaccugcagccuagaaccuuccugcugaaguacaacgagaacggcaccaucaccgacgccguggauugugcucuggauccucugagcgagacaaagugcacccugaaguccuucaccguggaaaagggcaucuaccagaccagcaacuuccgggugcagcccaccgaauccaucgugcgguuccccaauaucaccaaucugugccccuucggcgagguguucaaugccaccagauucgccucuguguacgccuggaaccggaagcggaucagcaauugcguggccgacuacuccgugcuguacaacuccgccagcuucagcaccuucaagugcuacggcguguccccuaccaagcugaacgaccugugcuucacaaacguguacgccgacagcuucgugauccggggagaugaagugcggcagauugccccuggacagacaggcaagaucgccgacuacaacuacaagcugcccgacgacuucaccggcugugugauugccuggaacagcaacaaccuggacuccaaagucggcggcaacuacaauuaccuguaccggcuguuccggaaguccaaucugaagcccuucgagcgggacaucagcaccgaaaucuaucaggccggcagcaccccuugcaacggcguggaaggcuucaacugcuacuucccacugcaguccuacggcuuucagcccacaaauggcgugggcuaucagcccuacagagugguggugcugagcuucgaacugcugcaugcuccugccacagugugcggcccuaagaaaagcaccaaucucgugaagaacaaaugcgugaacuucaacuucaacggccugaccggcaccggcgugcugacagagagcaacaagaaguuccugccauuccagcaguuuggccgggauaucgccgauaccacagacgccguuagagauccccagacacuggaaauccuggacaucaccccaugcagcuucggcggagugucugugaucaccccuggcaccaacaccagcaaucagguggcagugcuguaccagggcgugaacuguaccgaagugcccguggccauucacgccgaucagcugacaccuacauggcggguguacuccaccggcagcaauguguuucagaccagagccggcugucugaucggagccgagcacgugaacaauagcuacgagugcgacauccccaucggcgcuggcaucugugccagcuaccagacacagacaaacagccccagacgggcuagaagcguggccagccagagcaucauugccuacacaaugucucugggcgccgagaacagcguggccuacuccaacaacucuaucgcuauccccaccaacuucaccaucagcgugaccaccgagauccugccuguguccaugaccaagaccagcguggacugcaccauguacaucugcggcgauuccaccgagugcuccaaccugcugcugcaguacggcagcuucugcacccagcugaauagagcccugacagggaucgccguggaacaggacaagaacacccaagagguguucgcccaagugaagcaaaucuacaagaccccuccuaucaaggacuucggcggcuucaauuucagccagauucugcccgauccuagcaagcccagcaagcggagcuucaucgaggaccugcuguucaacaaagugacacuggccgacgccggcuucaucaagcaguauggcgauugucugggcgacauugccgccagggaucugauuugcgcccagaaguuuaacggacugacagugcugccuccucugcugaccgaugagaugaucgcccaguacacaucugcccugcuggccggcacaaucacaagcggcuggacauuuggagcuggcgccgcucugcagauccccuuugcuaugcagauggccuaccgguucaacggcaucggagugacccagaaugugcuguacgagaaccagaagcugaucgccaaccaguucaacagcgccaucggcaagauccaggacagccugagcagcacagcaagcgcccugggaaagcugcaggacguggucaaccagaaugcccaggcacugaacacccuggucaagcagcuguccuccaacuucggcgccaucagcucugugcugaacgauauccugagcagacuggacaaggucgaggccgaggugcagaucgacagacugaucacaggcagacugcagagccuccagacauacgugacccagcagcugaucagagccgccgagauuagagccucugccaaucuggccgccaccaagaugucugagugugugcugggccagagcaagagaguggacuuuugcggcaagggcuaccaccugaugagcuucccucagucugccccucacggcgugguguuucugcacgugacauaugugcccgcucaagagaagaauuucaccaccgcuccagccaucugccacgacggcaaagcccacuuuccuagagaaggcguguucguguccaacggcacccauugguucgugacacagcggaacuucuacgagccccagaucaucaccaccgacaacaccuucgugucuggcaacugcgacguugugaucggcauugugaacaauaccguguacgacccucugcagcccgagcuggacagcuucaaagaggaacuggacaaguacuuuaagaaccacacaagccccgacguggaccugggcgauaucagcggaaucaaugccagcgucgugaacauccagaaagagaucgaccggcugaacgagguggccaagaaucugaacgagagccugaucgaccugcaagaacuggggaaguacgagcaguacaucaaguggcccugguacaucuggcugggcuuuaucgccggacugauugccaucgugauggucacaaucaugcuguguugcaugaccagcugcuguagcugccugaagggcuguuguagcuguggcagcugcugcaaguucgacgaggacgauucugagcccgugcugaagggcgugaaacugcacuacaccugaggacuaguguccaccugucccuccugggcugcuggauugucucguuuuccugccaaauaaacaggaucagcgcuuuacagaucucaaaggcucuuuucagagccaccaaaaaaaaaaaaaaaaaaaaaaaaaaaaaaaaaaaaaaaaaaaaaaaaaaaaaaaaaaaaaaaaaaaaaaaaaaaaaaaaaaaaaaaaaaaaaaaaaaaaa

SEQ ID NO: 23924 - RNA, 4129 nt, Artificial Sequence
  SARS-CoV-2/Wuhan/WIV05/2019__EPI_ISL_402128 spike protein mRNA gc mod (1-1273)(N439K_D614G)
aggagacccgugacccggaaguuguacggcuacgcgacuuucccucccacaaacccucgcgcccuuccuuuccuacuugggcccggcagaaagcuuaccauguucguguuucuggugcugcugccccugguguccagccagugugugaaccugaccaccagaacacagcugccuccagccuacaccaacagcuucaccagaggcguguacuaccccgacaagguguucagauccagcgugcugcacucuacccaggaccuguuccugccuuucuucagcaacgugaccugguuccacgccauccacguguccggcaccaauggcaccaagagauucgacaaccccgugcugcccuucaacgacgggguguacuuugccagcaccgagaaguccaacaucaucagaggcuggaucuucggcaccacacuggacagcaagacccagagccugcugaucgugaacaacgccaccaacguggucaucaaagugugcgaguuccaguucugcaacgaccccuuccugggcgucuacuaccacaagaacaacaagagcuggauggaaagcgaguuccggguguacagcagcgccaacaacugcaccuucgaguacgugucccagccuuuccugauggaccuggaaggcaagcagggcaacuucaagaaccugcgcgaguucguguucaagaacaucgacggcuacuucaaaaucuacagcaagcacaccccuaucaaccucgugcgggaucugccucagggcuucucugcucuggaaccccugguggaucugcccaucggcaucaacaucacccgguuucagacacugcuggcccugcacagaagcuaccugacaccuggcgauagcagcagcggauggacagcuggugccgccgcuuacuaugugggcuaccugcagccuagaaccuuccugcugaaguacaacgagaacggcaccaucaccgacgccguggauugugcucuggauccucugagcgagacaaagugcacccugaaguccuucaccguggaaaagggcaucuaccagaccagcaacuuccgggugcagcccaccgaauccaucgugcgguuccccaauaucaccaaucugugccccuucggcgagguguucaaugccaccagauucgccucuguguacgccuggaaccggaagcggaucagcaauugcguggccgacuacuccgugcuguacaacuccgccagcuucagcaccuucaagugcuacggcguguccccuaccaagcugaacgaccugugcuucacaaacguguacgccgacagcuucgugauccggggagaugaagugcggcagauugccccuggacagacaggcaagaucgccgacuacaacuacaagcugcccgacgacuucaccggcugugugauugccuggaacagcaagaaccuggacuccaaagucggcggcaacuacaauuaccuguaccggcuguuccggaaguccaaucugaagcccuucgagcgggacaucagcaccgaaaucuaucaggccggcagcaccccuugcaacggcguggaaggcuucaacugcuacuucccacugcaguccuacggcuuucagcccacaaauggcgugggcuaucagcccuacagagugguggugcugagcuucgaacugcugcaugcuccugccacagugugcggcccuaagaaaagcaccaaucucgugaagaacaaaugcgugaacuucaacuucaacggccugaccggcaccggcgugcugacagagagcaacaagaaguuccugccauuccagcaguuuggccgggauaucgccgauaccacagacgccguuagagauccccagacacuggaaauccuggacaucaccccaugcagcuucggcggagugucugugaucaccccuggcaccaacaccagcaaucagguggcagugcuguaccagggcgugaacuguaccgaagugcccguggccauucacgccgaucagcugacaccuacauggcggguguacuccaccggcagcaauguguuucagaccagagccggcugucugaucggagccgagcacgugaacaauagcuacgagugcgacauccccaucggcgcuggcaucugugccagcuaccagacacagacaaacagccccagacgggcuagaagcguggccagccagagcaucauugccuacacaaugucucugggcgccgagaacagcguggccuacuccaacaacucuaucgcuauccccaccaacuucaccaucagcgugaccaccgagauccugccuguguccaugaccaagaccagcguggacugcaccauguacaucugcggcgauuccaccgagugcuccaaccugcugcugcaguacggcagcuucugcacccagcugaauagagcccugacagggaucgccguggaacaggacaagaacacccaagagguguucgcccaagugaagcaaaucuacaagaccccuccuaucaaggacuucggcggcuucaauuucagccagauucugcccgauccuagcaagcccagcaagcggagcuucaucgaggaccugcuguucaacaaagugacacuggccgacgccggcuucaucaagcaguauggcgauugucugggcgacauugccgccagggaucugauuugcgcccagaaguuuaacggacugacagugcugccuccucugcugaccgaugagaugaucgcccaguacacaucugcccugcuggccggcacaaucacaagcggcuggacauuuggagcuggcgccgcucugcagauccccuuugcuaugcagauggccuaccgguucaacggcaucggagugacccagaaugugcuguacgagaaccagaagcugaucgccaaccaguucaacagcgccaucggcaagauccaggacagccugagcagcacagcaagcgcccugggaaagcugcaggacguggucaaccagaaugcccaggcacugaacacccuggucaagcagcuguccuccaacuucggcgccaucagcucugugcugaacgauauccugagcagacuggacaaggucgaggccgaggugcagaucgacagacugaucacaggcagacugcagagccuccagacauacgugacccagcagcugaucagagccgccgagauuagagccucugccaaucuggccgccaccaagaugucugagugugugcugggccagagcaagagaguggacuuuugcggcaagggcuaccaccugaugagcuucccucagucugccccucacggcgugguguuucugcacgugacauaugugcccgcucaagagaagaauuucaccaccgcuccagccaucugccacgacggcaaagcccacuuuccuagagaaggcguguucguguccaacggcacccauugguucgugacacagcggaacuucuacgagccccagaucaucaccaccgacaacaccuucgugucuggcaacugcgacguugugaucggcauugugaacaauaccguguacgacccucugcagcccgagcuggacagcuucaaagaggaacuggacaaguacuuuaagaaccacacaagccccgacguggaccugggcgauaucagcggaaucaaugccagcgucgugaacauccagaaagagaucgaccggcugaacgagguggccaagaaucugaacgagagccugaucgaccugcaagaacuggggaaguacgagcaguacaucaaguggcccugguacaucuggcugggcuuuaucgccggacugauugccaucgugauggucacaaucaugcuguguugcaugaccagcugcuguagcugccugaagggcuguuguagcuguggcagcugcugcaaguucgacgaggacgauucugagcccgugcugaagggcgugaaacugcacuacaccugaggacuaguguccaccugucccuccugggcugcuggauugucucguuuuccugccaaauaaacaggaucagcgcuuuacagaucucaaaggcucuuuucagagccaccaaaaaaaaaaaaaaaaaaaaaaaaaaaaaaaaaaaaaaaaaaaaaaaaaaaaaaaaaaaaaaaaaaaaaaaaaaaaaaaaaaaaaaaaaaaaaaaaaaaaa

SEQ ID NO: 23925 - RNA, 4129 nt, Artificial Sequence
  SARS-CoV-2/Wuhan/WIV05/2019__EPI_ISL_402128 spike protein mRNA gc mod (1-1273)(S477N_D614G)
aggagacccgugacccggaaguuguacggcuacgcgacuuucccucccacaaacccucgcgcccuuccuuuccuacuugggcccggcagaaagcuuaccauguucguguuucuggugcugcugccccugguguccagccagugugugaaccugaccaccagaacacagcugccuccagccuacaccaacagcuucaccagaggcguguacuaccccgacaagguguucagauccagcgugcugcacucuacccaggaccuguuccugccuuucuucagcaacgugaccugguuccacgccauccacguguccggcaccaauggcaccaagagauucgacaaccccgugcugcccuucaacgacgggguguacuuugccagcaccgagaaguccaacaucaucagaggcuggaucuucggcaccacacuggacagcaagacccagagccugcugaucgugaacaacgccaccaacguggucaucaaagugugcgaguuccaguucugcaacgaccccuuccugggcgucuacuaccacaagaacaacaagagcuggauggaaagcgaguuccggguguacagcagcgccaacaacugcaccuucgaguacgugucccagccuuuccugauggaccuggaaggcaagcagggcaacuucaagaaccugcgcgaguucguguucaagaacaucgacggcuacuucaaaaucuacagcaagcacaccccuaucaaccucgugcgggaucugccucagggcuucucugcucuggaaccccugguggaucugcccaucggcaucaacaucacccgguuucagacacugcuggcccugcacagaagcuaccugacaccuggcgauagcagcagcggauggacagcuggugccgccgcuuacuaugugggcuaccugcagccuagaaccuuccugcugaaguacaacgagaacggcaccaucaccgacgccguggauugugcucuggauccucugagcgagacaaagugcacccugaaguccuucaccguggaaaagggcaucuaccagaccagcaacuuccgggugcagcccaccgaauccaucgugcgguuccccaauaucaccaaucugugccccuucggcgagguguucaaugccaccagauucgccucuguguacgccuggaaccggaagcggaucagcaauugcguggccgacuacuccgugcuguacaacuccgccagcuucagcaccuucaagugcuacggcguguccccuaccaagcugaacgaccugugcuucacaaacguguacgccgacagcuucgugauccggggagaugaagugcggcagauugccccuggacagacaggcaagaucgccgacuacaacuacaagcugcccgacgacuucaccggcugugugauugccuggaacagcaacaaccuggacuccaaagucggcggcaacuacaauuaccuguaccggcuguuccggaaguccaaucugaagcccuucgagcgggacaucagcaccgaaaucuaucaggccggcaacaccccuugcaacggcguggaaggcuucaacugcuacuucccacugcaguccuacggcuuucagcccacaaauggcgugggcuaucagcccuacagagugguggugcugagcuucgaacugcugcaugcuccugccacagugugcggcccuaagaaaagcaccaaucucgugaagaacaaaugcgugaacuucaacuucaacggccugaccggcaccggcgugcugacagagagcaacaagaaguuccugccauuccagcaguuuggccgggauaucgccgauaccacagacgccguuagagauccccagacacuggaaauccuggacaucaccccaugcagcuucggcggagugucugugaucaccccuggcaccaacaccagcaaucagguggcagugcuguaccagggcgugaacuguaccgaagugcccguggccauucacgccgaucagcugacaccuacauggcggguguacuccaccggcagcaauguguuucagaccagagccggcugucugaucggagccgagcacgugaacaauagcuacgagugcgacauccccaucggcgcuggcaucugugccagcuaccagacacagacaaacagccccagacgggcuagaagcguggccagccagagcaucauugccuacacaaugucucugggcgccgagaacagcguggccuacuccaacaacucuaucgcuauccccaccaacuucaccaucagcgugaccaccgagauccugccuguguccaugaccaagaccagcguggacugcaccauguacaucugcggcgauuccaccgagugcuccaaccugcugcugcaguacggcagcuucugcacccagcugaauagagcccugacagggaucgccguggaacaggacaagaacacccaagagguguucgcccaagugaagcaaaucuacaagaccccuccuaucaaggacuucggcggcuucaauuucagccagauucugcccgauccuagcaagcccagcaagcggagcuucaucgaggaccugcuguucaacaaagugacacuggccgacgccggcuucaucaagcaguauggcgauugucugggcgacauugccgccagggaucugauuugcgcccagaaguuuaacggacugacagugcugccuccucugcugaccgaugagaugaucgcccaguacacaucugcccugcuggccggcacaaucacaagcggcuggacauuuggagcuggcgccgcucugcagauccccuuugcuaugcagauggccuaccgguucaacggcaucggagugacccagaaugugcuguacgagaaccagaagcugaucgccaaccaguucaacagcgccaucggcaagauccaggacagccugagcagcacagcaagcgcccugggaaagcugcaggacguggucaaccagaaugcccaggcacugaacacccuggucaagcagcuguccuccaacuucggcgccaucagcucugugcugaacgauauccugagcagacuggacaaggucgaggccgaggugcagaucgacagacugaucacaggcagacugcagagccuccagacauacgugacccagcagcugaucagagccgccgagauuagagccucugccaaucuggccgccaccaagaugucugagugugugcugggccagagcaagagaguggacuuuugcggcaagggcuaccaccugaugagcuucccucagucugccccucacggcgugguguuucugcacgugacauaugugcccgcucaagagaagaauuucaccaccgcuccagccaucugccacgacggcaaagcccacuuuccuagagaaggcguguucguguccaacggcacccauugguucgugacacagcggaacuucuacgagccccagaucaucaccaccgacaacaccuucgugucuggcaacugcgacguugugaucggcauugugaacaauaccguguacgacccucugcagcccgagcuggacagcuucaaagaggaacuggacaaguacuuuaagaaccacacaagccccgacguggaccugggcgauaucagcggaaucaaugccagcgucgugaacauccagaaagagaucgaccggcugaacgagguggccaagaaucugaacgagagccugaucgaccugcaagaacuggggaaguacgagcaguacaucaaguggcccugguacaucuggcugggcuuuaucgccggacugauugccaucgugauggucacaaucaugcuguguugcaugaccagcugcuguagcugccugaagggcuguuguagcuguggcagcugcugcaaguucgacgaggacgauucugagcccgugcugaagggcgugaaacugcacuacaccugaggacuaguguccaccugucccuccugggcugcuggauugucucguuuuccugccaaauaaacaggaucagcgcuuuacagaucucaaaggcucuuuucagagccaccaaaaaaaaaaaaaaaaaaaaaaaaaaaaaaaaaaaaaaaaaaaaaaaaaaaaaaaaaaaaaaaaaaaaaaaaaaaaaaaaaaaaaaaaaaaaaaaaaaaaa

SEQ ID NO: 23926 - RNA, 4129 nt, Artificial Sequence
  SARS-CoV-2/Wuhan/WIV05/2019__EPI_ISL_402128 spike protein mRNA gc mod (1-1273)(N501Y_D614G)
aggagacccgugacccggaaguuguacggcuacgcgacuuucccucccacaaacccucgcgcccuuccuuuccuacuugggcccggcagaaagcuuaccauguucguguuucuggugcugcugccccugguguccagccagugugugaaccugaccaccagaacacagcugccuccagccuacaccaacagcuucaccagaggcguguacuaccccgacaagguguucagauccagcgugcugcacucuacccaggaccuguuccugccuuucuucagcaacgugaccugguuccacgccauccacguguccggcaccaauggcaccaagagauucgacaaccccgugcugcccuucaacgacgggguguacuuugccagcaccgagaaguccaacaucaucagaggcuggaucuucggcaccacacuggacagcaagacccagagccugcugaucgugaacaacgccaccaacguggucaucaaagugugcgaguuccaguucugcaacgaccccuuccugggcgucuacuaccacaagaacaacaagagcuggauggaaagcgaguuccggguguacagcagcgccaacaacugcaccuucgaguacgugucccagccuuuccugauggaccuggaaggcaagcagggcaacuucaagaaccugcgcgaguucguguucaagaacaucgacggcuacuucaaaaucuacagcaagcacaccccuaucaaccucgugcgggaucugccucagggcuucucugcucuggaaccccugguggaucugcccaucggcaucaacaucacccgguuucagacacugcuggcccugcacagaagcuaccugacaccuggcgauagcagcagcggauggacagcuggugccgccgcuuacuaugugggcuaccugcagccuagaaccuuccugcugaaguacaacgagaacggcaccaucaccgacgccguggauugugcucuggauccucugagcgagacaaagugcacccugaaguccuucaccguggaaaagggcaucuaccagaccagcaacuuccgggugcagcccaccgaauccaucgugcgguuccccaauaucaccaaucugugccccuucggcgagguguucaaugccaccagauucgccucuguguacgccuggaaccggaagcggaucagcaauugcguggccgacuacuccgugcuguacaacuccgccagcuucagcaccuucaagugcuacggcguguccccuaccaagcugaacgaccugugcuucacaaacguguacgccgacagcuucgugauccggggagaugaagugcggcagauugccccuggacagacaggcaagaucgccgacuacaacuacaagcugcccgacgacuucaccggcugugugauugccuggaacagcaacaaccuggacuccaaagucggcggcaacuacaauuaccuguaccggcuguuccggaaguccaaucugaagcccuucgagcgggacaucagcaccgaaaucuaucaggccggcagcaccccuugcaacggcguggaaggcuucaacugcuacuucccacugcaguccuacggcuuucagcccacauacggcgugggcuaucagcccuacagagugguggugcugagcuucgaacugcugcaugcuccugccacagugugcggcccuaagaaaagcaccaaucucgugaagaacaaaugcgugaacuucaacuucaacggccugaccggcaccggcgugcugacagagagcaacaagaaguuccugccauuccagcaguuuggccgggauaucgccgauaccacagacgccguuagagauccccagacacuggaaauccuggacaucaccccaugcagcuucggcggagugucugugaucaccccuggcaccaacaccagcaaucagguggcagugcuguaccagggcgugaacuguaccgaagugcccguggccauucacgccgaucagcugacaccuacauggcggguguacuccaccggcagcaauguguuucagaccagagccggcugucugaucggagccgagcacgugaacaauagcuacgagugcgacauccccaucggcgcuggcaucugugccagcuaccagacacagacaaacagccccagacgggcuagaagcguggccagccagagcaucauugccuacacaaugucucugggcgccgagaacagcguggccuacuccaacaacucuaucgcuauccccaccaacuucaccaucagcgugaccaccgagauccugccuguguccaugaccaagaccagcguggacugcaccauguacaucugcggcgauuccaccgagugcuccaaccugcugcugcaguacggcagcuucugcacccagcugaauagagcccugacagggaucgccguggaacaggacaagaacacccaagagguguucgcccaagugaagcaaaucuacaagaccccuccuaucaaggacuucggcggcuucaauuucagccagauucugcccgauccuagcaagcccagcaagcggagcuucaucgaggaccugcuguucaacaaagugacacuggccgacgccggcuucaucaagcaguauggcgauugucugggcgacauugccgccagggaucugauuugcgcccagaaguuuaacggacugacagugcugccuccucugcugaccgaugagaugaucgcccaguacacaucugcccugcuggccggcacaaucacaagcggcuggacauuuggagcuggcgccgcucugcagauccccuuugcuaugcagauggccuaccgguucaacggcaucggagugacccagaaugugcuguacgagaaccagaagcugaucgccaaccaguucaacagcgccaucggcaagauccaggacagccugagcagcacagcaagcgcccugggaaagcugcaggacguggucaaccagaaugcccaggcacugaacacccuggucaagcagcuguccuccaacuucggcgccaucagcucugugcugaacgauauccugagcagacuggacaaggucgaggccgaggugcagaucgacagacugaucacaggcagacugcagagccuccagacauacgugacccagcagcugaucagagccgccgagauuagagccucugccaaucuggccgccaccaagaugucugagugugugcugggccagagcaagagaguggacuuuugcggcaagggcuaccaccugaugagcuucccucagucugccccucacggcgugguguuucugcacgugacauaugugcccgcucaagagaagaauuucaccaccgcuccagccaucugccacgacggcaaagcccacuuuccuagagaaggcguguucguguccaacggcacccauugguucgugacacagcggaacuucuacgagccccagaucaucaccaccgacaacaccuucgugucuggcaacugcgacguugugaucggcauugugaacaauaccguguacgacccucugcagcccgagcuggacagcuucaaagaggaacuggacaaguacuuuaagaaccacacaagccccgacguggaccugggcgauaucagcggaaucaaugccagcgucgugaacauccagaaagagaucgaccggcugaacgagguggccaagaaucugaacgagagccugaucgaccugcaagaacuggggaaguacgagcaguacaucaaguggcccugguacaucuggcugggcuuuaucgccggacugauugccaucgugauggucacaaucaugcuguguugcaugaccagcugcuguagcugccugaagggcuguuguagcuguggcagcugcugcaaguucgacgaggacgauucugagcccgugcugaagggcgugaaacugcacuacaccugaggacuaguguccaccugucccuccugggcugcuggauugucucguuuuccugccaaauaaacaggaucagcgcuuuacagaucucaaaggcucuuuucagagccaccaaaaaaaaaaaaaaaaaaaaaaaaaaaaaaaaaaaaaaaaaaaaaaaaaaaaaaaaaaaaaaaaaaaaaaaaaaaaaaaaaaaaaaaaaaaaaaaaaaaaa

SEQ ID NO: 23927 - RNA, 4123 nt, Artificial Sequence
  SARS-CoV-2/Wuhan/WIV05/2019__EPI_ISL_402128 spike protein mRNA gc mod (1-1273)(H69del_V70del_D614G)
aggagacccgugacccggaaguuguacggcuacgcgacuuucccucccacaaacccucgcgcccuuccuuuccuacuugggcccggcagaaagcuuaccauguucguguuucuggugcugcugccccugguguccagccagugugugaaccugaccaccagaacacagcugccuccagccuacaccaacagcuucaccagaggcguguacuaccccgacaagguguucagauccagcgugcugcacucuacccaggaccuguuccugccuuucuucagcaacgugaccugguuccacgccaucuccggcaccaauggcaccaagagauucgacaaccccgugcugcccuucaacgacgggguguacuuugccagcaccgagaaguccaacaucaucagaggcuggaucuucggcaccacacuggacagcaagacccagagccugcugaucgugaacaacgccaccaacguggucaucaaagugugcgaguuccaguucugcaacgaccccuuccugggcgucuacuaccacaagaacaacaagagcuggauggaaagcgaguuccggguguacagcagcgccaacaacugcaccuucgaguacgugucccagccuuuccugauggaccuggaaggcaagcagggcaacuucaagaaccugcgcgaguucguguucaagaacaucgacggcuacuucaaaaucuacagcaagcacaccccuaucaaccucgugcgggaucugccucagggcuucucugcucuggaaccccugguggaucugcccaucggcaucaacaucacccgguuucagacacugcuggcccugcacagaagcuaccugacaccuggcgauagcagcagcggauggacagcuggugccgccgcuuacuaugugggcuaccugcagccuagaaccuuccugcugaaguacaacgagaacggcaccaucaccgacgccguggauugugcucuggauccucugagcgagacaaagugcacccugaaguccuucaccguggaaaagggcaucuaccagaccagcaacuuccgggugcagcccaccgaauccaucgugcgguuccccaauaucaccaaucugugccccuucggcgagguguucaaugccaccagauucgccucuguguacgccuggaaccggaagcggaucagcaauugcguggccgacuacuccgugcuguacaacuccgccagcuucagcaccuucaagugcuacggcguguccccuaccaagcugaacgaccugugcuucacaaacguguacgccgacagcuucgugauccggggagaugaagugcggcagauugccccuggacagacaggcaagaucgccgacuacaacuacaagcugcccgacgacuucaccggcugugugauugccuggaacagcaacaaccuggacuccaaagucggcggcaacuacaauuaccuguaccggcuguuccggaaguccaaucugaagcccuucgagcgggacaucagcaccgaaaucuaucaggccggcagcaccccuugcaacggcguggaaggcuucaacugcuacuucccacugcaguccuacggcuuucagcccacaaauggcgugggcuaucagcccuacagagugguggugcugagcuucgaacugcugcaugcuccugccacagugugcggcccuaagaaaagcaccaaucucgugaagaacaaaugcgugaacuucaacuucaacggccugaccggcaccggcgugcugacagagagcaacaagaaguuccugccauuccagcaguuuggccgggauaucgccgauaccacagacgccguuagagauccccagacacuggaaauccuggacaucaccccaugcagcuucggcggagugucugugaucaccccuggcaccaacaccagcaaucagguggcagugcuguaccagggcgugaacuguaccgaagugcccguggccauucacgccgaucagcugacaccuacauggcggguguacuccaccggcagcaauguguuucagaccagagccggcugucugaucggagccgagcacgugaacaauagcuacgagugcgacauccccaucggcgcuggcaucugugccagcuaccagacacagacaaacagccccagacgggcuagaagcguggccagccagagcaucauugccuacacaaugucucugggcgccgagaacagcguggccuacuccaacaacucuaucgcuauccccaccaacuucaccaucagcgugaccaccgagauccugccuguguccaugaccaagaccagcguggacugcaccauguacaucugcggcgauuccaccgagugcuccaaccugcugcugcaguacggcagcuucugcacccagcugaauagagcccugacagggaucgccguggaacaggacaagaacacccaagagguguucgcccaagugaagcaaaucuacaagaccccuccuaucaaggacuucggcggcuucaauuucagccagauucugcccgauccuagcaagcccagcaagcggagcuucaucgaggaccugcuguucaacaaagugacacuggccgacgccggcuucaucaagcaguauggcgauugucugggcgacauugccgccagggaucugauuugcgcccagaaguuuaacggacugacagugcugccuccucugcugaccgaugagaugaucgcccaguacacaucugcccugcuggccggcacaaucacaagcggcuggacauuuggagcuggcgccgcucugcagauccccuuugcuaugcagauggccuaccgguucaacggcaucggagugacccagaaugugcuguacgagaaccagaagcugaucgccaaccaguucaacagcgccaucggcaagauccaggacagccugagcagcacagcaagcgcccugggaaagcugcaggacguggucaaccagaaugcccaggcacugaacacccuggucaagcagcuguccuccaacuucggcgccaucagcucugugcugaacgauauccugagcagacuggacaaggucgaggccgaggugcagaucgacagacugaucacaggcagacugcagagccuccagacauacgugacccagcagcugaucagagccgccgagauuagagccucugccaaucuggccgccaccaagaugucugagugugugcugggccagagcaagagaguggacuuuugcggcaagggcuaccaccugaugagcuucccucagucugccccucacggcgugguguuucugcacgugacauaugugcccgcucaagagaagaauuucaccaccgcuccagccaucugccacgacggcaaagcccacuuuccuagagaaggcguguucguguccaacggcacccauugguucgugacacagcggaacuucuacgagccccagaucaucaccaccgacaacaccuucgugucuggcaacugcgacguugugaucggcauugugaacaauaccguguacgacccucugcagcccgagcuggacagcuucaaagaggaacuggacaaguacuuuaagaaccacacaagccccgacguggaccugggcgauaucagcggaaucaaugccagcgucgugaacauccagaaagagaucgaccggcugaacgagguggccaagaaucugaacgagagccugaucgaccugcaagaacuggggaaguacgagcaguacaucaaguggcccugguacaucuggcugggcuuuaucgccggacugauugccaucgugauggucacaaucaugcuguguugcaugaccagcugcuguagcugccugaagggcuguuguagcuguggcagcugcugcaaguucgacgaggacgauucugagcccgugcugaagggcgugaaacugcacuacaccugaggacuaguguccaccugucccuccugggcugcuggauugucucguuuuccugccaaauaaacaggaucagcgcuuuacagaucucaaaggcucuuuucagagccaccaaaaaaaaaaaaaaaaaaaaaaaaaaaaaaaaaaaaaaaaaaaaaaaaaaaaaaaaaaaaaaaaaaaaaaaaaaaaaaaaaaaaaaaaaaaaaaaaaaaaa

SEQ ID NO: 23928 - RNA, 4129 nt, Artificial Sequence
  SARS-CoV-2/Wuhan/WIV05/2019__EPI_ISL_402128 spike protein mRNA gc mod (1-1273)(Y453F_D614G)
aggagacccgugacccggaaguuguacggcuacgcgacuuucccucccacaaacccucgcgcccuuccuuuccuacuugggcccggcagaaagcuuaccauguucguguuucuggugcugcugccccugguguccagccagugugugaaccugaccaccagaacacagcugccuccagccuacaccaacagcuucaccagaggcguguacuaccccgacaagguguucagauccagcgugcugcacucuacccaggaccuguuccugccuuucuucagcaacgugaccugguuccacgccauccacguguccggcaccaauggcaccaagagauucgacaaccccgugcugcccuucaacgacgggguguacuuugccagcaccgagaaguccaacaucaucagaggcuggaucuucggcaccacacuggacagcaagacccagagccugcugaucgugaacaacgccaccaacguggucaucaaagugugcgaguuccaguucugcaacgaccccuuccugggcgucuacuaccacaagaacaacaagagcuggauggaaagcgaguuccggguguacagcagcgccaacaacugcaccuucgaguacgugucccagccuuuccugauggaccuggaaggcaagcagggcaacuucaagaaccugcgcgaguucguguucaagaacaucgacggcuacuucaaaaucuacagcaagcacaccccuaucaaccucgugcgggaucugccucagggcuucucugcucuggaaccccugguggaucugcccaucggcaucaacaucacccgguuucagacacugcuggcccugcacagaagcuaccugacaccuggcgauagcagcagcggauggacagcuggugccgccgcuuacuaugugggcuaccugcagccuagaaccuuccugcugaaguacaacgagaacggcaccaucaccgacgccguggauugugcucuggauccucugagcgagacaaagugcacccugaaguccuucaccguggaaaagggcaucuaccagaccagcaacuuccgggugcagcccaccgaauccaucgugcgguuccccaauaucaccaaucugugccccuucggcgagguguucaaugccaccagauucgccucuguguacgccuggaaccggaagcggaucagcaauugcguggccgacuacuccgugcuguacaacuccgccagcuucagcaccuucaagugcuacggcguguccccuaccaagcugaacgaccugugcuucacaaacguguacgccgacagcuucgugauccggggagaugaagugcggcagauugccccuggacagacaggcaagaucgccgacuacaacuacaagcugcccgacgacuucaccggcugugugauugccuggaacagcaacaaccuggacuccaaagucggcggcaacuacaauuaccuguuccggcuguuccggaaguccaaucugaagcccuucgagcgggacaucagcaccgaaaucuaucaggccggcagcaccccuugcaacggcguggaaggcuucaacugcuacuucccacugcaguccuacggcuuucagcccacaaauggcgugggcuaucagcccuacagagugguggugcugagcuucgaacugcugcaugcuccugccacagugugcggcccuaagaaaagcaccaaucucgugaagaacaaaugcgugaacuucaacuucaacggccugaccggcaccggcgugcugacagagagcaacaagaaguuccugccauuccagcaguuuggccgggauaucgccgauaccacagacgccguuagagauccccagacacuggaaauccuggacaucaccccaugcagcuucggcggagugucugugaucaccccuggcaccaacaccagcaaucagguggcagugcuguaccagggcgugaacuguaccgaagugcccguggccauucacgccgaucagcugacaccuacauggcggguguacuccaccggcagcaauguguuucagaccagagccggcugucugaucggagccgagcacgugaacaauagcuacgagugcgacauccccaucggcgcuggcaucugugccagcuaccagacacagacaaacagccccagacgggcuagaagcguggccagccagagcaucauugccuacacaaugucucugggcgccgagaacagcguggccuacuccaacaacucuaucgcuauccccaccaacuucaccaucagcgugaccaccgagauccugccuguguccaugaccaagaccagcguggacugcaccauguacaucugcggcgauuccaccgagugcuccaaccugcugcugcaguacggcagcuucugcacccagcugaauagagcccugacagggaucgccguggaacaggacaagaacacccaagagguguucgcccaagugaagcaaaucuacaagaccccuccuaucaaggacuucggcggcuucaauuucagccagauucugcccgauccuagcaagcccagcaagcggagcuucaucgaggaccugcuguucaacaaagugacacuggccgacgccggcuucaucaagcaguauggcgauugucugggcgacauugccgccagggaucugauuugcgcccagaaguuuaacggacugacagugcugccuccucugcugaccgaugagaugaucgcccaguacacaucugcccugcuggccggcacaaucacaagcggcuggacauuuggagcuggcgccgcucugcagauccccuuugcuaugcagauggccuaccgguucaacggcaucggagugacccagaaugugcuguacgagaaccagaagcugaucgccaaccaguucaacagcgccaucggcaagauccaggacagccugagcagcacagcaagcgcccugggaaagcugcaggacguggucaaccagaaugcccaggcacugaacacccuggucaagcagcuguccuccaacuucggcgccaucagcucugugcugaacgauauccugagcagacuggacaaggucgaggccgaggugcagaucgacagacugaucacaggcagacugcagagccuccagacauacgugacccagcagcugaucagagccgccgagauuagagccucugccaaucuggccgccaccaagaugucugagugugugcugggccagagcaagagaguggacuuuugcggcaagggcuaccaccugaugagcuucccucagucugccccucacggcgugguguuucugcacgugacauaugugcccgcucaagagaagaauuucaccaccgcuccagccaucugccacgacggcaaagcccacuuuccuagagaaggcguguucguguccaacggcacccauugguucgugacacagcggaacuucuacgagccccagaucaucaccaccgacaacaccuucgugucuggcaacugcgacguugugaucggcauugugaacaauaccguguacgacccucugcagcccgagcuggacagcuucaaagaggaacuggacaaguacuuuaagaaccacacaagccccgacguggaccugggcgauaucagcggaaucaaugccagcgucgugaacauccagaaagagaucgaccggcugaacgagguggccaagaaucugaacgagagccugaucgaccugcaagaacuggggaaguacgagcaguacaucaaguggcccugguacaucuggcugggcuuuaucgccggacugauugccaucgugauggucacaaucaugcuguguugcaugaccagcugcuguagcugccugaagggcuguuguagcuguggcagcugcugcaaguucgacgaggacgauucugagcccgugcugaagggcgugaaacugcacuacaccugaggacuaguguccaccugucccuccugggcugcuggauugucucguuuuccugccaaauaaacaggaucagcgcuuuacagaucucaaaggcucuuuucagagccaccaaaaaaaaaaaaaaaaaaaaaaaaaaaaaaaaaaaaaaaaaaaaaaaaaaaaaaaaaaaaaaaaaaaaaaaaaaaaaaaaaaaaaaaaaaaaaaaaaaaaa

SEQ ID NO: 23929 - RNA, 4129 nt, Artificial Sequence
  SARS-CoV-2/Wuhan/WIV05/2019__EPI_ISL_402128 spike protein mRNA gc mod (1-1273)(D614G_I692V)
aggagacccgugacccggaaguuguacggcuacgcgacuuucccucccacaaacccucgcgcccuuccuuuccuacuugggcccggcagaaagcuuaccauguucguguuucuggugcugcugccccugguguccagccagugugugaaccugaccaccagaacacagcugccuccagccuacaccaacagcuucaccagaggcguguacuaccccgacaagguguucagauccagcgugcugcacucuacccaggaccuguuccugccuuucuucagcaacgugaccugguuccacgccauccacguguccggcaccaauggcaccaagagauucgacaaccccgugcugcccuucaacgacgggguguacuuugccagcaccgagaaguccaacaucaucagaggcuggaucuucggcaccacacuggacagcaagacccagagccugcugaucgugaacaacgccaccaacguggucaucaaagugugcgaguuccaguucugcaacgaccccuuccugggcgucuacuaccacaagaacaacaagagcuggauggaaagcgaguuccggguguacagcagcgccaacaacugcaccuucgaguacgugucccagccuuuccugauggaccuggaaggcaagcagggcaacuucaagaaccugcgcgaguucguguucaagaacaucgacggcuacuucaaaaucuacagcaagcacaccccuaucaaccucgugcgggaucugccucagggcuucucugcucuggaaccccugguggaucugcccaucggcaucaacaucacccgguuucagacacugcuggcccugcacagaagcuaccugacaccuggcgauagcagcagcggauggacagcuggugccgccgcuuacuaugugggcuaccugcagccuagaaccuuccugcugaaguacaacgagaacggcaccaucaccgacgccguggauugugcucuggauccucugagcgagacaaagugcacccugaaguccuucaccguggaaaagggcaucuaccagaccagcaacuuccgggugcagcccaccgaauccaucgugcgguuccccaauaucaccaaucugugccccuucggcgagguguucaaugccaccagauucgccucuguguacgccuggaaccggaagcggaucagcaauugcguggccgacuacuccgugcuguacaacuccgccagcuucagcaccuucaagugcuacggcguguccccuaccaagcugaacgaccugugcuucacaaacguguacgccgacagcuucgugauccggggagaugaagugcggcagauugccccuggacagacaggcaagaucgccgacuacaacuacaagcugcccgacgacuucaccggcugugugauugccuggaacagcaacaaccuggacuccaaagucggcggcaacuacaauuaccuguaccggcuguuccggaaguccaaucugaagcccuucgagcgggacaucagcaccgaaaucuaucaggccggcagcaccccuugcaacggcguggaaggcuucaacugcuacuucccacugcaguccuacggcuuucagcccacaaauggcgugggcuaucagcccuacagagugguggugcugagcuucgaacugcugcaugcuccugccacagugugcggcccuaagaaaagcaccaaucucgugaagaacaaaugcgugaacuucaacuucaacggccugaccggcaccggcgugcugacagagagcaacaagaaguuccugccauuccagcaguuuggccgggauaucgccgauaccacagacgccguuagagauccccagacacuggaaauccuggacaucaccccaugcagcuucggcggagugucugugaucaccccuggcaccaacaccagcaaucagguggcagugcuguaccagggcgugaacuguaccgaagugcccguggccauucacgccgaucagcugacaccuacauggcggguguacuccaccggcagcaauguguuucagaccagagccggcugucugaucggagccgagcacgugaacaauagcuacgagugcgacauccccaucggcgcuggcaucugugccagcuaccagacacagacaaacagccccagacgggcuagaagcguggccagccagagcgugauugccuacacaaugucucugggcgccgagaacagcguggccuacuccaacaacucuaucgcuauccccaccaacuucaccaucagcgugaccaccgagauccugccuguguccaugaccaagaccagcguggacugcaccauguacaucugcggcgauuccaccgagugcuccaaccugcugcugcaguacggcagcuucugcacccagcugaauagagcccugacagggaucgccguggaacaggacaagaacacccaagagguguucgcccaagugaagcaaaucuacaagaccccuccuaucaaggacuucggcggcuucaauuucagccagauucugcccgauccuagcaagcccagcaagcggagcuucaucgaggaccugcuguucaacaaagugacacuggccgacgccggcuucaucaagcaguauggcgauugucugggcgacauugccgccagggaucugauuugcgcccagaaguuuaacggacugacagugcugccuccucugcugaccgaugagaugaucgcccaguacacaucugcccugcuggccggcacaaucacaagcggcuggacauuuggagcuggcgccgcucugcagauccccuuugcuaugcagauggccuaccgguucaacggcaucggagugacccagaaugugcuguacgagaaccagaagcugaucgccaaccaguucaacagcgccaucggcaagauccaggacagccugagcagcacagcaagcgcccugggaaagcugcaggacguggucaaccagaaugcccaggcacugaacacccuggucaagcagcuguccuccaacuucggcgccaucagcucugugcugaacgauauccugagcagacuggacaaggucgaggccgaggugcagaucgacagacugaucacaggcagacugcagagccuccagacauacgugacccagcagcugaucagagccgccgagauuagagccucugccaaucuggccgccaccaagaugucugagugugugcugggccagagcaagagaguggacuuuugcggcaagggcuaccaccugaugagcuucccucagucugccccucacggcgugguguuucugcacgugacauaugugcccgcucaagagaagaauuucaccaccgcuccagccaucugccacgacggcaaagcccacuuuccuagagaaggcguguucguguccaacggcacccauugguucgugacacagcggaacuucuacgagccccagaucaucaccaccgacaacaccuucgugucuggcaacugcgacguugugaucggcauugugaacaauaccguguacgacccucugcagcccgagcuggacagcuucaaagaggaacuggacaaguacuuuaagaaccacacaagccccgacguggaccugggcgauaucagcggaaucaaugccagcgucgugaacauccagaaagagaucgaccggcugaacgagguggccaagaaucugaacgagagccugaucgaccugcaagaacuggggaaguacgagcaguacaucaaguggcccugguacaucuggcugggcuuuaucgccggacugauugccaucgugauggucacaaucaugcuguguugcaugaccagcugcuguagcugccugaagggcuguuguagcuguggcagcugcugcaaguucgacgaggacgauucugagcccgugcugaagggcgugaaacugcacuacaccugaggacuaguguccaccugucccuccugggcugcuggauugucucguuuuccugccaaauaaacaggaucagcgcuuuacagaucucaaaggcucuuuucagagccaccaaaaaaaaaaaaaaaaaaaaaaaaaaaaaaaaaaaaaaaaaaaaaaaaaaaaaaaaaaaaaaaaaaaaaaaaaaaaaaaaaaaaaaaaaaaaaaaaaaaaa

SEQ ID NO: 23930 - RNA, 4129 nt, Artificial Sequence
  SARS-CoV-2/Wuhan/WIV05/2019__EPI_ISL_402128 spike protein mRNA gc mod (1-1273)(D614G_M1229I)
aggagacccgugacccggaaguuguacggcuacgcgacuuucccucccacaaacccucgcgcccuuccuuuccuacuugggcccggcagaaagcuuaccauguucguguuucuggugcugcugccccugguguccagccagugugugaaccugaccaccagaacacagcugccuccagccuacaccaacagcuucaccagaggcguguacuaccccgacaagguguucagauccagcgugcugcacucuacccaggaccuguuccugccuuucuucagcaacgugaccugguuccacgccauccacguguccggcaccaauggcaccaagagauucgacaaccccgugcugcccuucaacgacgggguguacuuugccagcaccgagaaguccaacaucaucagaggcuggaucuucggcaccacacuggacagcaagacccagagccugcugaucgugaacaacgccaccaacguggucaucaaagugugcgaguuccaguucugcaacgaccccuuccugggcgucuacuaccacaagaacaacaagagcuggauggaaagcgaguuccggguguacagcagcgccaacaacugcaccuucgaguacgugucccagccuuuccugauggaccuggaaggcaagcagggcaacuucaagaaccugcgcgaguucguguucaagaacaucgacggcuacuucaaaaucuacagcaagcacaccccuaucaaccucgugcgggaucugccucagggcuucucugcucuggaaccccugguggaucugcccaucggcaucaacaucacccgguuucagacacugcuggcccugcacagaagcuaccugacaccuggcgauagcagcagcggauggacagcuggugccgccgcuuacuaugugggcuaccugcagccuagaaccuuccugcugaaguacaacgagaacggcaccaucaccgacgccguggauugugcucuggauccucugagcgagacaaagugcacccugaaguccuucaccguggaaaagggcaucuaccagaccagcaacuuccgggugcagcccaccgaauccaucgugcgguuccccaauaucaccaaucugugccccuucggcgagguguucaaugccaccagauucgccucuguguacgccuggaaccggaagcggaucagcaauugcguggccgacuacuccgugcuguacaacuccgccagcuucagcaccuucaagugcuacggcguguccccuaccaagcugaacgaccugugcuucacaaacguguacgccgacagcuucgugauccggggagaugaagugcggcagauugccccuggacagacaggcaagaucgccgacuacaacuacaagcugcccgacgacuucaccggcugugugauugccuggaacagcaacaaccuggacuccaaagucggcggcaacuacaauuaccuguaccggcuguuccggaaguccaaucugaagcccuucgagcgggacaucagcaccgaaaucuaucaggccggcagcaccccuugcaacggcguggaaggcuucaacugcuacuucccacugcaguccuacggcuuucagcccacaaauggcgugggcuaucagcccuacagagugguggugcugagcuucgaacugcugcaugcuccugccacagugugcggcccuaagaaaagcaccaaucucgugaagaacaaaugcgugaacuucaacuucaacggccugaccggcaccggcgugcugacagagagcaacaagaaguuccugccauuccagcaguuuggccgggauaucgccgauaccacagacgccguuagagauccccagacacuggaaauccuggacaucaccccaugcagcuucggcggagugucugugaucaccccuggcaccaacaccagcaaucagguggcagugcuguaccagggcgugaacuguaccgaagugcccguggccauucacgccgaucagcugacaccuacauggcggguguacuccaccggcagcaauguguuucagaccagagccggcugucugaucggagccgagcacgugaacaauagcuacgagugcgacauccccaucggcgcuggcaucugugccagcuaccagacacagacaaacagccccagacgggcuagaagcguggccagccagagcaucauugccuacacaaugucucugggcgccgagaacagcguggccuacuccaacaacucuaucgcuauccccaccaacuucaccaucagcgugaccaccgagauccugccuguguccaugaccaagaccagcguggacugcaccauguacaucugcggcgauuccaccgagugcuccaaccugcugcugcaguacggcagcuucugcacccagcugaauagagcccugacagggaucgccguggaacaggacaagaacacccaagagguguucgcccaagugaagcaaaucuacaagaccccuccuaucaaggacuucggcggcuucaauuucagccagauucugcccgauccuagcaagcccagcaagcggagcuucaucgaggaccugcuguucaacaaagugacacuggccgacgccggcuucaucaagcaguauggcgauugucugggcgacauugccgccagggaucugauuugcgcccagaaguuuaacggacugacagugcugccuccucugcugaccgaugagaugaucgcccaguacacaucugcccugcuggccggcacaaucacaagcggcuggacauuuggagcuggcgccgcucugcagauccccuuugcuaugcagauggccuaccgguucaacggcaucggagugacccagaaugugcuguacgagaaccagaagcugaucgccaaccaguucaacagcgccaucggcaagauccaggacagccugagcagcacagcaagcgcccugggaaagcugcaggacguggucaaccagaaugcccaggcacugaacacccuggucaagcagcuguccuccaacuucggcgccaucagcucugugcugaacgauauccugagcagacuggacaaggucgaggccgaggugcagaucgacagacugaucacaggcagacugcagagccuccagacauacgugacccagcagcugaucagagccgccgagauuagagccucugccaaucuggccgccaccaagaugucugagugugugcugggccagagcaagagaguggacuuuugcggcaagggcuaccaccugaugagcuucccucagucugccccucacggcgugguguuucugcacgugacauaugugcccgcucaagagaagaauuucaccaccgcuccagccaucugccacgacggcaaagcccacuuuccuagagaaggcguguucguguccaacggcacccauugguucgugacacagcggaacuucuacgagccccagaucaucaccaccgacaacaccuucgugucuggcaacugcgacguugugaucggcauugugaacaauaccguguacgacccucugcagcccgagcuggacagcuucaaagaggaacuggacaaguacuuuaagaaccacacaagccccgacguggaccugggcgauaucagcggaaucaaugccagcgucgugaacauccagaaagagaucgaccggcugaacgagguggccaagaaucugaacgagagccugaucgaccugcaagaacuggggaaguacgagcaguacaucaaguggcccugguacaucuggcugggcuuuaucgccggacugauugccaucgugaucgucacaaucaugcuguguugcaugaccagcugcuguagcugccugaagggcuguuguagcuguggcagcugcugcaaguucgacgaggacgauucugagcccgugcugaagggcgugaaacugcacuacaccugaggacuaguguccaccugucccuccugggcugcuggauugucucguuuuccugccaaauaaacaggaucagcgcuuuacagaucucaaaggcucuuuucagagccaccaaaaaaaaaaaaaaaaaaaaaaaaaaaaaaaaaaaaaaaaaaaaaaaaaaaaaaaaaaaaaaaaaaaaaaaaaaaaaaaaaaaaaaaaaaaaaaaaaaaaa

SEQ ID NO: 23931 - RNA, 4123 nt, Artificial Sequence
  SARS-CoV-2/Wuhan/WIV05/2019__EPI_ISL_402128 spike protein mRNA gc mod (1-1273)(H69del_V70del_A222V_Y453F_S477N_D614G_I692V)
aggagacccgugacccggaaguuguacggcuacgcgacuuucccucccacaaacccucgcgcccuuccuuuccuacuugggcccggcagaaagcuuaccauguucguguuucuggugcugcugccccugguguccagccagugugugaaccugaccaccagaacacagcugccuccagccuacaccaacagcuucaccagaggcguguacuaccccgacaagguguucagauccagcgugcugcacucuacccaggaccuguuccugccuuucuucagcaacgugaccugguuccacgccaucuccggcaccaauggcaccaagagauucgacaaccccgugcugcccuucaacgacgggguguacuuugccagcaccgagaaguccaacaucaucagaggcuggaucuucggcaccacacuggacagcaagacccagagccugcugaucgugaacaacgccaccaacguggucaucaaagugugcgaguuccaguucugcaacgaccccuuccugggcgucuacuaccacaagaacaacaagagcuggauggaaagcgaguuccggguguacagcagcgccaacaacugcaccuucgaguacgugucccagccuuuccugauggaccuggaaggcaagcagggcaacuucaagaaccugcgcgaguucguguucaagaacaucgacggcuacuucaaaaucuacagcaagcacaccccuaucaaccucgugcgggaucugccucagggcuucucugugcuggaaccccugguggaucugcccaucggcaucaacaucacccgguuucagacacugcuggcccugcacagaagcuaccugacaccuggcgauagcagcagcggauggacagcuggugccgccgcuuacuaugugggcuaccugcagccuagaaccuuccugcugaaguacaacgagaacggcaccaucaccgacgccguggauugugcucuggauccucugagcgagacaaagugcacccugaaguccuucaccguggaaaagggcaucuaccagaccagcaacuuccgggugcagcccaccgaauccaucgugcgguuccccaauaucaccaaucugugccccuucggcgagguguucaaugccaccagauucgccucuguguacgccuggaaccggaagcggaucagcaauugcguggccgacuacuccgugcuguacaacuccgccagcuucagcaccuucaagugcuacggcguguccccuaccaagcugaacgaccugugcuucacaaacguguacgccgacagcuucgugauccggggagaugaagugcggcagauugccccuggacagacaggcaagaucgccgacuacaacuacaagcugcccgacgacuucaccggcugugugauugccuggaacagcaacaaccuggacuccaaagucggcggcaacuacaauuaccuguuccggcuguuccggaaguccaaucugaagcccuucgagcgggacaucagcaccgaaaucuaucaggccggcaacaccccuugcaacggcguggaaggcuucaacugcuacuucccacugcaguccuacggcuuucagcccacaaauggcgugggcuaucagcccuacagagugguggugcugagcuucgaacugcugcaugcuccugccacagugugcggcccuaagaaaagcaccaaucucgugaagaacaaaugcgugaacuucaacuucaacggccugaccggcaccggcgugcugacagagagcaacaagaaguuccugccauuccagcaguuuggccgggauaucgccgauaccacagacgccguuagagauccccagacacuggaaauccuggacaucaccccaugcagcuucggcggagugucugugaucaccccuggcaccaacaccagcaaucagguggcagugcuguaccagggcgugaacuguaccgaagugcccguggccauucacgccgaucagcugacaccuacauggcggguguacuccaccggcagcaauguguuucagaccagagccggcugucugaucggagccgagcacgugaacaauagcuacgagugcgacauccccaucggcgcuggcaucugugccagcuaccagacacagacaaacagccccagacgggcuagaagcguggccagccagagcgugauugccuacacaaugucucugggcgccgagaacagcguggccuacuccaacaacucuaucgcuauccccaccaacuucaccaucagcgugaccaccgagauccugccuguguccaugaccaagaccagcguggacugcaccauguacaucugcggcgauuccaccgagugcuccaaccugcugcugcaguacggcagcuucugcacccagcugaauagagcccugacagggaucgccguggaacaggacaagaacacccaagagguguucgcccaagugaagcaaaucuacaagaccccuccuaucaaggacuucggcggcuucaauuucagccagauucugcccgauccuagcaagcccagcaagcggagcuucaucgaggaccugcuguucaacaaagugacacuggccgacgccggcuucaucaagcaguauggcgauugucugggcgacauugccgccagggaucugauuugcgcccagaaguuuaacggacugacagugcugccuccucugcugaccgaugagaugaucgcccaguacacaucugcccugcuggccggcacaaucacaagcggcuggacauuuggagcuggcgccgcucugcagauccccuuugcuaugcagauggccuaccgguucaacggcaucggagugacccagaaugugcuguacgagaaccagaagcugaucgccaaccaguucaacagcgccaucggcaagauccaggacagccugagcagcacagcaagcgcccugggaaagcugcaggacguggucaaccagaaugcccaggcacugaacacccuggucaagcagcuguccuccaacuucggcgccaucagcucugugcugaacgauauccugagcagacuggacaaggucgaggccgaggugcagaucgacagacugaucacaggcagacugcagagccuccagacauacgugacccagcagcugaucagagccgccgagauuagagccucugccaaucuggccgccaccaagaugucugagugugugcugggccagagcaagagaguggacuuuugcggcaagggcuaccaccugaugagcuucccucagucugccccucacggcgugguguuucugcacgugacauaugugcccgcucaagagaagaauuucaccaccgcuccagccaucugccacgacggcaaagcccacuuuccuagagaaggcguguucguguccaacggcacccauugguucgugacacagcggaacuucuacgagccccagaucaucaccaccgacaacaccuucgugucuggcaacugcgacguugugaucggcauugugaacaauaccguguacgacccucugcagcccgagcuggacagcuucaaagaggaacuggacaaguacuuuaagaaccacacaagccccgacguggaccugggcgauaucagcggaaucaaugccagcgucgugaacauccagaaagagaucgaccggcugaacgagguggccaagaaucugaacgagagccugaucgaccugcaagaacuggggaaguacgagcaguacaucaaguggcccugguacaucuggcugggcuuuaucgccggacugauugccaucgugauggucacaaucaugcuguguugcaugaccagcugcuguagcugccugaagggcuguuguagcuguggcagcugcugcaaguucgacgaggacgauucugagcccgugcugaagggcgugaaacugcacuacaccugaggacuaguguccaccugucccuccugggcugcuggauugucucguuuuccugccaaauaaacaggaucagcgcuuuacagaucucaaaggcucuuuucagagccaccaaaaaaaaaaaaaaaaaaaaaaaaaaaaaaaaaaaaaaaaaaaaaaaaaaaaaaaaaaaaaaaaaaaaaaaaaaaaaaaaaaaaaaaaaaaaaaaaaaaaa

SEQ ID NO: 23932 - RNA, 4123 nt, Artificial Sequence
  SARS-CoV-2/Wuhan/WIV05/2019__EPI_ISL_402128 spike protein mRNA gc mod (1-1273)(H69del_V70del_Y453F_D614G_I692V_M1229I)
aggagacccgugacccggaaguuguacggcuacgcgacuuucccucccacaaacccucgcgcccuuccuuuccuacuugggcccggcagaaagcuuaccauguucguguuucuggugcugcugccccugguguccagccagugugugaaccugaccaccagaacacagcugccuccagccuacaccaacagcuucaccagaggcguguacuaccccgacaagguguucagauccagcgugcugcacucuacccaggaccuguuccugccuuucuucagcaacgugaccugguuccacgccaucuccggcaccaauggcaccaagagauucgacaaccccgugcugcccuucaacgacgggguguacuuugccagcaccgagaaguccaacaucaucagaggcuggaucuucggcaccacacuggacagcaagacccagagccugcugaucgugaacaacgccaccaacguggucaucaaagugugcgaguuccaguucugcaacgaccccuuccugggcgucuacuaccacaagaacaacaagagcuggauggaaagcgaguuccggguguacagcagcgccaacaacugcaccuucgaguacgugucccagccuuuccugauggaccuggaaggcaagcagggcaacuucaagaaccugcgcgaguucguguucaagaacaucgacggcuacuucaaaaucuacagcaagcacaccccuaucaaccucgugcgggaucugccucagggcuucucugcucuggaaccccugguggaucugcccaucggcaucaacaucacccgguuucagacacugcuggcccugcacagaagcuaccugacaccuggcgauagcagcagcggauggacagcuggugccgccgcuuacuaugugggcuaccugcagccuagaaccuuccugcugaaguacaacgagaacggcaccaucaccgacgccguggauugugcucuggauccucugagcgagacaaagugcacccugaaguccuucaccguggaaaagggcaucuaccagaccagcaacuuccgggugcagcccaccgaauccaucgugcgguuccccaauaucaccaaucugugccccuucggcgagguguucaaugccaccagauucgccucuguguacgccuggaaccggaagcggaucagcaauugcguggccgacuacuccgugcuguacaacuccgccagcuucagcaccuucaagugcuacggcguguccccuaccaagcugaacgaccugugcuucacaaacguguacgccgacagcuucgugauccggggagaugaagugcggcagauugccccuggacagacaggcaagaucgccgacuacaacuacaagcugcccgacgacuucaccggcugugugauugccuggaacagcaacaaccuggacuccaaagucggcggcaacuacaauuaccuguuccggcuguuccggaaguccaaucugaagcccuucgagcgggacaucagcaccgaaaucuaucaggccggcagcaccccuugcaacggcguggaaggcuucaacugcuacuucccacugcaguccuacggcuuucagcccacaaauggcgugggcuaucagcccuacagagugguggugcugagcuucgaacugcugcaugcuccugccacagugugcggcccuaagaaaagcaccaaucucgugaagaacaaaugcgugaacuucaacuucaacggccugaccggcaccggcgugcugacagagagcaacaagaaguuccugccauuccagcaguuuggccgggauaucgccgauaccacagacgccguuagagauccccagacacuggaaauccuggacaucaccccaugcagcuucggcggagugucugugaucaccccuggcaccaacaccagcaaucagguggcagugcuguaccagggcgugaacuguaccgaagugcccguggccauucacgccgaucagcugacaccuacauggcggguguacuccaccggcagcaauguguuucagaccagagccggcugucugaucggagccgagcacgugaacaauagcuacgagugcgacauccccaucggcgcuggcaucugugccagcuaccagacacagacaaacagccccagacgggcuagaagcguggccagccagagcgugauugccuacacaaugucucugggcgccgagaacagcguggccuacuccaacaacucuaucgcuauccccaccaacuucaccaucagcgugaccaccgagauccugccuguguccaugaccaagaccagcguggacugcaccauguacaucugcggcgauuccaccgagugcuccaaccugcugcugcaguacggcagcuucugcacccagcugaauagagcccugacagggaucgccguggaacaggacaagaacacccaagagguguucgcccaagugaagcaaaucuacaagaccccuccuaucaaggacuucggcggcuucaauuucagccagauucugcccgauccuagcaagcccagcaagcggagcuucaucgaggaccugcuguucaacaaagugacacuggccgacgccggcuucaucaagcaguauggcgauugucugggcgacauugccgccagggaucugauuugcgcccagaaguuuaacggacugacagugcugccuccucugcugaccgaugagaugaucgcccaguacacaucugcccugcuggccggcacaaucacaagcggcuggacauuuggagcuggcgccgcucugcagauccccuuugcuaugcagauggccuaccgguucaacggcaucggagugacccagaaugugcuguacgagaaccagaagcugaucgccaaccaguucaacagcgccaucggcaagauccaggacagccugagcagcacagcaagcgcccugggaaagcugcaggacguggucaaccagaaugcccaggcacugaacacccuggucaagcagcuguccuccaacuucggcgccaucagcucugugcugaacgauauccugagcagacuggacaaggucgaggccgaggugcagaucgacagacugaucacaggcagacugcagagccuccagacauacgugacccagcagcugaucagagccgccgagauuagagccucugccaaucuggccgccaccaagaugucugagugugugcugggccagagcaagagaguggacuuuugcggcaagggcuaccaccugaugagcuucccucagucugccccucacggcgugguguuucugcacgugacauaugugcccgcucaagagaagaauuucaccaccgcuccagccaucugccacgacggcaaagcccacuuuccuagagaaggcguguucguguccaacggcacccauugguucgugacacagcggaacuucuacgagccccagaucaucaccaccgacaacaccuucgugucuggcaacugcgacguugugaucggcauugugaacaauaccguguacgacccucugcagcccgagcuggacagcuucaaagaggaacuggacaaguacuuuaagaaccacacaagccccgacguggaccugggcgauaucagcggaaucaaugccagcgucgugaacauccagaaagagaucgaccggcugaacgagguggccaagaaucugaacgagagccugaucgaccugcaagaacuggggaaguacgagcaguacaucaaguggcccugguacaucuggcugggcuuuaucgccggacugauugccaucgugaucgucacaaucaugcuguguugcaugaccagcugcuguagcugccugaagggcuguuguagcuguggcagcugcugcaaguucgacgaggacgauucugagcccgugcugaagggcgugaaacugcacuacaccugaggacuaguguccaccugucccuccugggcugcuggauugucucguuuuccugccaaauaaacaggaucagcgcuuuacagaucucaaaggcucuuuucagagccaccaaaaaaaaaaaaaaaaaaaaaaaaaaaaaaaaaaaaaaaaaaaaaaaaaaaaaaaaaaaaaaaaaaaaaaaaaaaaaaaaaaaaaaaaaaaaaaaaaaaaa

SEQ ID NO: 23933 - RNA, 4120 nt, Artificial Sequence
  SARS-CoV-2/Wuhan/WIV05/2019__EPI_ISL_402128 spike protein mRNA gc mod (1-1273)(H69del_V70del_Y144del_N501Y_A570D_D614G_P681H_T716I_S982 A_D1118H)
aggagacccgugacccggaaguuguacggcuacgcgacuuucccucccacaaacccucgcgcccuuccuuuccuacuugggcccggcagaaagcuuaccauguucguguuucuggugcugcugccccugguguccagccagugugugaaccugaccaccagaacacagcugccuccagccuacaccaacagcuucaccagaggcguguacuaccccgacaagguguucagauccagcgugcugcacucuacccaggaccuguuccugccuuucuucagcaacgugaccugguuccacgccaucuccggcaccaauggcaccaagagauucgacaaccccgugcugcccuucaacgacgggguguacuuugccagcaccgagaaguccaacaucaucagaggcuggaucuucggcaccacacuggacagcaagacccagagccugcugaucgugaacaacgccaccaacguggucaucaaagugugcgaguuccaguucugcaacgaccccuuccugggcgucuaccacaagaacaacaagagcuggauggaaagcgaguuccggguguacagcagcgccaacaacugcaccuucgaguacgugucccagccuuuccugauggaccuggaaggcaagcagggcaacuucaagaaccugcgcgaguucguguucaagaacaucgacggcuacuucaaaaucuacagcaagcacaccccuaucaaccucgugcgggaucugccucagggcuucucugcucuggaaccccugguggaucugcccaucggcaucaacaucacccgguuucagacacugcuggcccugcacagaagcuaccugacaccuggcgauagcagcagcggauggacagcuggugccgccgcuuacuaugugggcuaccugcagccuagaaccuuccugcugaaguacaacgagaacggcaccaucaccgacgccguggauugugcucuggauccucugagcgagacaaagugcacccugaaguccuucaccguggaaaagggcaucuaccagaccagcaacuuccgggugcagcccaccgaauccaucgugcgguuccccaauaucaccaaucugugccccuucggcgagguguucaaugccaccagauucgccucuguguacgccuggaaccggaagcggaucagcaauugcguggccgacuacuccgugcuguacaacuccgccagcuucagcaccuucaagugcuacggcguguccccuaccaagcugaacgaccugugcuucacaaacguguacgccgacagcuucgugauccggggagaugaagugcggcagauugccccuggacagacaggcaagaucgccgacuacaacuacaagcugcccgacgacuucaccggcugugugauugccuggaacagcaacaaccuggacuccaaagucggcggcaacuacaauuaccuguaccggcuguuccggaaguccaaucugaagcccuucgagcgggacaucagcaccgaaaucuaucaggccggcagcaccccuugcaacggcguggaaggcuucaacugcuacuucccacugcaguccuacggcuuucagcccacauacggcgugggcuaucagcccuacagagugguggugcugagcuucgaacugcugcaugcuccugccacagugugcggcccuaagaaaagcaccaaucucgugaagaacaaaugcgugaacuucaacuucaacggccugaccggcaccggcgugcugacagagagcaacaagaaguuccugccauuccagcaguuuggccgggauaucgacgauaccacagacgccguuagagauccccagacacuggaaauccuggacaucaccccaugcagcuucggcggagugucugugaucaccccuggcaccaacaccagcaaucagguggcagugcuguaccagggcgugaacuguaccgaagugcccguggccauucacgccgaucagcugacaccuacauggcggguguacuccaccggcagcaauguguuucagaccagagccggcugucugaucggagccgagcacgugaacaauagcuacgagugcgacauccccaucggcgcuggcaucugugccagcuaccagacacagacaaacagccacagacgggcuagaagcguggccagccagagcaucauugccuacacaaugucucugggcgccgagaacagcguggccuacuccaacaacucuaucgcuauccccaucaacuucaccaucagcgugaccaccgagauccugccuguguccaugaccaagaccagcguggacugcaccauguacaucugcggcgauuccaccgagugcuccaaccugcugcugcaguacggcagcuucugcacccagcugaauagagcccugacagggaucgccguggaacaggacaagaacacccaagagguguucgcccaagugaagcaaaucuacaagaccccuccuaucaaggacuucggcggcuucaauuucagccagauucugcccgauccuagcaagcccagcaagcggagcuucaucgaggaccugcuguucaacaaagugacacuggccgacgccggcuucaucaagcaguauggcgauugucugggcgacauugccgccagggaucugauuugcgcccagaaguuuaacggacugacagugcugccuccucugcugaccgaugagaugaucgcccaguacacaucugcccugcuggccggcacaaucacaagcggcuggacauuuggagcuggcgccgcucugcagauccccuuugcuaugcagauggccuaccgguucaacggcaucggagugacccagaaugugcuguacgagaaccagaagcugaucgccaaccaguucaacagcgccaucggcaagauccaggacagccugagcagcacagcaagcgcccugggaaagcugcaggacguggucaaccagaaugcccaggcacugaacacccuggucaagcagcuguccuccaacuucggcgccaucagcucugugcugaacgauauccuggccagacuggacaaggucgaggccgaggugcagaucgacagacugaucacaggcagacugcagagccuccagacauacgugacccagcagcugaucagagccgccgagauuagagccucugccaaucuggccgccaccaagaugucugagugugugcugggccagagcaagagaguggacuuuugcggcaagggcuaccaccugaugagcuucccucagucugccccucacggcgugguguuucugcacgugacauaugugcccgcucaagagaagaauuucaccaccgcuccagccaucugccacgacggcaaagcccacuuuccuagagaaggcguguucguguccaacggcacccauugguucgugacacagcggaacuucuacgagccccagaucaucaccacccacaacaccuucgugucuggcaacugcgacguugugaucggcauugugaacaauaccguguacgacccucugcagcccgagcuggacagcuucaaagaggaacuggacaaguacuuuaagaaccacacaagccccgacguggaccugggcgauaucagcggaaucaaugccagcgucgugaacauccagaaagagaucgaccggcugaacgagguggccaagaaucugaacgagagccugaucgaccugcaagaacuggggaaguacgagcaguacaucaaguggcccugguacaucuggcugggcuuuaucgccggacugauugccaucgugauggucacaaucaugcuguguugcaugaccagcugcuguagcugccugaagggcuguuguagcuguggcagcugcugcaaguucgacgaggacgauucugagcccgugcugaagggcgugaaacugcacuacaccugaggacuaguguccaccugucccuccugggcugcuggauugucucguuuuccugccaaauaaacaggaucagcgcuuuacagaucucaaaggcucuuuucagagccaccaaaaaaaaaaaaaaaaaaaaaaaaaaaaaaaaaaaaaaaaaaaaaaaaaaaaaaaaaaaaaaaaaaaaaaaaaaaaaaaaaaaaaaaaaaaaaaaaaaaaa

SEQ ID NO: 23934 - RNA, 4129 nt, Artificial Sequence
  SARS-CoV-2/Wuhan/WIV05/2019__EPI_ISL_402128 spike protein mRNA gc mod (1-1273)(K417N_E484K_N501Y_D614G)
aggagacccgugacccggaaguuguacggcuacgcgacuuucccucccacaaacccucgcgcccuuccuuuccuacuugggcccggcagaaagcuuaccauguucguguuucuggugcugcugccccugguguccagccagugugugaaccugaccaccagaacacagcugccuccagccuacaccaacagcuucaccagaggcguguacuaccccgacaagguguucagauccagcgugcugcacucuacccaggaccuguuccugccuuucuucagcaacgugaccugguuccacgccauccacguguccggcaccaauggcaccaagagauucgacaaccccgugcugcccuucaacgacgggguguacuuugccagcaccgagaaguccaacaucaucagaggcuggaucuucggcaccacacuggacagcaagacccagagccugcugaucgugaacaacgccaccaacguggucaucaaagugugcgaguuccaguucugcaacgaccccuuccugggcgucuacuaccacaagaacaacaagagcuggauggaaagcgaguuccggguguacagcagcgccaacaacugcaccuucgaguacgugucccagccuuuccugauggaccuggaaggcaagcagggcaacuucaagaaccugcgcgaguucguguucaagaacaucgacggcuacuucaaaaucuacagcaagcacaccccuaucaaccucgugcgggaucugccucagggcuucucugcucuggaaccccugguggaucugcccaucggcaucaacaucacccgguuucagacacugcuggcccugcacagaagcuaccugacaccuggcgauagcagcagcggauggacagcuggugccgccgcuuacuaugugggcuaccugcagccuagaaccuuccugcugaaguacaacgagaacggcaccaucaccgacgccguggauugugcucuggauccucugagcgagacaaagugcacccugaaguccuucaccguggaaaagggcaucuaccagaccagcaacuuccgggugcagcccaccgaauccaucgugcgguuccccaauaucaccaaucugugccccuucggcgagguguucaaugccaccagauucgccucuguguacgccuggaaccggaagcggaucagcaauugcguggccgacuacuccgugcuguacaacuccgccagcuucagcaccuucaagugcuacggcguguccccuaccaagcugaacgaccugugcuucacaaacguguacgccgacagcuucgugauccggggagaugaagugcggcagauugccccuggacagacaggcaacaucgccgacuacaacuacaagcugcccgacgacuucaccggcugugugauugccuggaacagcaacaaccuggacuccaaagucggcggcaacuacaauuaccuguaccggcuguuccggaaguccaaucugaagcccuucgagcgggacaucagcaccgaaaucuaucaggccggcagcaccccuugcaacggcgugaagggcuucaacugcuacuucccacugcaguccuacggcuuucagcccacauacggcgugggcuaucagcccuacagagugguggugcugagcuucgaacugcugcaugcuccugccacagugugcggcccuaagaaaagcaccaaucucgugaagaacaaaugcgugaacuucaacuucaacggccugaccggcaccggcgugcugacagagagcaacaagaaguuccugccauuccagcaguuuggccgggauaucgccgauaccacagacgccguuagagauccccagacacuggaaauccuggacaucaccccaugcagcuucggcggagugucugugaucaccccuggcaccaacaccagcaaucagguggcagugcuguaccagggcgugaacuguaccgaagugcccguggccauucacgccgaucagcugacaccuacauggcggguguacuccaccggcagcaauguguuucagaccagagccggcugucugaucggagccgagcacgugaacaauagcuacgagugcgacauccccaucggcgcuggcaucugugccagcuaccagacacagacaaacagccccagacgggcuagaagcguggccagccagagcaucauugccuacacaaugucucugggcgccgagaacagcguggccuacuccaacaacucuaucgcuauccccaccaacuucaccaucagcgugaccaccgagauccugccuguguccaugaccaagaccagcguggacugcaccauguacaucugcggcgauuccaccgagugcuccaaccugcugcugcaguacggcagcuucugcacccagcugaauagagcccugacagggaucgccguggaacaggacaagaacacccaagagguguucgcccaagugaagcaaaucuacaagaccccuccuaucaaggacuucggcggcuucaauuucagccagauucugcccgauccuagcaagcccagcaagcggagcuucaucgaggaccugcuguucaacaaagugacacuggccgacgccggcuucaucaagcaguauggcgauugucugggcgacauugccgccagggaucugauuugcgcccagaaguuuaacggacugacagugcugccuccucugcugaccgaugagaugaucgcccaguacacaucugcccugcuggccggcacaaucacaagcggcuggacauuuggagcuggcgccgcucugcagauccccuuugcuaugcagauggccuaccgguucaacggcaucggagugacccagaaugugcuguacgagaaccagaagcugaucgccaaccaguucaacagcgccaucggcaagauccaggacagccugagcagcacagcaagcgcccugggaaagcugcaggacguggucaaccagaaugcccaggcacugaacacccuggucaagcagcuguccuccaacuucggcgccaucagcucugugcugaacgauauccugagcagacuggacaaggucgaggccgaggugcagaucgacagacugaucacaggcagacugcagagccuccagacauacgugacccagcagcugaucagagccgccgagauuagagccucugccaaucuggccgccaccaagaugucugagugugugcugggccagagcaagagaguggacuuuugcggcaagggcuaccaccugaugagcuucccucagucugccccucacggcgugguguuucugcacgugacauaugugcccgcucaagagaagaauuucaccaccgcuccagccaucugccacgacggcaaagcccacuuuccuagagaaggcguguucguguccaacggcacccauugguucgugacacagcggaacuucuacgagccccagaucaucaccaccgacaacaccuucgugucuggcaacugcgacguugugaucggcauugugaacaauaccguguacgacccucugcagcccgagcuggacagcuucaaagaggaacuggacaaguacuuuaagaaccacacaagccccgacguggaccugggcgauaucagcggaaucaaugccagcgucgugaacauccagaaagagaucgaccggcugaacgagguggccaagaaucugaacgagagccugaucgaccugcaagaacuggggaaguacgagcaguacaucaaguggcccugguacaucuggcugggcuuuaucgccggacugauugccaucgugauggucacaaucaugcuguguugcaugaccagcugcuguagcugccugaagggcuguuguagcuguggcagcugcugcaaguucgacgaggacgauucugagcccgugcugaagggcgugaaacugcacuacaccugaggacuaguguccaccugucccuccugggcugcuggauugucucguuuuccugccaaauaaacaggaucagcgcuuuacagaucucaaaggcucuuuucagagccaccaaaaaaaaaaaaaaaaaaaaaaaaaaaaaaaaaaaaaaaaaaaaaaaaaaaaaaaaaaaaaaaaaaaaaaaaaaaaaaaaaaaaaaaaaaaaaaaaaaaaa

SEQ ID NO: 23935 - RNA, 4120 nt, Artificial Sequence
  SARS-CoV-2/Wuhan/WIV05/2019__EPI_ISL_402128 spike protein mRNA gc mod (1-1273)(L18F_D80A_D215G_L242del_A243del_L244del_R246I_K417N_E484 K_N501Y_D614G_A701V)
aggagacccgugacccggaaguuguacggcuacgcgacuuucccucccacaaacccucgcgcccuuccuuuccuacuugggcccggcagaaagcuuaccauguucguguuucuggugcugcugccccugguguccagccagugugugaacuucaccaccagaacacagcugccuccagccuacaccaacagcuucaccagaggcguguacuaccccgacaagguguucagauccagcgugcugcacucuacccaggaccuguuccugccuuucuucagcaacgugaccugguuccacgccauccacguguccggcaccaauggcaccaagagauucgccaaccccgugcugcccuucaacgacgggguguacuuugccagcaccgagaaguccaacaucaucagaggcuggaucuucggcaccacacuggacagcaagacccagagccugcugaucgugaacaacgccaccaacguggucaucaaagugugcgaguuccaguucugcaacgaccccuuccugggcgucuacuaccacaagaacaacaagagcuggauggaaagcgaguuccggguguacagcagcgccaacaacugcaccuucgaguacgugucccagccuuuccugauggaccuggaaggcaagcagggcaacuucaagaaccugcgcgaguucguguucaagaacaucgacggcuacuucaaaaucuacagcaagcacaccccuaucaaccucgugcggggccugccucagggcuucucugcucuggaaccccugguggaucugcccaucggcaucaacaucacccgguuucagacacugcacaucagcuaccugacaccuggcgauagcagcagcggauggacagcuggugccgccgcuuacuaugugggcuaccugcagccuagaaccuuccugcugaaguacaacgagaacggcaccaucaccgacgccguggauugugcucuggauccucugagcgagacaaagugcacccugaaguccuucaccguggaaaagggcaucuaccagaccagcaacuuccgggugcagcccaccgaauccaucgugcgguuccccaauaucaccaaucugugccccuucggcgagguguucaaugccaccagauucgccucuguguacgccuggaaccggaagcggaucagcaauugcguggccgacuacuccgugcuguacaacuccgccagcuucagcaccuucaagugcuacggcguguccccuaccaagcugaacgaccugugcuucacaaacguguacgccgacagcuucgugauccggggagaugaagugcggcagauugccccuggacagacaggcaacaucgccgacuacaacuacaagcugcccgacgacuucaccggcugugugauugccuggaacagcaacaaccuggacuccaaagucggcggcaacuacaauuaccuguaccggcuguuccggaaguccaaucugaagcccuucgagcgggacaucagcaccgaaaucuaucaggccggcagcaccccuugcaacggcgugaagggcuucaacugcuacuucccacugcaguccuacggcuuucagcccacauacggcgugggcuaucagcccuacagagugguggugcugagcuucgaacugcugcaugcuccugccacagugugcggcccuaagaaaagcaccaaucucgugaagaacaaaugcgugaacuucaacuucaacggccugaccggcaccggcgugcugacagagagcaacaagaaguuccugccauuccagcaguuuggccgggauaucgccgauaccacagacgccguuagagauccccagacacuggaaauccuggacaucaccccaugcagcuucggcggagugucugugaucaccccuggcaccaacaccagcaaucagguggcagugcuguaccagggcgugaacuguaccgaagugcccguggccauucacgccgaucagcugacaccuacauggcggguguacuccaccggcagcaauguguuucagaccagagccggcugucugaucggagccgagcacgugaacaauagcuacgagugcgacauccccaucggcgcuggcaucugugccagcuaccagacacagacaaacagccccagacgggcuagaagcguggccagccagagcaucauugccuacacaaugucucugggcguggagaacagcguggccuacuccaacaacucuaucgcuauccccaccaacuucaccaucagcgugaccaccgagauccugccuguguccaugaccaagaccagcguggacugcaccauguacaucugcggcgauuccaccgagugcuccaaccugcugcugcaguacggcagcuucugcacccagcugaauagagcccugacagggaucgccguggaacaggacaagaacacccaagagguguucgcccaagugaagcaaaucuacaagaccccuccuaucaaggacuucggcggcuucaauuucagccagauucugcccgauccuagcaagcccagcaagcggagcuucaucgaggaccugcuguucaacaaagugacacuggccgacgccggcuucaucaagcaguauggcgauugucugggcgacauugccgccagggaucugauuugcgcccagaaguuuaacggacugacagugcugccuccucugcugaccgaugagaugaucgcccaguacacaucugcccugcuggccggcacaaucacaagcggcuggacauuuggagcuggcgccgcucugcagauccccuuugcuaugcagauggccuaccgguucaacggcaucggagugacccagaaugugcuguacgagaaccagaagcugaucgccaaccaguucaacagcgccaucggcaagauccaggacagccugagcagcacagcaagcgcccugggaaagcugcaggacguggucaaccagaaugcccaggcacugaacacccuggucaagcagcuguccuccaacuucggcgccaucagcucugugcugaacgauauccugagcagacuggacaaggucgaggccgaggugcagaucgacagacugaucacaggcagacugcagagccuccagacauacgugacccagcagcugaucagagccgccgagauuagagccucugccaaucuggccgccaccaagaugucugagugugugcugggccagagcaagagaguggacuuuugcggcaagggcuaccaccugaugagcuucccucagucugccccucacggcgugguguuucugcacgugacauaugugcccgcucaagagaagaauuucaccaccgcuccagccaucugccacgacggcaaagcccacuuuccuagagaaggcguguucguguccaacggcacccauugguucgugacacagcggaacuucuacgagccccagaucaucaccaccgacaacaccuucgugucuggcaacugcgacguugugaucggcauugugaacaauaccguguacgacccucugcagcccgagcuggacagcuucaaagaggaacuggacaaguacuuuaagaaccacacaagccccgacguggaccugggcgauaucagcggaaucaaugccagcgucgugaacauccagaaagagaucgaccggcugaacgagguggccaagaaucugaacgagagccugaucgaccugcaagaacuggggaaguacgagcaguacaucaaguggcccugguacaucuggcugggcuuuaucgccggacugauugccaucgugauggucacaaucaugcuguguugcaugaccagcugcuguagcugccugaagggcuguuguagcuguggcagcugcugcaaguucgacgaggacgauucugagcccgugcugaagggcgugaaacugcacuacaccugaggacuaguguccaccugucccuccugggcugcuggauugucucguuuuccugccaaauaaacaggaucagcgcuuuacagaucucaaaggcucuuuucagagccaccaaaaaaaaaaaaaaaaaaaaaaaaaaaaaaaaaaaaaaaaaaaaaaaaaaaaaaaaaaaaaaaaaaaaaaaaaaaaaaaaaaaaaaaaaaaaaaaaaaaaa

SEQ ID NO: 23936 - RNA, 4129 nt, Artificial Sequence
  SARS-CoV-2/Wuhan/WIV05/2019__EPI_ISL_402128 spike protein mRNA gc mod (1-1273)(E484K_D614G)
aggagacccgugacccggaaguuguacggcuacgcgacuuucccucccacaaacccucgcgcccuuccuuuccuacuugggcccggcagaaagcuuaccauguucguguuucuggugcugcugccccugguguccagccagugugugaaccugaccaccagaacacagcugccuccagccuacaccaacagcuucaccagaggcguguacuaccccgacaagguguucagauccagcgugcugcacucuacccaggaccuguuccugccuuucuucagcaacgugaccugguuccacgccauccacguguccggcaccaauggcaccaagagauucgacaaccccgugcugcccuucaacgacgggguguacuuugccagcaccgagaaguccaacaucaucagaggcuggaucuucggcaccacacuggacagcaagacccagagccugcugaucgugaacaacgccaccaacguggucaucaaagugugcgaguuccaguucugcaacgaccccuuccugggcgucuacuaccacaagaacaacaagagcuggauggaaagcgaguuccggguguacagcagcgccaacaacugcaccuucgaguacgugucccagccuuuccugauggaccuggaaggcaagcagggcaacuucaagaaccugcgcgaguucguguucaagaacaucgacggcuacuucaaaaucuacagcaagcacaccccuaucaaccucgugcgggaucugccucagggcuucucugcucuggaaccccugguggaucugcccaucggcaucaacaucacccgguuucagacacugcuggcccugcacagaagcuaccugacaccuggcgauagcagcagcggauggacagcuggugccgccgcuuacuaugugggcuaccugcagccuagaaccuuccugcugaaguacaacgagaacggcaccaucaccgacgccguggauugugcucuggauccucugagcgagacaaagugcacccugaaguccuucaccguggaaaagggcaucuaccagaccagcaacuuccgggugcagcccaccgaauccaucgugcgguuccccaauaucaccaaucugugccccuucggcgagguguucaaugccaccagauucgccucuguguacgccuggaaccggaagcggaucagcaauugcguggccgacuacuccgugcuguacaacuccgccagcuucagcaccuucaagugcuacggcguguccccuaccaagcugaacgaccugugcuucacaaacguguacgccgacagcuucgugauccggggagaugaagugcggcagauugccccuggacagacaggcaagaucgccgacuacaacuacaagcugcccgacgacuucaccggcugugugauugccuggaacagcaacaaccuggacuccaaagucggcggcaacuacaauuaccuguaccggcuguuccggaaguccaaucugaagcccuucgagcgggacaucagcaccgaaaucuaucaggccggcagcaccccuugcaacggcgugaagggcuucaacugcuacuucccacugcaguccuacggcuuucagcccacaaauggcgugggcuaucagcccuacagagugguggugcugagcuucgaacugcugcaugcuccugccacagugugcggcccuaagaaaagcaccaaucucgugaagaacaaaugcgugaacuucaacuucaacggccugaccggcaccggcgugcugacagagagcaacaagaaguuccugccauuccagcaguuuggccgggauaucgccgauaccacagacgccguuagagauccccagacacuggaaauccuggacaucaccccaugcagcuucggcggagugucugugaucaccccuggcaccaacaccagcaaucagguggcagugcuguaccagggcgugaacuguaccgaagugcccguggccauucacgccgaucagcugacaccuacauggcggguguacuccaccggcagcaauguguuucagaccagagccggcugucugaucggagccgagcacgugaacaauagcuacgagugcgacauccccaucggcgcuggcaucugugccagcuaccagacacagacaaacagccccagacgggcuagaagcguggccagccagagcaucauugccuacacaaugucucugggcgccgagaacagcguggccuacuccaacaacucuaucgcuauccccaccaacuucaccaucagcgugaccaccgagauccugccuguguccaugaccaagaccagcguggacugcaccauguacaucugcggcgauuccaccgagugcuccaaccugcugcugcaguacggcagcuucugcacccagcugaauagagcccugacagggaucgccguggaacaggacaagaacacccaagagguguucgcccaagugaagcaaaucuacaagaccccuccuaucaaggacuucggcggcuucaauuucagccagauucugcccgauccuagcaagcccagcaagcggagcuucaucgaggaccugcuguucaacaaagugacacuggccgacgccggcuucaucaagcaguauggcgauugucugggcgacauugccgccagggaucugauuugcgcccagaaguuuaacggacugacagugcugccuccucugcugaccgaugagaugaucgcccaguacacaucugcccugcuggccggcacaaucacaagcggcuggacauuuggagcuggcgccgcucugcagauccccuuugcuaugcagauggccuaccgguucaacggcaucggagugacccagaaugugcuguacgagaaccagaagcugaucgccaaccaguucaacagcgccaucggcaagauccaggacagccugagcagcacagcaagcgcccugggaaagcugcaggacguggucaaccagaaugcccaggcacugaacacccuggucaagcagcuguccuccaacuucggcgccaucagcucugugcugaacgauauccugagcagacuggacaaggucgaggccgaggugcagaucgacagacugaucacaggcagacugcagagccuccagacauacgugacccagcagcugaucagagccgccgagauuagagccucugccaaucuggccgccaccaagaugucugagugugugcugggccagagcaagagaguggacuuuugcggcaagggcuaccaccugaugagcuucccucagucugccccucacggcgugguguuucugcacgugacauaugugcccgcucaagagaagaauuucaccaccgcuccagccaucugccacgacggcaaagcccacuuuccuagagaaggcguguucguguccaacggcacccauugguucgugacacagcggaacuucuacgagccccagaucaucaccaccgacaacaccuucgugucuggcaacugcgacguugugaucggcauugugaacaauaccguguacgacccucugcagcccgagcuggacagcuucaaagaggaacuggacaaguacuuuaagaaccacacaagccccgacguggaccugggcgauaucagcggaaucaaugccagcgucgugaacauccagaaagagaucgaccggcugaacgagguggccaagaaucugaacgagagccugaucgaccugcaagaacuggggaaguacgagcaguacaucaaguggcccugguacaucuggcugggcuuuaucgccggacugauugccaucgugauggucacaaucaugcuguguugcaugaccagcugcuguagcugccugaagggcuguuguagcuguggcagcugcugcaaguucgacgaggacgauucugagcccgugcugaagggcgugaaacugcacuacaccugaggacuaguguccaccugucccuccugggcugcuggauugucucguuuuccugccaaauaaacaggaucagcgcuuuacagaucucaaaggcucuuuucagagccaccaaaaaaaaaaaaaaaaaaaaaaaaaaaaaaaaaaaaaaaaaaaaaaaaaaaaaaaaaaaaaaaaaaaaaaaaaaaaaaaaaaaaaaaaaaaaaaaaaaaaa

SEQ ID NO: 23937 - RNA, 4129 nt, Artificial Sequence
  SARS-CoV-2/Wuhan/WIV05/2019__EPI_ISL_402128 spike protein mRNA gc mod (1-1273)(L18F_T20N_P26S_D138Y_R190S_K417T_E484K_N501Y_D614G_H655Y _T1027I)
aggagacccgugacccggaaguuguacggcuacgcgacuuucccucccacaaacccucgcgcccuuccuuuccuacuugggcccggcagaaagcuuaccauguucguguuucuggugcugcugccccugguguccagccagugugugaacuucaccaacagaacacagcugccuagcgccuacaccaacagcuucaccagaggcguguacuaccccgacaagguguucagauccagcgugcugcacucuacccaggaccuguuccugccuuucuucagcaacgugaccugguuccacgccauccacguguccggcaccaauggcaccaagagauucgacaaccccgugcugcccuucaacgacgggguguacuuugccagcaccgagaaguccaacaucaucagaggcuggaucuucggcaccacacuggacagcaagacccagagccugcugaucgugaacaacgccaccaacguggucaucaaagugugcgaguuccaguucugcaacuaccccuuccugggcgucuacuaccacaagaacaacaagagcuggauggaaagcgaguuccggguguacagcagcgccaacaacugcaccuucgaguacgugucccagccuuuccugauggaccuggaaggcaagcagggcaacuucaagaaccugagcgaguucguguucaagaacaucgacggcuacuucaaaaucuacagcaagcacaccccuaucaaccucgugcgggaucugccucagggcuucucugcucuggaaccccugguggaucugcccaucggcaucaacaucacccgguuucagacacugcuggcccugcacagaagcuaccugacaccuggcgauagcagcagcggauggacagcuggugccgccgcuuacuaugugggcuaccugcagccuagaaccuuccugcugaaguacaacgagaacggcaccaucaccgacgccguggauugugcucuggauccucugagcgagacaaagugcacccugaaguccuucaccguggaaaagggcaucuaccagaccagcaacuuccgggugcagcccaccgaauccaucgugcgguuccccaauaucaccaaucugugccccuucggcgagguguucaaugccaccagauucgccucuguguacgccuggaaccggaagcggaucagcaauugcguggccgacuacuccgugcuguacaacuccgccagcuucagcaccuucaagugcuacggcguguccccuaccaagcugaacgaccugugcuucacaaacguguacgccgacagcuucgugauccggggagaugaagugcggcagauugccccuggacagacaggcaccaucgccgacuacaacuacaagcugcccgacgacuucaccggcugugugauugccuggaacagcaacaaccuggacuccaaagucggcggcaacuacaauuaccuguaccggcuguuccggaaguccaaucugaagcccuucgagcgggacaucagcaccgaaaucuaucaggccggcagcaccccuugcaacggcgugaagggcuucaacugcuacuucccacugcaguccuacggcuuucagcccacauacggcgugggcuaucagcccuacagagugguggugcugagcuucgaacugcugcaugcuccugccacagugugcggcccuaagaaaagcaccaaucucgugaagaacaaaugcgugaacuucaacuucaacggccugaccggcaccggcgugcugacagagagcaacaagaaguuccugccauuccagcaguuuggccgggauaucgccgauaccacagacgccguuagagauccccagacacuggaaauccuggacaucaccccaugcagcuucggcggagugucugugaucaccccuggcaccaacaccagcaaucagguggcagugcuguaccagggcgugaacuguaccgaagugcccguggccauucacgccgaucagcugacaccuacauggcggguguacuccaccggcagcaauguguuucagaccagagccggcugucugaucggagccgaguacgugaacaauagcuacgagugcgacauccccaucggcgcuggcaucugugccagcuaccagacacagacaaacagccccagacgggcuagaagcguggccagccagagcaucauugccuacacaaugucucugggcgccgagaacagcguggccuacuccaacaacucuaucgcuauccccaccaacuucaccaucagcgugaccaccgagauccugccuguguccaugaccaagaccagcguggacugcaccauguacaucugcggcgauuccaccgagugcuccaaccugcugcugcaguacggcagcuucugcacccagcugaauagagcccugacagggaucgccguggaacaggacaagaacacccaagagguguucgcccaagugaagcaaaucuacaagaccccuccuaucaaggacuucggcggcuucaauuucagccagauucugcccgauccuagcaagcccagcaagcggagcuucaucgaggaccugcuguucaacaaagugacacuggccgacgccggcuucaucaagcaguauggcgauugucugggcgacauugccgccagggaucugauuugcgcccagaaguuuaacggacugacagugcugccuccucugcugaccgaugagaugaucgcccaguacacaucugcccugcuggccggcacaaucacaagcggcuggacauuuggagcuggcgccgcucugcagauccccuuugcuaugcagauggccuaccgguucaacggcaucggagugacccagaaugugcuguacgagaaccagaagcugaucgccaaccaguucaacagcgccaucggcaagauccaggacagccugagcagcacagcaagcgcccugggaaagcugcaggacguggucaaccagaaugcccaggcacugaacacccuggucaagcagcuguccuccaacuucggcgccaucagcucugugcugaacgauauccugagcagacuggacaaggucgaggccgaggugcagaucgacagacugaucacaggcagacugcagagccuccagacauacgugacccagcagcugaucagagccgccgagauuagagccucugccaaucuggccgccaucaagaugucugagugugugcugggccagagcaagagaguggacuuuugcggcaagggcuaccaccugaugagcuucccucagucugccccucacggcgugguguuucugcacgugacauaugugcccgcucaagagaagaauuucaccaccgcuccagccaucugccacgacggcaaagcccacuuuccuagagaaggcguguucguguccaacggcacccauugguucgugacacagcggaacuucuacgagccccagaucaucaccaccgacaacaccuucgugucuggcaacugcgacguugugaucggcauugugaacaauaccguguacgacccucugcagcccgagcuggacagcuucaaagaggaacuggacaaguacuuuaagaaccacacaagccccgacguggaccugggcgauaucagcggaaucaaugccagcgucgugaacauccagaaagagaucgaccggcugaacgagguggccaagaaucugaacgagagccugaucgaccugcaagaacuggggaaguacgagcaguacaucaaguggcccugguacaucuggcugggcuuuaucgccggacugauugccaucgugauggucacaaucaugcuguguugcaugaccagcugcuguagcugccugaagggcuguuguagcuguggcagcugcugcaaguucgacgaggacgauucugagcccgugcugaagggcgugaaacugcacuacaccugaggacuaguguccaccugucccuccugggcugcuggauugucucguuuuccugccaaauaaacaggaucagcgcuuuacagaucucaaaggcucuuuucagagccaccaaaaaaaaaaaaaaaaaaaaaaaaaaaaaaaaaaaaaaaaaaaaaaaaaaaaaaaaaaaaaaaaaaaaaaaaaaaaaaaaaaaaaaaaaaaaaaaaaaaaa

SEQ ID NO: 23938 - RNA, 4129 nt, Artificial Sequence
  SARS-CoV-2/Wuhan/WIV05/2019__EPI_ISL_402128 spike protein mRNA gc mod (1-1273)(S13I_W152C_L452R_D614G)
aggagacccgugacccggaaguuguacggcuacgcgacuuucccucccacaaacccucgcgcccuuccuuuccuacuugggcccggcagaaagcuuaccauguucguguuucuggugcugcugccccugguguccauccagugugugaaccugaccaccagaacacagcugccuccagccuacaccaacagcuucaccagaggcguguacuaccccgacaagguguucagauccagcgugcugcacucuacccaggaccuguuccugccuuucuucagcaacgugaccugguuccacgccauccacguguccggcaccaauggcaccaagagauucgacaaccccgugcugcccuucaacgacgggguguacuuugccagcaccgagaaguccaacaucaucagaggcuggaucuucggcaccacacuggacagcaagacccagagccugcugaucgugaacaacgccaccaacguggucaucaaagugugcgaguuccaguucugcaacgaccccuuccugggcgucuacuaccacaagaacaacaagagcugcauggaaagcgaguuccggguguacagcagcgccaacaacugcaccuucgaguacgugucccagccuuuccugauggaccuggaaggcaagcagggcaacuucaagaaccugcgcgaguucguguucaagaacaucgacggcuacuucaaaaucuacagcaagcacaccccuaucaaccucgugcgggaucugccucagggcuucucugcucuggaaccccugguggaucugcccaucggcaucaacaucacccgguuucagacacugcuggcccugcacagaagcuaccugacaccuggcgauagcagcagcggauggacagcuggugccgccgcuuacuaugugggcuaccugcagccuagaaccuuccugcugaaguacaacgagaacggcaccaucaccgacgccguggauugugcucuggauccucugagcgagacaaagugcacccugaaguccuucaccguggaaaagggcaucuaccagaccagcaacuuccgggugcagcccaccgaauccaucgugcgguuccccaauaucaccaaucugugccccuucggcgagguguucaaugccaccagauucgccucuguguacgccuggaaccggaagcggaucagcaauugcguggccgacuacuccgugcuguacaacuccgccagcuucagcaccuucaagugcuacggcguguccccuaccaagcugaacgaccugugcuucacaaacguguacgccgacagcuucgugauccggggagaugaagugcggcagauugccccuggacagacaggcaagaucgccgacuacaacuacaagcugcccgacgacuucaccggcugugugauugccuggaacagcaacaaccuggacuccaaagucggcggcaacuacaauuaccgcuaccggcuguuccggaaguccaaucugaagcccuucgagcgggacaucagcaccgaaaucuaucaggccggcagcaccccuugcaacggcguggaaggcuucaacugcuacuucccacugcaguccuacggcuuucagcccacaaauggcgugggcuaucagcccuacagagugguggugcugagcuucgaacugcugcaugcuccugccacagugugcggcccuaagaaaagcaccaaucucgugaagaacaaaugcgugaacuucaacuucaacggccugaccggcaccggcgugcugacagagagcaacaagaaguuccugccauuccagcaguuuggccgggauaucgccgauaccacagacgccguuagagauccccagacacuggaaauccuggacaucaccccaugcagcuucggcggagugucugugaucaccccuggcaccaacaccagcaaucagguggcagugcuguaccagggcgugaacuguaccgaagugcccguggccauucacgccgaucagcugacaccuacauggcggguguacuccaccggcagcaauguguuucagaccagagccggcugucugaucggagccgagcacgugaacaauagcuacgagugcgacauccccaucggcgcuggcaucugugccagcuaccagacacagacaaacagccccagacgggcuagaagcguggccagccagagcaucauugccuacacaaugucucugggcgccgagaacagcguggccuacuccaacaacucuaucgcuauccccaccaacuucaccaucagcgugaccaccgagauccugccuguguccaugaccaagaccagcguggacugcaccauguacaucugcggcgauuccaccgagugcuccaaccugcugcugcaguacggcagcuucugcacccagcugaauagagcccugacagggaucgccguggaacaggacaagaacacccaagagguguucgcccaagugaagcaaaucuacaagaccccuccuaucaaggacuucggcggcuucaauuucagccagauucugcccgauccuagcaagcccagcaagcggagcuucaucgaggaccugcuguucaacaaagugacacuggccgacgccggcuucaucaagcaguauggcgauugucugggcgacauugccgccagggaucugauuugcgcccagaaguuuaacggacugacagugcugccuccucugcugaccgaugagaugaucgcccaguacacaucugcccugcuggccggcacaaucacaagcggcuggacauuuggagcuggcgccgcucugcagauccccuuugcuaugcagauggccuaccgguucaacggcaucggagugacccagaaugugcuguacgagaaccagaagcugaucgccaaccaguucaacagcgccaucggcaagauccaggacagccugagcagcacagcaagcgcccugggaaagcugcaggacguggucaaccagaaugcccaggcacugaacacccuggucaagcagcuguccuccaacuucggcgccaucagcucugugcugaacgauauccugagcagacuggacaaggucgaggccgaggugcagaucgacagacugaucacaggcagacugcagagccuccagacauacgugacccagcagcugaucagagccgccgagauuagagccucugccaaucuggccgccaccaagaugucugagugugugcugggccagagcaagagaguggacuuuugcggcaagggcuaccaccugaugagcuucccucagucugccccucacggcgugguguuucugcacgugacauaugugcccgcucaagagaagaauuucaccaccgcuccagccaucugccacgacggcaaagcccacuuuccuagagaaggcguguucguguccaacggcacccauugguucgugacacagcggaacuucuacgagccccagaucaucaccaccgacaacaccuucgugucuggcaacugcgacguugugaucggcauugugaacaauaccguguacgacccucugcagcccgagcuggacagcuucaaagaggaacuggacaaguacuuuaagaaccacacaagccccgacguggaccugggcgauaucagcggaaucaaugccagcgucgugaacauccagaaagagaucgaccggcugaacgagguggccaagaaucugaacgagagccugaucgaccugcaagaacuggggaaguacgagcaguacaucaaguggcccugguacaucuggcugggcuuuaucgccggacugauugccaucgugauggucacaaucaugcuguguugcaugaccagcugcuguagcugccugaagggcuguuguagcuguggcagcugcugcaaguucgacgaggacgauucugagcccgugcugaagggcgugaaacugcacuacaccugaggacuaguguccaccugucccuccugggcugcuggauugucucguuuuccugccaaauaaacaggaucagcgcuuuacagaucucaaaggcucuuuucagagccaccaaaaaaaaaaaaaaaaaaaaaaaaaaaaaaaaaaaaaaaaaaaaaaaaaaaaaaaaaaaaaaaaaaaaaaaaaaaaaaaaaaaaaaaaaaaaaaaaaaaaa

SEQ ID NO: 23939 - RNA, 4129 nt, Artificial Sequence
  SARS-CoV-2/Wuhan/WIV05/2019__EPI_ISL_402128 spike protein mRNA gc mod (1-1273)
aggagacccgugacccggaaguuguacggcuacgcgacuuucccucccacaaacccucgcgcccuuccuuuccuacuugggcccggcagaaagcuuaccauguucguguuccuggugcugcugccucugguguccagccagugugugaaccugaccaccagaacacagcugccuccagccuacaccaacagcuuuaccagaggcguguacuaccccgacaagguguucagauccagcgugcugcacucuacccaggaccuguuccugccuuucuucagcaacgugaccugguuccacgccauccacguguccggcaccaauggcaccaagagauucgacaaccccgugcugcccuucaacgacgggguguacuuugccagcaccgagaaguccaacaucaucagaggcuggaucuucggcaccacacuggacagcaagacccagagccugcugaucgugaacaacgccaccaacguggucaucaaagugugcgaguuccaguucugcaacgaccccuuccugggcgucuacuaccacaagaacaacaagagcuggauggaaagcgaguuccggguguacagcagcgccaacaacugcaccuucgaguacgugucccagccuuuccugauggaccuggaaggcaagcagggcaacuucaagaaccugcgcgaguucguguuuaagaacaucgacggcuacuucaagaucuacagcaagcacaccccuaucaaccucgugcgggaucugccucagggcuucucugcucuggaaccccugguggaucugcccaucggcaucaacaucacccgguuucagacacugcuggcccugcacagaagcuaccugacaccuggcgauagcagcagcggauggacagcuggugccgccgcuuacuaugugggcuaccugcagccuagaaccuuccugcugaaguacaacgagaacggcaccaucaccgacgccguggauugugcucuggauccucugagcgagacaaagugcacccugaaguccuucaccguggaaaagggcaucuaccagaccagcaacuuccgggugcagcccaccgaauccaucgugcgguuccccaauaucaccaaucugugccccuucggcgagguguucaaugccaccagauucgccucuguguacgccuggaaccggaagcggaucagcaauugcguggccgacuacuccgugcuguacaacuccgccagcuucagcaccuucaagugcuacggcguguccccuaccaagcugaacgaccugugcuucacaaacguguacgccgacagcuucgugauccggggagaugaagugcggcagauugccccuggacagacaggcaagaucgccgacuacaacuacaagcugcccgacgacuucaccggcugugugauugccuggaacagcaacaaccuggacuccaaagucggcggcaacuacaauuaccuguaccggcuguuccggaaguccaaucugaagcccuucgagcgggacaucuccaccgagaucuaucaggccggcagcaccccuuguaacggcguggaaggcuucaacugcuacuucccacugcaguccuacggcuuucagcccacaaauggcgugggcuaucagcccuacagagugguggugcugagcuucgaacugcugcaugccccugccacagugugcggcccuaagaaaagcaccaaucucgugaagaacaaaugcgugaacuucaacuucaacggccugaccggcaccggcgugcugacagagagcaacaagaaguuccugccauuccagcaguuuggccgggauaucgccgauaccacagacgccguuagagauccccagacacuggaaauccuggacaucaccccuugcagcuucggcggagugucugugaucaccccuggcaccaacaccagcaaucagguggcagugcuguaccaggacgugaacuguaccgaagugcccguggccauucacgccgaucagcugacaccuacauggcggguguacuccaccggcagcaauguguuucagaccagagccggcugucugaucggagccgagcacgugaacaauagcuacgagugcgacauccccaucggcgcuggaaucugcgccagcuaccagacacagacaaacagcccucggagagccagaagcguggccagccagagcaucauugccuacacaaugucucugggcgccgagaacagcguggccuacuccaacaacucuaucgcuauccccaccaacuucaccaucagcgugaccacagagauccugccuguguccaugaccaagaccagcguggacugcaccauguacaucugcggcgauuccaccgagugcuccaaccugcugcugcaguacggcagcuucugcacccagcugaauagagcccugacagggaucgccguggaacaggacaagaacacccaagagguguucgcccaagugaagcagaucuacaagaccccuccuaucaaggacuucggcggcuucaauuucagccagauucugcccgauccuagcaagcccagcaagcggagcuucaucgaggaccugcuguucaacaaagugacacuggccgacgccggcuucaucaagcaguauggcgauugucugggcgacauugccgccagggaucugauuugcgcccagaaguuuaacggacugacagugcugccuccucugcugaccgaugagaugaucgcccaguacacaucugcccugcuggccggcacaaucacaagcggcuggacauuuggagcaggcgccgcucugcagauccccuuugcuaugcagauggccuaccgguucaacggcaucggagugacccagaaugugcuguacgagaaccagaagcugaucgccaaccaguucaacagcgccaucggcaagauccaggacagccugagcagcacagcaagcgcccugggaaagcugcaggacguggucaaccagaaugcccaggcacugaacacccuggucaagcagcuguccuccaacuucggcgccaucagcucugugcugaacgauauccugagcagacuggacaaggucgaggccgaggugcagaucgacagacugaucacaggcagacugcagagccuccagacauacgugacccagcagcugaucagagccgccgagauuagagccucugccaaucuggccgccaccaagaugucugagugugugcugggccagagcaagagaguggacuuuugcggcaagggcuaccaccugaugagcuucccucagucugccccucacggcgugguguuucugcacgugacauaugugcccgcucaagagaagaauuucaccaccgcuccagccaucugccacgacggcaaagcccacuuuccuagagaaggcguguucguguccaacggcacccauugguucgugacacagcggaacuucuacgagccccagaucaucaccaccgacaacaccuucgugucuggcaacugcgacgucgugaucggcauugugaacaauaccguguacgacccucugcagcccgagcuggacagcuucaaagaggaacuggacaaguacuuuaagaaccacacaagccccgacguggaccugggcgauaucagcggaaucaaugccagcgucgugaacauccagaaagagaucgaccggcugaacgagguggccaagaaucugaacgagagccugaucgaccugcaagaacuggggaaguacgagcaguacaucaaguggcccugguacaucuggcugggcuuuaucgccggacugauugccaucgugauggucacaaucaugcuguguugcaugaccagcugcuguagcugccugaagggcuguuguagcuguggcagcugcugcaaguucgacgaggacgauucugagcccgugcugaagggcgugaaacugcacuacacaugaggacuaguguccaccugucccuccugggcugcuggauugucucguuuuccugccaaauaaacaggaucagcgcuuuacagaucucaaaggcucuuuucagagccaccaaaaaaaaaaaaaaaaaaaaaaaaaaaaaaaaaaaaaaaaaaaaaaaaaaaaaaaaaaaaaaaaaaaaaaaaaaaaaaaaaaaaaaaaaaaaaaaaaaaaa

SEQ ID NO: 23940 - RNA, 4129 nt, Artificial Sequence
  SARS-CoV-2/Wuhan/WIV05/2019__EPI_ISL_402128 spike protein mRNA gc mod (1-1273)(D614G)
aggagacccgugacccggaaguuguacggcuacgcgacuuucccucccacaaacccucgcgcccuuccuuuccuacuugggcccggcagaaagcuuaccauguucguguuccuggugcugcugccucugguguccagccagugugugaaccugaccaccagaacacagcugccuccagccuacaccaacagcuuuaccagaggcguguacuaccccgacaagguguucagauccagcgugcugcacucuacccaggaccuguuccugccuuucuucagcaacgugaccugguuccacgccauccacguguccggcaccaauggcaccaagagauucgacaaccccgugcugcccuucaacgacgggguguacuuugccagcaccgagaaguccaacaucaucagaggcuggaucuucggcaccacacuggacagcaagacccagagccugcugaucgugaacaacgccaccaacguggucaucaaagugugcgaguuccaguucugcaacgaccccuuccugggcgucuacuaccacaagaacaacaagagcuggauggaaagcgaguuccggguguacagcagcgccaacaacugcaccuucgaguacgugucccagccuuuccugauggaccuggaaggcaagcagggcaacuucaagaaccugcgcgaguucguguuuaagaacaucgacggcuacuucaagaucuacagcaagcacaccccuaucaaccucgugcgggaucugccucagggcuucucugcucuggaaccccugguggaucugcccaucggcaucaacaucacccgguuucagacacugcuggcccugcacagaagcuaccugacaccuggcgauagcagcagcggauggacagcuggugccgccgcuuacuaugugggcuaccugcagccuagaaccuuccugcugaaguacaacgagaacggcaccaucaccgacgccguggauugugcucuggauccucugagcgagacaaagugcacccugaaguccuucaccguggaaaagggcaucuaccagaccagcaacuuccgggugcagcccaccgaauccaucgugcgguuccccaauaucaccaaucugugccccuucggcgagguguucaaugccaccagauucgccucuguguacgccuggaaccggaagcggaucagcaauugcguggccgacuacuccgugcuguacaacuccgccagcuucagcaccuucaagugcuacggcguguccccuaccaagcugaacgaccugugcuucacaaacguguacgccgacagcuucgugauccggggagaugaagugcggcagauugccccuggacagacaggcaagaucgccgacuacaacuacaagcugcccgacgacuucaccggcugugugauugccuggaacagcaacaaccuggacuccaaagucggcggcaacuacaauuaccuguaccggcuguuccggaaguccaaucugaagcccuucgagcgggacaucuccaccgagaucuaucaggccggcagcaccccuuguaacggcguggaaggcuucaacugcuacuucccacugcaguccuacggcuuucagcccacaaauggcgugggcuaucagcccuacagagugguggugcugagcuucgaacugcugcaugccccugccacagugugcggcccuaagaaaagcaccaaucucgugaagaacaaaugcgugaacuucaacuucaacggccugaccggcaccggcgugcugacagagagcaacaagaaguuccugccauuccagcaguuuggccgggauaucgccgauaccacagacgccguuagagauccccagacacuggaaauccuggacaucaccccuugcagcuucggcggagugucugugaucaccccuggcaccaacaccagcaaucagguggcagugcuguaccagggcgugaacuguaccgaagugcccguggccauucacgccgaucagcugacaccuacauggcggguguacuccaccggcagcaauguguuucagaccagagccggcugucugaucggagccgagcacgugaacaauagcuacgagugcgacauccccaucggcgcuggaaucugcgccagcuaccagacacagacaaacagcccucggagagccagaagcguggccagccagagcaucauugccuacacaaugucucugggcgccgagaacagcguggccuacuccaacaacucuaucgcuauccccaccaacuucaccaucagcgugaccacagagauccugccuguguccaugaccaagaccagcguggacugcaccauguacaucugcggcgauuccaccgagugcuccaaccugcugcugcaguacggcagcuucugcacccagcugaauagagcccugacagggaucgccguggaacaggacaagaacacccaagagguguucgcccaagugaagcagaucuacaagaccccuccuaucaaggacuucggcggcuucaauuucagccagauucugcccgauccuagcaagcccagcaagcggagcuucaucgaggaccugcuguucaacaaagugacacuggccgacgccggcuucaucaagcaguauggcgauugucugggcgacauugccgccagggaucugauuugcgcccagaaguuuaacggacugacagugcugccuccucugcugaccgaugagaugaucgcccaguacacaucugcccugcuggccggcacaaucacaagcggcuggacauuuggagcaggcgccgcucugcagauccccuuugcuaugcagauggccuaccgguucaacggcaucggagugacccagaaugugcuguacgagaaccagaagcugaucgccaaccaguucaacagcgccaucggcaagauccaggacagccugagcagcacagcaagcgcccugggaaagcugcaggacguggucaaccagaaugcccaggcacugaacacccuggucaagcagcuguccuccaacuucggcgccaucagcucugugcugaacgauauccugagcagacuggacaaggucgaggccgaggugcagaucgacagacugaucacaggcagacugcagagccuccagacauacgugacccagcagcugaucagagccgccgagauuagagccucugccaaucuggccgccaccaagaugucugagugugugcugggccagagcaagagaguggacuuuugcggcaagggcuaccaccugaugagcuucccucagucugccccucacggcgugguguuucugcacgugacauaugugcccgcucaagagaagaauuucaccaccgcuccagccaucugccacgacggcaaagcccacuuuccuagagaaggcguguucguguccaacggcacccauugguucgugacacagcggaacuucuacgagccccagaucaucaccaccgacaacaccuucgugucuggcaacugcgacgucgugaucggcauugugaacaauaccguguacgacccucugcagcccgagcuggacagcuucaaagaggaacuggacaaguacuuuaagaaccacacaagccccgacguggaccugggcgauaucagcggaaucaaugccagcgucgugaacauccagaaagagaucgaccggcugaacgagguggccaagaaucugaacgagagccugaucgaccugcaagaacuggggaaguacgagcaguacaucaaguggcccugguacaucuggcugggcuuuaucgccggacugauugccaucgugauggucacaaucaugcuguguugcaugaccagcugcuguagcugccugaagggcuguuguagcuguggcagcugcugcaaguucgacgaggacgauucugagcccgugcugaagggcgugaaacugcacuacacaugaggacuaguguccaccugucccuccugggcugcuggauugucucguuuuccugccaaauaaacaggaucagcgcuuuacagaucucaaaggcucuuuucagagccaccaaaaaaaaaaaaaaaaaaaaaaaaaaaaaaaaaaaaaaaaaaaaaaaaaaaaaaaaaaaaaaaaaaaaaaaaaaaaaaaaaaaaaaaaaaaaaaaaaaaaa

SEQ ID NO: 23941 - RNA, 4129 nt, Artificial Sequence
  SARS-CoV-2/Wuhan/WIV05/2019__EPI_ISL_402128 spike protein mRNA gc mod (1-1273)(A222V_D614G)
aggagacccgugacccggaaguuguacggcuacgcgacuuucccucccacaaacccucgcgcccuuccuuuccuacuugggcccggcagaaagcuuaccauguucguguuccuggugcugcugccucugguguccagccagugugugaaccugaccaccagaacacagcugccuccagccuacaccaacagcuuuaccagaggcguguacuaccccgacaagguguucagauccagcgugcugcacucuacccaggaccuguuccugccuuucuucagcaacgugaccugguuccacgccauccacguguccggcaccaauggcaccaagagauucgacaaccccgugcugcccuucaacgacgggguguacuuugccagcaccgagaaguccaacaucaucagaggcuggaucuucggcaccacacuggacagcaagacccagagccugcugaucgugaacaacgccaccaacguggucaucaaagugugcgaguuccaguucugcaacgaccccuuccugggcgucuacuaccacaagaacaacaagagcuggauggaaagcgaguuccggguguacagcagcgccaacaacugcaccuucgaguacgugucccagccuuuccugauggaccuggaaggcaagcagggcaacuucaagaaccugcgcgaguucguguuuaagaacaucgacggcuacuucaagaucuacagcaagcacaccccuaucaaccucgugcgggaucugccucagggcuucucugugcuggaaccccugguggaucugcccaucggcaucaacaucacccgguuucagacacugcuggcccugcacagaagcuaccugacaccuggcgauagcagcagcggauggacagcuggugccgccgcuuacuaugugggcuaccugcagccuagaaccuuccugcugaaguacaacgagaacggcaccaucaccgacgccguggauugugcucuggauccucugagcgagacaaagugcacccugaaguccuucaccguggaaaagggcaucuaccagaccagcaacuuccgggugcagcccaccgaauccaucgugcgguuccccaauaucaccaaucugugccccuucggcgagguguucaaugccaccagauucgccucuguguacgccuggaaccggaagcggaucagcaauugcguggccgacuacuccgugcuguacaacuccgccagcuucagcaccuucaagugcuacggcguguccccuaccaagcugaacgaccugugcuucacaaacguguacgccgacagcuucgugauccggggagaugaagugcggcagauugccccuggacagacaggcaagaucgccgacuacaacuacaagcugcccgacgacuucaccggcugugugauugccuggaacagcaacaaccuggacuccaaagucggcggcaacuacaauuaccuguaccggcuguuccggaaguccaaucugaagcccuucgagcgggacaucuccaccgagaucuaucaggccggcagcaccccuuguaacggcguggaaggcuucaacugcuacuucccacugcaguccuacggcuuucagcccacaaauggcgugggcuaucagcccuacagagugguggugcugagcuucgaacugcugcaugccccugccacagugugcggcccuaagaaaagcaccaaucucgugaagaacaaaugcgugaacuucaacuucaacggccugaccggcaccggcgugcugacagagagcaacaagaaguuccugccauuccagcaguuuggccgggauaucgccgauaccacagacgccguuagagauccccagacacuggaaauccuggacaucaccccuugcagcuucggcggagugucugugaucaccccuggcaccaacaccagcaaucagguggcagugcuguaccagggcgugaacuguaccgaagugcccguggccauucacgccgaucagcugacaccuacauggcggguguacuccaccggcagcaauguguuucagaccagagccggcugucugaucggagccgagcacgugaacaauagcuacgagugcgacauccccaucggcgcuggaaucugcgccagcuaccagacacagacaaacagcccucggagagccagaagcguggccagccagagcaucauugccuacacaaugucucugggcgccgagaacagcguggccuacuccaacaacucuaucgcuauccccaccaacuucaccaucagcgugaccacagagauccugccuguguccaugaccaagaccagcguggacugcaccauguacaucugcggcgauuccaccgagugcuccaaccugcugcugcaguacggcagcuucugcacccagcugaauagagcccugacagggaucgccguggaacaggacaagaacacccaagagguguucgcccaagugaagcagaucuacaagaccccuccuaucaaggacuucggcggcuucaauuucagccagauucugcccgauccuagcaagcccagcaagcggagcuucaucgaggaccugcuguucaacaaagugacacuggccgacgccggcuucaucaagcaguauggcgauugucugggcgacauugccgccagggaucugauuugcgcccagaaguuuaacggacugacagugcugccuccucugcugaccgaugagaugaucgcccaguacacaucugcccugcuggccggcacaaucacaagcggcuggacauuuggagcaggcgccgcucugcagauccccuuugcuaugcagauggccuaccgguucaacggcaucggagugacccagaaugugcuguacgagaaccagaagcugaucgccaaccaguucaacagcgccaucggcaagauccaggacagccugagcagcacagcaagcgcccugggaaagcugcaggacguggucaaccagaaugcccaggcacugaacacccuggucaagcagcuguccuccaacuucggcgccaucagcucugugcugaacgauauccugagcagacuggacaaggucgaggccgaggugcagaucgacagacugaucacaggcagacugcagagccuccagacauacgugacccagcagcugaucagagccgccgagauuagagccucugccaaucuggccgccaccaagaugucugagugugugcugggccagagcaagagaguggacuuuugcggcaagggcuaccaccugaugagcuucccucagucugccccucacggcgugguguuucugcacgugacauaugugcccgcucaagagaagaauuucaccaccgcuccagccaucugccacgacggcaaagcccacuuuccuagagaaggcguguucguguccaacggcacccauugguucgugacacagcggaacuucuacgagccccagaucaucaccaccgacaacaccuucgugucuggcaacugcgacgucgugaucggcauugugaacaauaccguguacgacccucugcagcccgagcuggacagcuucaaagaggaacuggacaaguacuuuaagaaccacacaagccccgacguggaccugggcgauaucagcggaaucaaugccagcgucgugaacauccagaaagagaucgaccggcugaacgagguggccaagaaucugaacgagagccugaucgaccugcaagaacuggggaaguacgagcaguacaucaaguggcccugguacaucuggcugggcuuuaucgccggacugauugccaucgugauggucacaaucaugcuguguugcaugaccagcugcuguagcugccugaagggcuguuguagcuguggcagcugcugcaaguucgacgaggacgauucugagcccgugcugaagggcgugaaacugcacuacacaugaggacuaguguccaccugucccuccugggcugcuggauugucucguuuuccugccaaauaaacaggaucagcgcuuuacagaucucaaaggcucuuuucagagccaccaaaaaaaaaaaaaaaaaaaaaaaaaaaaaaaaaaaaaaaaaaaaaaaaaaaaaaaaaaaaaaaaaaaaaaaaaaaaaaaaaaaaaaaaaaaaaaaaaaaaa

SEQ ID NO: 23942 - RNA, 4129 nt, Artificial Sequence
  SARS-CoV-2/Wuhan/WIV05/2019__EPI_ISL_402128 spike protein mRNA gc mod (1-1273)(N439K_D614G)
aggagacccgugacccggaaguuguacggcuacgcgacuuucccucccacaaacccucgcgcccuuccuuuccuacuugggcccggcagaaagcuuaccauguucguguuccuggugcugcugccucugguguccagccagugugugaaccugaccaccagaacacagcugccuccagccuacaccaacagcuuuaccagaggcguguacuaccccgacaagguguucagauccagcgugcugcacucuacccaggaccuguuccugccuuucuucagcaacgugaccugguuccacgccauccacguguccggcaccaauggcaccaagagauucgacaaccccgugcugcccuucaacgacgggguguacuuugccagcaccgagaaguccaacaucaucagaggcuggaucuucggcaccacacuggacagcaagacccagagccugcugaucgugaacaacgccaccaacguggucaucaaagugugcgaguuccaguucugcaacgaccccuuccugggcgucuacuaccacaagaacaacaagagcuggauggaaagcgaguuccggguguacagcagcgccaacaacugcaccuucgaguacgugucccagccuuuccugauggaccuggaaggcaagcagggcaacuucaagaaccugcgcgaguucguguuuaagaacaucgacggcuacuucaagaucuacagcaagcacaccccuaucaaccucgugcgggaucugccucagggcuucucugcucuggaaccccugguggaucugcccaucggcaucaacaucacccgguuucagacacugcuggcccugcacagaagcuaccugacaccuggcgauagcagcagcggauggacagcuggugccgccgcuuacuaugugggcuaccugcagccuagaaccuuccugcugaaguacaacgagaacggcaccaucaccgacgccguggauugugcucuggauccucugagcgagacaaagugcacccugaaguccuucaccguggaaaagggcaucuaccagaccagcaacuuccgggugcagcccaccgaauccaucgugcgguuccccaauaucaccaaucugugccccuucggcgagguguucaaugccaccagauucgccucuguguacgccuggaaccggaagcggaucagcaauugcguggccgacuacuccgugcuguacaacuccgccagcuucagcaccuucaagugcuacggcguguccccuaccaagcugaacgaccugugcuucacaaacguguacgccgacagcuucgugauccggggagaugaagugcggcagauugccccuggacagacaggcaagaucgccgacuacaacuacaagcugcccgacgacuucaccggcugugugauugccuggaacagcaagaaccuggacuccaaagucggcggcaacuacaauuaccuguaccggcuguuccggaaguccaaucugaagcccuucgagcgggacaucuccaccgagaucuaucaggccggcagcaccccuuguaacggcguggaaggcuucaacugcuacuucccacugcaguccuacggcuuucagcccacaaauggcgugggcuaucagcccuacagagugguggugcugagcuucgaacugcugcaugccccugccacagugugcggcccuaagaaaagcaccaaucucgugaagaacaaaugcgugaacuucaacuucaacggccugaccggcaccggcgugcugacagagagcaacaagaaguuccugccauuccagcaguuuggccgggauaucgccgauaccacagacgccguuagagauccccagacacuggaaauccuggacaucaccccuugcagcuucggcggagugucugugaucaccccuggcaccaacaccagcaaucagguggcagugcuguaccagggcgugaacuguaccgaagugcccguggccauucacgccgaucagcugacaccuacauggcggguguacuccaccggcagcaauguguuucagaccagagccggcugucugaucggagccgagcacgugaacaauagcuacgagugcgacauccccaucggcgcuggaaucugcgccagcuaccagacacagacaaacagcccucggagagccagaagcguggccagccagagcaucauugccuacacaaugucucugggcgccgagaacagcguggccuacuccaacaacucuaucgcuauccccaccaacuucaccaucagcgugaccacagagauccugccuguguccaugaccaagaccagcguggacugcaccauguacaucugcggcgauuccaccgagugcuccaaccugcugcugcaguacggcagcuucugcacccagcugaauagagcccugacagggaucgccguggaacaggacaagaacacccaagagguguucgcccaagugaagcagaucuacaagaccccuccuaucaaggacuucggcggcuucaauuucagccagauucugcccgauccuagcaagcccagcaagcggagcuucaucgaggaccugcuguucaacaaagugacacuggccgacgccggcuucaucaagcaguauggcgauugucugggcgacauugccgccagggaucugauuugcgcccagaaguuuaacggacugacagugcugccuccucugcugaccgaugagaugaucgcccaguacacaucugcccugcuggccggcacaaucacaagcggcuggacauuuggagcaggcgccgcucugcagauccccuuugcuaugcagauggccuaccgguucaacggcaucggagugacccagaaugugcuguacgagaaccagaagcugaucgccaaccaguucaacagcgccaucggcaagauccaggacagccugagcagcacagcaagcgcccugggaaagcugcaggacguggucaaccagaaugcccaggcacugaacacccuggucaagcagcuguccuccaacuucggcgccaucagcucugugcugaacgauauccugagcagacuggacaaggucgaggccgaggugcagaucgacagacugaucacaggcagacugcagagccuccagacauacgugacccagcagcugaucagagccgccgagauuagagccucugccaaucuggccgccaccaagaugucugagugugugcugggccagagcaagagaguggacuuuugcggcaagggcuaccaccugaugagcuucccucagucugccccucacggcgugguguuucugcacgugacauaugugcccgcucaagagaagaauuucaccaccgcuccagccaucugccacgacggcaaagcccacuuuccuagagaaggcguguucguguccaacggcacccauugguucgugacacagcggaacuucuacgagccccagaucaucaccaccgacaacaccuucgugucuggcaacugcgacgucgugaucggcauugugaacaauaccguguacgacccucugcagcccgagcuggacagcuucaaagaggaacuggacaaguacuuuaagaaccacacaagccccgacguggaccugggcgauaucagcggaaucaaugccagcgucgugaacauccagaaagagaucgaccggcugaacgagguggccaagaaucugaacgagagccugaucgaccugcaagaacuggggaaguacgagcaguacaucaaguggcccugguacaucuggcugggcuuuaucgccggacugauugccaucgugauggucacaaucaugcuguguugcaugaccagcugcuguagcugccugaagggcuguuguagcuguggcagcugcugcaaguucgacgaggacgauucugagcccgugcugaagggcgugaaacugcacuacacaugaggacuaguguccaccugucccuccugggcugcuggauugucucguuuuccugccaaauaaacaggaucagcgcuuuacagaucucaaaggcucuuuucagagccaccaaaaaaaaaaaaaaaaaaaaaaaaaaaaaaaaaaaaaaaaaaaaaaaaaaaaaaaaaaaaaaaaaaaaaaaaaaaaaaaaaaaaaaaaaaaaaaaaaaaaa

SEQ ID NO: 23943 - RNA, 4129 nt, Artificial Sequence
  SARS-CoV-2/Wuhan/WIV05/2019__EPI_ISL_402128 spike protein mRNA gc mod (1-1273)(S477N_D614G)
aggagacccgugacccggaaguuguacggcuacgcgacuuucccucccacaaacccucgcgcccuuccuuuccuacuugggcccggcagaaagcuuaccauguucguguuccuggugcugcugccucugguguccagccagugugugaaccugaccaccagaacacagcugccuccagccuacaccaacagcuuuaccagaggcguguacuaccccgacaagguguucagauccagcgugcugcacucuacccaggaccuguuccugccuuucuucagcaacgugaccugguuccacgccauccacguguccggcaccaauggcaccaagagauucgacaaccccgugcugcccuucaacgacgggguguacuuugccagcaccgagaaguccaacaucaucagaggcuggaucuucggcaccacacuggacagcaagacccagagccugcugaucgugaacaacgccaccaacguggucaucaaagugugcgaguuccaguucugcaacgaccccuuccugggcgucuacuaccacaagaacaacaagagcuggauggaaagcgaguuccggguguacagcagcgccaacaacugcaccuucgaguacgugucccagccuuuccugauggaccuggaaggcaagcagggcaacuucaagaaccugcgcgaguucguguuuaagaacaucgacggcuacuucaagaucuacagcaagcacaccccuaucaaccucgugcgggaucugccucagggcuucucugcucuggaaccccugguggaucugcccaucggcaucaacaucacccgguuucagacacugcuggcccugcacagaagcuaccugacaccuggcgauagcagcagcggauggacagcuggugccgccgcuuacuaugugggcuaccugcagccuagaaccuuccugcugaaguacaacgagaacggcaccaucaccgacgccguggauugugcucuggauccucugagcgagacaaagugcacccugaaguccuucaccguggaaaagggcaucuaccagaccagcaacuuccgggugcagcccaccgaauccaucgugcgguuccccaauaucaccaaucugugccccuucggcgagguguucaaugccaccagauucgccucuguguacgccuggaaccggaagcggaucagcaauugcguggccgacuacuccgugcuguacaacuccgccagcuucagcaccuucaagugcuacggcguguccccuaccaagcugaacgaccugugcuucacaaacguguacgccgacagcuucgugauccggggagaugaagugcggcagauugccccuggacagacaggcaagaucgccgacuacaacuacaagcugcccgacgacuucaccggcugugugauugccuggaacagcaacaaccuggacuccaaagucggcggcaacuacaauuaccuguaccggcuguuccggaaguccaaucugaagcccuucgagcgggacaucuccaccgagaucuaucaggccggcaacaccccuuguaacggcguggaaggcuucaacugcuacuucccacugcaguccuacggcuuucagcccacaaauggcgugggcuaucagcccuacagagugguggugcugagcuucgaacugcugcaugccccugccacagugugcggcccuaagaaaagcaccaaucucgugaagaacaaaugcgugaacuucaacuucaacggccugaccggcaccggcgugcugacagagagcaacaagaaguuccugccauuccagcaguuuggccgggauaucgccgauaccacagacgccguuagagauccccagacacuggaaauccuggacaucaccccuugcagcuucggcggagugucugugaucaccccuggcaccaacaccagcaaucagguggcagugcuguaccagggcgugaacuguaccgaagugcccguggccauucacgccgaucagcugacaccuacauggcggguguacuccaccggcagcaauguguuucagaccagagccggcugucugaucggagccgagcacgugaacaauagcuacgagugcgacauccccaucggcgcuggaaucugcgccagcuaccagacacagacaaacagcccucggagagccagaagcguggccagccagagcaucauugccuacacaaugucucugggcgccgagaacagcguggccuacuccaacaacucuaucgcuauccccaccaacuucaccaucagcgugaccacagagauccugccuguguccaugaccaagaccagcguggacugcaccauguacaucugcggcgauuccaccgagugcuccaaccugcugcugcaguacggcagcuucugcacccagcugaauagagcccugacagggaucgccguggaacaggacaagaacacccaagagguguucgcccaagugaagcagaucuacaagaccccuccuaucaaggacuucggcggcuucaauuucagccagauucugcccgauccuagcaagcccagcaagcggagcuucaucgaggaccugcuguucaacaaagugacacuggccgacgccggcuucaucaagcaguauggcgauugucugggcgacauugccgccagggaucugauuugcgcccagaaguuuaacggacugacagugcugccuccucugcugaccgaugagaugaucgcccaguacacaucugcccugcuggccggcacaaucacaagcggcuggacauuuggagcaggcgccgcucugcagauccccuuugcuaugcagauggccuaccgguucaacggcaucggagugacccagaaugugcuguacgagaaccagaagcugaucgccaaccaguucaacagcgccaucggcaagauccaggacagccugagcagcacagcaagcgcccugggaaagcugcaggacguggucaaccagaaugcccaggcacugaacacccuggucaagcagcuguccuccaacuucggcgccaucagcucugugcugaacgauauccugagcagacuggacaaggucgaggccgaggugcagaucgacagacugaucacaggcagacugcagagccuccagacauacgugacccagcagcugaucagagccgccgagauuagagccucugccaaucuggccgccaccaagaugucugagugugugcugggccagagcaagagaguggacuuuugcggcaagggcuaccaccugaugagcuucccucagucugccccucacggcgugguguuucugcacgugacauaugugcccgcucaagagaagaauuucaccaccgcuccagccaucugccacgacggcaaagcccacuuuccuagagaaggcguguucguguccaacggcacccauugguucgugacacagcggaacuucuacgagccccagaucaucaccaccgacaacaccuucgugucuggcaacugcgacgucgugaucggcauugugaacaauaccguguacgacccucugcagcccgagcuggacagcuucaaagaggaacuggacaaguacuuuaagaaccacacaagccccgacguggaccugggcgauaucagcggaaucaaugccagcgucgugaacauccagaaagagaucgaccggcugaacgagguggccaagaaucugaacgagagccugaucgaccugcaagaacuggggaaguacgagcaguacaucaaguggcccugguacaucuggcugggcuuuaucgccggacugauugccaucgugauggucacaaucaugcuguguugcaugaccagcugcuguagcugccugaagggcuguuguagcuguggcagcugcugcaaguucgacgaggacgauucugagcccgugcugaagggcgugaaacugcacuacacaugaggacuaguguccaccugucccuccugggcugcuggauugucucguuuuccugccaaauaaacaggaucagcgcuuuacagaucucaaaggcucuuuucagagccaccaaaaaaaaaaaaaaaaaaaaaaaaaaaaaaaaaaaaaaaaaaaaaaaaaaaaaaaaaaaaaaaaaaaaaaaaaaaaaaaaaaaaaaaaaaaaaaaaaaaaa

SEQ ID NO: 23944 - RNA, 4129 nt, Artificial Sequence
  SARS-CoV-2/Wuhan/WIV05/2019__EPI_ISL_402128 spike protein mRNA gc mod (1-1273)(N501Y_D614G)
aggagacccgugacccggaaguuguacggcuacgcgacuuucccucccacaaacccucgcgcccuuccuuuccuacuugggcccggcagaaagcuuaccauguucguguuccuggugcugcugccucugguguccagccagugugugaaccugaccaccagaacacagcugccuccagccuacaccaacagcuuuaccagaggcguguacuaccccgacaagguguucagauccagcgugcugcacucuacccaggaccuguuccugccuuucuucagcaacgugaccugguuccacgccauccacguguccggcaccaauggcaccaagagauucgacaaccccgugcugcccuucaacgacgggguguacuuugccagcaccgagaaguccaacaucaucagaggcuggaucuucggcaccacacuggacagcaagacccagagccugcugaucgugaacaacgccaccaacguggucaucaaagugugcgaguuccaguucugcaacgaccccuuccugggcgucuacuaccacaagaacaacaagagcuggauggaaagcgaguuccggguguacagcagcgccaacaacugcaccuucgaguacgugucccagccuuuccugauggaccuggaaggcaagcagggcaacuucaagaaccugcgcgaguucguguuuaagaacaucgacggcuacuucaagaucuacagcaagcacaccccuaucaaccucgugcgggaucugccucagggcuucucugcucuggaaccccugguggaucugcccaucggcaucaacaucacccgguuucagacacugcuggcccugcacagaagcuaccugacaccuggcgauagcagcagcggauggacagcuggugccgccgcuuacuaugugggcuaccugcagccuagaaccuuccugcugaaguacaacgagaacggcaccaucaccgacgccguggauugugcucuggauccucugagcgagacaaagugcacccugaaguccuucaccguggaaaagggcaucuaccagaccagcaacuuccgggugcagcccaccgaauccaucgugcgguuccccaauaucaccaaucugugccccuucggcgagguguucaaugccaccagauucgccucuguguacgccuggaaccggaagcggaucagcaauugcguggccgacuacuccgugcuguacaacuccgccagcuucagcaccuucaagugcuacggcguguccccuaccaagcugaacgaccugugcuucacaaacguguacgccgacagcuucgugauccggggagaugaagugcggcagauugccccuggacagacaggcaagaucgccgacuacaacuacaagcugcccgacgacuucaccggcugugugauugccuggaacagcaacaaccuggacuccaaagucggcggcaacuacaauuaccuguaccggcuguuccggaaguccaaucugaagcccuucgagcgggacaucuccaccgagaucuaucaggccggcagcaccccuuguaacggcguggaaggcuucaacugcuacuucccacugcaguccuacggcuuucagcccacauacggcgugggcuaucagcccuacagagugguggugcugagcuucgaacugcugcaugccccugccacagugugcggcccuaagaaaagcaccaaucucgugaagaacaaaugcgugaacuucaacuucaacggccugaccggcaccggcgugcugacagagagcaacaagaaguuccugccauuccagcaguuuggccgggauaucgccgauaccacagacgccguuagagauccccagacacuggaaauccuggacaucaccccuugcagcuucggcggagugucugugaucaccccuggcaccaacaccagcaaucagguggcagugcuguaccagggcgugaacuguaccgaagugcccguggccauucacgccgaucagcugacaccuacauggcggguguacuccaccggcagcaauguguuucagaccagagccggcugucugaucggagccgagcacgugaacaauagcuacgagugcgacauccccaucggcgcuggaaucugcgccagcuaccagacacagacaaacagcccucggagagccagaagcguggccagccagagcaucauugccuacacaaugucucugggcgccgagaacagcguggccuacuccaacaacucuaucgcuauccccaccaacuucaccaucagcgugaccacagagauccugccuguguccaugaccaagaccagcguggacugcaccauguacaucugcggcgauuccaccgagugcuccaaccugcugcugcaguacggcagcuucugcacccagcugaauagagcccugacagggaucgccguggaacaggacaagaacacccaagagguguucgcccaagugaagcagaucuacaagaccccuccuaucaaggacuucggcggcuucaauuucagccagauucugcccgauccuagcaagcccagcaagcggagcuucaucgaggaccugcuguucaacaaagugacacuggccgacgccggcuucaucaagcaguauggcgauugucugggcgacauugccgccagggaucugauuugcgcccagaaguuuaacggacugacagugcugccuccucugcugaccgaugagaugaucgcccaguacacaucugcccugcuggccggcacaaucacaagcggcuggacauuuggagcaggcgccgcucugcagauccccuuugcuaugcagauggccuaccgguucaacggcaucggagugacccagaaugugcuguacgagaaccagaagcugaucgccaaccaguucaacagcgccaucggcaagauccaggacagccugagcagcacagcaagcgcccugggaaagcugcaggacguggucaaccagaaugcccaggcacugaacacccuggucaagcagcuguccuccaacuucggcgccaucagcucugugcugaacgauauccugagcagacuggacaaggucgaggccgaggugcagaucgacagacugaucacaggcagacugcagagccuccagacauacgugacccagcagcugaucagagccgccgagauuagagccucugccaaucuggccgccaccaagaugucugagugugugcugggccagagcaagagaguggacuuuugcggcaagggcuaccaccugaugagcuucccucagucugccccucacggcgugguguuucugcacgugacauaugugcccgcucaagagaagaauuucaccaccgcuccagccaucugccacgacggcaaagcccacuuuccuagagaaggcguguucguguccaacggcacccauugguucgugacacagcggaacuucuacgagccccagaucaucaccaccgacaacaccuucgugucuggcaacugcgacgucgugaucggcauugugaacaauaccguguacgacccucugcagcccgagcuggacagcuucaaagaggaacuggacaaguacuuuaagaaccacacaagccccgacguggaccugggcgauaucagcggaaucaaugccagcgucgugaacauccagaaagagaucgaccggcugaacgagguggccaagaaucugaacgagagccugaucgaccugcaagaacuggggaaguacgagcaguacaucaaguggcccugguacaucuggcugggcuuuaucgccggacugauugccaucgugauggucacaaucaugcuguguugcaugaccagcugcuguagcugccugaagggcuguuguagcuguggcagcugcugcaaguucgacgaggacgauucugagcccgugcugaagggcgugaaacugcacuacacaugaggacuaguguccaccugucccuccugggcugcuggauugucucguuuuccugccaaauaaacaggaucagcgcuuuacagaucucaaaggcucuuuucagagccaccaaaaaaaaaaaaaaaaaaaaaaaaaaaaaaaaaaaaaaaaaaaaaaaaaaaaaaaaaaaaaaaaaaaaaaaaaaaaaaaaaaaaaaaaaaaaaaaaaaaaa

SEQ ID NO: 23945 - RNA, 4123 nt, Artificial Sequence
  SARS-CoV-2/Wuhan/WIV05/2019__EPI_ISL_402128 spike protein mRNA gc mod (1-1273)(H69del_V70del_D614G)
aggagacccgugacccggaaguuguacggcuacgcgacuuucccucccacaaacccucgcgcccuuccuuuccuacuugggcccggcagaaagcuuaccauguucguguuccuggugcugcugccucugguguccagccagugugugaaccugaccaccagaacacagcugccuccagccuacaccaacagcuuuaccagaggcguguacuaccccgacaagguguucagauccagcgugcugcacucuacccaggaccuguuccugccuuucuucagcaacgugaccugguuccacgccaucuccggcaccaauggcaccaagagauucgacaaccccgugcugcccuucaacgacgggguguacuuugccagcaccgagaaguccaacaucaucagaggcuggaucuucggcaccacacuggacagcaagacccagagccugcugaucgugaacaacgccaccaacguggucaucaaagugugcgaguuccaguucugcaacgaccccuuccugggcgucuacuaccacaagaacaacaagagcuggauggaaagcgaguuccggguguacagcagcgccaacaacugcaccuucgaguacgugucccagccuuuccugauggaccuggaaggcaagcagggcaacuucaagaaccugcgcgaguucguguuuaagaacaucgacggcuacuucaagaucuacagcaagcacaccccuaucaaccucgugcgggaucugccucagggcuucucugcucuggaaccccugguggaucugcccaucggcaucaacaucacccgguuucagacacugcuggcccugcacagaagcuaccugacaccuggcgauagcagcagcggauggacagcuggugccgccgcuuacuaugugggcuaccugcagccuagaaccuuccugcugaaguacaacgagaacggcaccaucaccgacgccguggauugugcucuggauccucugagcgagacaaagugcacccugaaguccuucaccguggaaaagggcaucuaccagaccagcaacuuccgggugcagcccaccgaauccaucgugcgguuccccaauaucaccaaucugugccccuucggcgagguguucaaugccaccagauucgccucuguguacgccuggaaccggaagcggaucagcaauugcguggccgacuacuccgugcuguacaacuccgccagcuucagcaccuucaagugcuacggcguguccccuaccaagcugaacgaccugugcuucacaaacguguacgccgacagcuucgugauccggggagaugaagugcggcagauugccccuggacagacaggcaagaucgccgacuacaacuacaagcugcccgacgacuucaccggcugugugauugccuggaacagcaacaaccuggacuccaaagucggcggcaacuacaauuaccuguaccggcuguuccggaaguccaaucugaagcccuucgagcgggacaucuccaccgagaucuaucaggccggcagcaccccuuguaacggcguggaaggcuucaacugcuacuucccacugcaguccuacggcuuucagcccacaaauggcgugggcuaucagcccuacagagugguggugcugagcuucgaacugcugcaugccccugccacagugugcggcccuaagaaaagcaccaaucucgugaagaacaaaugcgugaacuucaacuucaacggccugaccggcaccggcgugcugacagagagcaacaagaaguuccugccauuccagcaguuuggccgggauaucgccgauaccacagacgccguuagagauccccagacacuggaaauccuggacaucaccccuugcagcuucggcggagugucugugaucaccccuggcaccaacaccagcaaucagguggcagugcuguaccagggcgugaacuguaccgaagugcccguggccauucacgccgaucagcugacaccuacauggcggguguacuccaccggcagcaauguguuucagaccagagccggcugucugaucggagccgagcacgugaacaauagcuacgagugcgacauccccaucggcgcuggaaucugcgccagcuaccagacacagacaaacagcccucggagagccagaagcguggccagccagagcaucauugccuacacaaugucucugggcgccgagaacagcguggccuacuccaacaacucuaucgcuauccccaccaacuucaccaucagcgugaccacagagauccugccuguguccaugaccaagaccagcguggacugcaccauguacaucugcggcgauuccaccgagugcuccaaccugcugcugcaguacggcagcuucugcacccagcugaauagagcccugacagggaucgccguggaacaggacaagaacacccaagagguguucgcccaagugaagcagaucuacaagaccccuccuaucaaggacuucggcggcuucaauuucagccagauucugcccgauccuagcaagcccagcaagcggagcuucaucgaggaccugcuguucaacaaagugacacuggccgacgccggcuucaucaagcaguauggcgauugucugggcgacauugccgccagggaucugauuugcgcccagaaguuuaacggacugacagugcugccuccucugcugaccgaugagaugaucgcccaguacacaucugcccugcuggccggcacaaucacaagcggcuggacauuuggagcaggcgccgcucugcagauccccuuugcuaugcagauggccuaccgguucaacggcaucggagugacccagaaugugcuguacgagaaccagaagcugaucgccaaccaguucaacagcgccaucggcaagauccaggacagccugagcagcacagcaagcgcccugggaaagcugcaggacguggucaaccagaaugcccaggcacugaacacccuggucaagcagcuguccuccaacuucggcgccaucagcucugugcugaacgauauccugagcagacuggacaaggucgaggccgaggugcagaucgacagacugaucacaggcagacugcagagccuccagacauacgugacccagcagcugaucagagccgccgagauuagagccucugccaaucuggccgccaccaagaugucugagugugugcugggccagagcaagagaguggacuuuugcggcaagggcuaccaccugaugagcuucccucagucugccccucacggcgugguguuucugcacgugacauaugugcccgcucaagagaagaauuucaccaccgcuccagccaucugccacgacggcaaagcccacuuuccuagagaaggcguguucguguccaacggcacccauugguucgugacacagcggaacuucuacgagccccagaucaucaccaccgacaacaccuucgugucuggcaacugcgacgucgugaucggcauugugaacaauaccguguacgacccucugcagcccgagcuggacagcuucaaagaggaacuggacaaguacuuuaagaaccacacaagccccgacguggaccugggcgauaucagcggaaucaaugccagcgucgugaacauccagaaagagaucgaccggcugaacgagguggccaagaaucugaacgagagccugaucgaccugcaagaacuggggaaguacgagcaguacaucaaguggcccugguacaucuggcugggcuuuaucgccggacugauugccaucgugauggucacaaucaugcuguguugcaugaccagcugcuguagcugccugaagggcuguuguagcuguggcagcugcugcaaguucgacgaggacgauucugagcccgugcugaagggcgugaaacugcacuacacaugaggacuaguguccaccugucccuccugggcugcuggauugucucguuuuccugccaaauaaacaggaucagcgcuuuacagaucucaaaggcucuuuucagagccaccaaaaaaaaaaaaaaaaaaaaaaaaaaaaaaaaaaaaaaaaaaaaaaaaaaaaaaaaaaaaaaaaaaaaaaaaaaaaaaaaaaaaaaaaaaaaaaaaaaaaa

SEQ ID NO: 23946 - RNA, 4129 nt, Artificial Sequence
  SARS-CoV-2/Wuhan/WIV05/2019__EPI_ISL_402128 spike protein mRNA gc mod (1-1273)(Y453F_D614G)
aggagacccgugacccggaaguuguacggcuacgcgacuuucccucccacaaacccucgcgcccuuccuuuccuacuugggcccggcagaaagcuuaccauguucguguuccuggugcugcugccucugguguccagccagugugugaaccugaccaccagaacacagcugccuccagccuacaccaacagcuuuaccagaggcguguacuaccccgacaagguguucagauccagcgugcugcacucuacccaggaccuguuccugccuuucuucagcaacgugaccugguuccacgccauccacguguccggcaccaauggcaccaagagauucgacaaccccgugcugcccuucaacgacgggguguacuuugccagcaccgagaaguccaacaucaucagaggcuggaucuucggcaccacacuggacagcaagacccagagccugcugaucgugaacaacgccaccaacguggucaucaaagugugcgaguuccaguucugcaacgaccccuuccugggcgucuacuaccacaagaacaacaagagcuggauggaaagcgaguuccggguguacagcagcgccaacaacugcaccuucgaguacgugucccagccuuuccugauggaccuggaaggcaagcagggcaacuucaagaaccugcgcgaguucguguuuaagaacaucgacggcuacuucaagaucuacagcaagcacaccccuaucaaccucgugcgggaucugccucagggcuucucugcucuggaaccccugguggaucugcccaucggcaucaacaucacccgguuucagacacugcuggcccugcacagaagcuaccugacaccuggcgauagcagcagcggauggacagcuggugccgccgcuuacuaugugggcuaccugcagccuagaaccuuccugcugaaguacaacgagaacggcaccaucaccgacgccguggauugugcucuggauccucugagcgagacaaagugcacccugaaguccuucaccguggaaaagggcaucuaccagaccagcaacuuccgggugcagcccaccgaauccaucgugcgguuccccaauaucaccaaucugugccccuucggcgagguguucaaugccaccagauucgccucuguguacgccuggaaccggaagcggaucagcaauugcguggccgacuacuccgugcuguacaacuccgccagcuucagcaccuucaagugcuacggcguguccccuaccaagcugaacgaccugugcuucacaaacguguacgccgacagcuucgugauccggggagaugaagugcggcagauugccccuggacagacaggcaagaucgccgacuacaacuacaagcugcccgacgacuucaccggcugugugauugccuggaacagcaacaaccuggacuccaaagucggcggcaacuacaauuaccuguuccggcuguuccggaaguccaaucugaagcccuucgagcgggacaucuccaccgagaucuaucaggccggcagcaccccuuguaacggcguggaaggcuucaacugcuacuucccacugcaguccuacggcuuucagcccacaaauggcgugggcuaucagcccuacagagugguggugcugagcuucgaacugcugcaugccccugccacagugugcggcccuaagaaaagcaccaaucucgugaagaacaaaugcgugaacuucaacuucaacggccugaccggcaccggcgugcugacagagagcaacaagaaguuccugccauuccagcaguuuggccgggauaucgccgauaccacagacgccguuagagauccccagacacuggaaauccuggacaucaccccuugcagcuucggcggagugucugugaucaccccuggcaccaacaccagcaaucagguggcagugcuguaccagggcgugaacuguaccgaagugcccguggccauucacgccgaucagcugacaccuacauggcggguguacuccaccggcagcaauguguuucagaccagagccggcugucugaucggagccgagcacgugaacaauagcuacgagugcgacauccccaucggcgcuggaaucugcgccagcuaccagacacagacaaacagcccucggagagccagaagcguggccagccagagcaucauugccuacacaaugucucugggcgccgagaacagcguggccuacuccaacaacucuaucgcuauccccaccaacuucaccaucagcgugaccacagagauccugccuguguccaugaccaagaccagcguggacugcaccauguacaucugcggcgauuccaccgagugcuccaaccugcugcugcaguacggcagcuucugcacccagcugaauagagcccugacagggaucgccguggaacaggacaagaacacccaagagguguucgcccaagugaagcagaucuacaagaccccuccuaucaaggacuucggcggcuucaauuucagccagauucugcccgauccuagcaagcccagcaagcggagcuucaucgaggaccugcuguucaacaaagugacacuggccgacgccggcuucaucaagcaguauggcgauugucugggcgacauugccgccagggaucugauuugcgcccagaaguuuaacggacugacagugcugccuccucugcugaccgaugagaugaucgcccaguacacaucugcccugcuggccggcacaaucacaagcggcuggacauuuggagcaggcgccgcucugcagauccccuuugcuaugcagauggccuaccgguucaacggcaucggagugacccagaaugugcuguacgagaaccagaagcugaucgccaaccaguucaacagcgccaucggcaagauccaggacagccugagcagcacagcaagcgcccugggaaagcugcaggacguggucaaccagaaugcccaggcacugaacacccuggucaagcagcuguccuccaacuucggcgccaucagcucugugcugaacgauauccugagcagacuggacaaggucgaggccgaggugcagaucgacagacugaucacaggcagacugcagagccuccagacauacgugacccagcagcugaucagagccgccgagauuagagccucugccaaucuggccgccaccaagaugucugagugugugcugggccagagcaagagaguggacuuuugcggcaagggcuaccaccugaugagcuucccucagucugccccucacggcgugguguuucugcacgugacauaugugcccgcucaagagaagaauuucaccaccgcuccagccaucugccacgacggcaaagcccacuuuccuagagaaggcguguucguguccaacggcacccauugguucgugacacagcggaacuucuacgagccccagaucaucaccaccgacaacaccuucgugucuggcaacugcgacgucgugaucggcauugugaacaauaccguguacgacccucugcagcccgagcuggacagcuucaaagaggaacuggacaaguacuuuaagaaccacacaagccccgacguggaccugggcgauaucagcggaaucaaugccagcgucgugaacauccagaaagagaucgaccggcugaacgagguggccaagaaucugaacgagagccugaucgaccugcaagaacuggggaaguacgagcaguacaucaaguggcccugguacaucuggcugggcuuuaucgccggacugauugccaucgugauggucacaaucaugcuguguugcaugaccagcugcuguagcugccugaagggcuguuguagcuguggcagcugcugcaaguucgacgaggacgauucugagcccgugcugaagggcgugaaacugcacuacacaugaggacuaguguccaccugucccuccugggcugcuggauugucucguuuuccugccaaauaaacaggaucagcgcuuuacagaucucaaaggcucuuuucagagccaccaaaaaaaaaaaaaaaaaaaaaaaaaaaaaaaaaaaaaaaaaaaaaaaaaaaaaaaaaaaaaaaaaaaaaaaaaaaaaaaaaaaaaaaaaaaaaaaaaaaaa

SEQ ID NO: 23947 - RNA, 4129 nt, Artificial Sequence
  SARS-CoV-2/Wuhan/WIV05/2019__EPI_ISL_402128 spike protein mRNA gc mod (1-1273)(D614G_I692V)
aggagacccgugacccggaaguuguacggcuacgcgacuuucccucccacaaacccucgcgcccuuccuuuccuacuugggcccggcagaaagcuuaccauguucguguuccuggugcugcugccucugguguccagccagugugugaaccugaccaccagaacacagcugccuccagccuacaccaacagcuuuaccagaggcguguacuaccccgacaagguguucagauccagcgugcugcacucuacccaggaccuguuccugccuuucuucagcaacgugaccugguuccacgccauccacguguccggcaccaauggcaccaagagauucgacaaccccgugcugcccuucaacgacgggguguacuuugccagcaccgagaaguccaacaucaucagaggcuggaucuucggcaccacacuggacagcaagacccagagccugcugaucgugaacaacgccaccaacguggucaucaaagugugcgaguuccaguucugcaacgaccccuuccugggcgucuacuaccacaagaacaacaagagcuggauggaaagcgaguuccggguguacagcagcgccaacaacugcaccuucgaguacgugucccagccuuuccugauggaccuggaaggcaagcagggcaacuucaagaaccugcgcgaguucguguuuaagaacaucgacggcuacuucaagaucuacagcaagcacaccccuaucaaccucgugcgggaucugccucagggcuucucugcucuggaaccccugguggaucugcccaucggcaucaacaucacccgguuucagacacugcuggcccugcacagaagcuaccugacaccuggcgauagcagcagcggauggacagcuggugccgccgcuuacuaugugggcuaccugcagccuagaaccuuccugcugaaguacaacgagaacggcaccaucaccgacgccguggauugugcucuggauccucugagcgagacaaagugcacccugaaguccuucaccguggaaaagggcaucuaccagaccagcaacuuccgggugcagcccaccgaauccaucgugcgguuccccaauaucaccaaucugugccccuucggcgagguguucaaugccaccagauucgccucuguguacgccuggaaccggaagcggaucagcaauugcguggccgacuacuccgugcuguacaacuccgccagcuucagcaccuucaagugcuacggcguguccccuaccaagcugaacgaccugugcuucacaaacguguacgccgacagcuucgugauccggggagaugaagugcggcagauugccccuggacagacaggcaagaucgccgacuacaacuacaagcugcccgacgacuucaccggcugugugauugccuggaacagcaacaaccuggacuccaaagucggcggcaacuacaauuaccuguaccggcuguuccggaaguccaaucugaagcccuucgagcgggacaucuccaccgagaucuaucaggccggcagcaccccuuguaacggcguggaaggcuucaacugcuacuucccacugcaguccuacggcuuucagcccacaaauggcgugggcuaucagcccuacagagugguggugcugagcuucgaacugcugcaugccccugccacagugugcggcccuaagaaaagcaccaaucucgugaagaacaaaugcgugaacuucaacuucaacggccugaccggcaccggcgugcugacagagagcaacaagaaguuccugccauuccagcaguuuggccgggauaucgccgauaccacagacgccguuagagauccccagacacuggaaauccuggacaucaccccuugcagcuucggcggagugucugugaucaccccuggcaccaacaccagcaaucagguggcagugcuguaccagggcgugaacuguaccgaagugcccguggccauucacgccgaucagcugacaccuacauggcggguguacuccaccggcagcaauguguuucagaccagagccggcugucugaucggagccgagcacgugaacaauagcuacgagugcgacauccccaucggcgcuggaaucugcgccagcuaccagacacagacaaacagcccucggagagccagaagcguggccagccagagcgugauugccuacacaaugucucugggcgccgagaacagcguggccuacuccaacaacucuaucgcuauccccaccaacuucaccaucagcgugaccacagagauccugccuguguccaugaccaagaccagcguggacugcaccauguacaucugcggcgauuccaccgagugcuccaaccugcugcugcaguacggcagcuucugcacccagcugaauagagcccugacagggaucgccguggaacaggacaagaacacccaagagguguucgcccaagugaagcagaucuacaagaccccuccuaucaaggacuucggcggcuucaauuucagccagauucugcccgauccuagcaagcccagcaagcggagcuucaucgaggaccugcuguucaacaaagugacacuggccgacgccggcuucaucaagcaguauggcgauugucugggcgacauugccgccagggaucugauuugcgcccagaaguuuaacggacugacagugcugccuccucugcugaccgaugagaugaucgcccaguacacaucugcccugcuggccggcacaaucacaagcggcuggacauuuggagcaggcgccgcucugcagauccccuuugcuaugcagauggccuaccgguucaacggcaucggagugacccagaaugugcuguacgagaaccagaagcugaucgccaaccaguucaacagcgccaucggcaagauccaggacagccugagcagcacagcaagcgcccugggaaagcugcaggacguggucaaccagaaugcccaggcacugaacacccuggucaagcagcuguccuccaacuucggcgccaucagcucugugcugaacgauauccugagcagacuggacaaggucgaggccgaggugcagaucgacagacugaucacaggcagacugcagagccuccagacauacgugacccagcagcugaucagagccgccgagauuagagccucugccaaucuggccgccaccaagaugucugagugugugcugggccagagcaagagaguggacuuuugcggcaagggcuaccaccugaugagcuucccucagucugccccucacggcgugguguuucugcacgugacauaugugcccgcucaagagaagaauuucaccaccgcuccagccaucugccacgacggcaaagcccacuuuccuagagaaggcguguucguguccaacggcacccauugguucgugacacagcggaacuucuacgagccccagaucaucaccaccgacaacaccuucgugucuggcaacugcgacgucgugaucggcauugugaacaauaccguguacgacccucugcagcccgagcuggacagcuucaaagaggaacuggacaaguacuuuaagaaccacacaagccccgacguggaccugggcgauaucagcggaaucaaugccagcgucgugaacauccagaaagagaucgaccggcugaacgagguggccaagaaucugaacgagagccugaucgaccugcaagaacuggggaaguacgagcaguacaucaaguggcccugguacaucuggcugggcuuuaucgccggacugauugccaucgugauggucacaaucaugcuguguugcaugaccagcugcuguagcugccugaagggcuguuguagcuguggcagcugcugcaaguucgacgaggacgauucugagcccgugcugaagggcgugaaacugcacuacacaugaggacuaguguccaccugucccuccugggcugcuggauugucucguuuuccugccaaauaaacaggaucagcgcuuuacagaucucaaaggcucuuuucagagccaccaaaaaaaaaaaaaaaaaaaaaaaaaaaaaaaaaaaaaaaaaaaaaaaaaaaaaaaaaaaaaaaaaaaaaaaaaaaaaaaaaaaaaaaaaaaaaaaaaaaaa

SEQ ID NO: 23948 - RNA, 4129 nt, Artificial Sequence
  SARS-CoV-2/Wuhan/WIV05/2019__EPI_ISL_402128 spike protein mRNA gc mod (1-1273)(D614G_M1229I)
aggagacccgugacccggaaguuguacggcuacgcgacuuucccucccacaaacccucgcgcccuuccuuuccuacuugggcccggcagaaagcuuaccauguucguguuccuggugcugcugccucugguguccagccagugugugaaccugaccaccagaacacagcugccuccagccuacaccaacagcuuuaccagaggcguguacuaccccgacaagguguucagauccagcgugcugcacucuacccaggaccuguuccugccuuucuucagcaacgugaccugguuccacgccauccacguguccggcaccaauggcaccaagagauucgacaaccccgugcugcccuucaacgacgggguguacuuugccagcaccgagaaguccaacaucaucagaggcuggaucuucggcaccacacuggacagcaagacccagagccugcugaucgugaacaacgccaccaacguggucaucaaagugugcgaguuccaguucugcaacgaccccuuccugggcgucuacuaccacaagaacaacaagagcuggauggaaagcgaguuccggguguacagcagcgccaacaacugcaccuucgaguacgugucccagccuuuccugauggaccuggaaggcaagcagggcaacuucaagaaccugcgcgaguucguguuuaagaacaucgacggcuacuucaagaucuacagcaagcacaccccuaucaaccucgugcgggaucugccucagggcuucucugcucuggaaccccugguggaucugcccaucggcaucaacaucacccgguuucagacacugcuggcccugcacagaagcuaccugacaccuggcgauagcagcagcggauggacagcuggugccgccgcuuacuaugugggcuaccugcagccuagaaccuuccugcugaaguacaacgagaacggcaccaucaccgacgccguggauugugcucuggauccucugagcgagacaaagugcacccugaaguccuucaccguggaaaagggcaucuaccagaccagcaacuuccgggugcagcccaccgaauccaucgugcgguuccccaauaucaccaaucugugccccuucggcgagguguucaaugccaccagauucgccucuguguacgccuggaaccggaagcggaucagcaauugcguggccgacuacuccgugcuguacaacuccgccagcuucagcaccuucaagugcuacggcguguccccuaccaagcugaacgaccugugcuucacaaacguguacgccgacagcuucgugauccggggagaugaagugcggcagauugccccuggacagacaggcaagaucgccgacuacaacuacaagcugcccgacgacuucaccggcugugugauugccuggaacagcaacaaccuggacuccaaagucggcggcaacuacaauuaccuguaccggcuguuccggaaguccaaucugaagcccuucgagcgggacaucuccaccgagaucuaucaggccggcagcaccccuuguaacggcguggaaggcuucaacugcuacuucccacugcaguccuacggcuuucagcccacaaauggcgugggcuaucagcccuacagagugguggugcugagcuucgaacugcugcaugccccugccacagugugcggcccuaagaaaagcaccaaucucgugaagaacaaaugcgugaacuucaacuucaacggccugaccggcaccggcgugcugacagagagcaacaagaaguuccugccauuccagcaguuuggccgggauaucgccgauaccacagacgccguuagagauccccagacacuggaaauccuggacaucaccccuugcagcuucggcggagugucugugaucaccccuggcaccaacaccagcaaucagguggcagugcuguaccagggcgugaacuguaccgaagugcccguggccauucacgccgaucagcugacaccuacauggcggguguacuccaccggcagcaauguguuucagaccagagccggcugucugaucggagccgagcacgugaacaauagcuacgagugcgacauccccaucggcgcuggaaucugcgccagcuaccagacacagacaaacagcccucggagagccagaagcguggccagccagagcaucauugccuacacaaugucucugggcgccgagaacagcguggccuacuccaacaacucuaucgcuauccccaccaacuucaccaucagcgugaccacagagauccugccuguguccaugaccaagaccagcguggacugcaccauguacaucugcggcgauuccaccgagugcuccaaccugcugcugcaguacggcagcuucugcacccagcugaauagagcccugacagggaucgccguggaacaggacaagaacacccaagagguguucgcccaagugaagcagaucuacaagaccccuccuaucaaggacuucggcggcuucaauuucagccagauucugcccgauccuagcaagcccagcaagcggagcuucaucgaggaccugcuguucaacaaagugacacuggccgacgccggcuucaucaagcaguauggcgauugucugggcgacauugccgccagggaucugauuugcgcccagaaguuuaacggacugacagugcugccuccucugcugaccgaugagaugaucgcccaguacacaucugcccugcuggccggcacaaucacaagcggcuggacauuuggagcaggcgccgcucugcagauccccuuugcuaugcagauggccuaccgguucaacggcaucggagugacccagaaugugcuguacgagaaccagaagcugaucgccaaccaguucaacagcgccaucggcaagauccaggacagccugagcagcacagcaagcgcccugggaaagcugcaggacguggucaaccagaaugcccaggcacugaacacccuggucaagcagcuguccuccaacuucggcgccaucagcucugugcugaacgauauccugagcagacuggacaaggucgaggccgaggugcagaucgacagacugaucacaggcagacugcagagccuccagacauacgugacccagcagcugaucagagccgccgagauuagagccucugccaaucuggccgccaccaagaugucugagugugugcugggccagagcaagagaguggacuuuugcggcaagggcuaccaccugaugagcuucccucagucugccccucacggcgugguguuucugcacgugacauaugugcccgcucaagagaagaauuucaccaccgcuccagccaucugccacgacggcaaagcccacuuuccuagagaaggcguguucguguccaacggcacccauugguucgugacacagcggaacuucuacgagccccagaucaucaccaccgacaacaccuucgugucuggcaacugcgacgucgugaucggcauugugaacaauaccguguacgacccucugcagcccgagcuggacagcuucaaagaggaacuggacaaguacuuuaagaaccacacaagccccgacguggaccugggcgauaucagcggaaucaaugccagcgucgugaacauccagaaagagaucgaccggcugaacgagguggccaagaaucugaacgagagccugaucgaccugcaagaacuggggaaguacgagcaguacaucaaguggcccugguacaucuggcugggcuuuaucgccggacugauugccaucgugaucgucacaaucaugcuguguugcaugaccagcugcuguagcugccugaagggcuguuguagcuguggcagcugcugcaaguucgacgaggacgauucugagcccgugcugaagggcgugaaacugcacuacacaugaggacuaguguccaccugucccuccugggcugcuggauugucucguuuuccugccaaauaaacaggaucagcgcuuuacagaucucaaaggcucuuuucagagccaccaaaaaaaaaaaaaaaaaaaaaaaaaaaaaaaaaaaaaaaaaaaaaaaaaaaaaaaaaaaaaaaaaaaaaaaaaaaaaaaaaaaaaaaaaaaaaaaaaaaaa

SEQ ID NO: 23949 - RNA, 4123 nt, Artificial Sequence
  SARS-CoV-2/Wuhan/WIV05/2019__EPI_ISL_402128 spike protein mRNA gc mod (1-1273)(H69del_V70del_A222V_Y453F_S477N_D614G_I692V)
aggagacccgugacccggaaguuguacggcuacgcgacuuucccucccacaaacccucgcgcccuuccuuuccuacuugggcccggcagaaagcuuaccauguucguguuccuggugcugcugccucugguguccagccagugugugaaccugaccaccagaacacagcugccuccagccuacaccaacagcuuuaccagaggcguguacuaccccgacaagguguucagauccagcgugcugcacucuacccaggaccuguuccugccuuucuucagcaacgugaccugguuccacgccaucuccggcaccaauggcaccaagagauucgacaaccccgugcugcccuucaacgacgggguguacuuugccagcaccgagaaguccaacaucaucagaggcuggaucuucggcaccacacuggacagcaagacccagagccugcugaucgugaacaacgccaccaacguggucaucaaagugugcgaguuccaguucugcaacgaccccuuccugggcgucuacuaccacaagaacaacaagagcuggauggaaagcgaguuccggguguacagcagcgccaacaacugcaccuucgaguacgugucccagccuuuccugauggaccuggaaggcaagcagggcaacuucaagaaccugcgcgaguucguguuuaagaacaucgacggcuacuucaagaucuacagcaagcacaccccuaucaaccucgugcgggaucugccucagggcuucucugugcuggaaccccugguggaucugcccaucggcaucaacaucacccgguuucagacacugcuggcccugcacagaagcuaccugacaccuggcgauagcagcagcggauggacagcuggugccgccgcuuacuaugugggcuaccugcagccuagaaccuuccugcugaaguacaacgagaacggcaccaucaccgacgccguggauugugcucuggauccucugagcgagacaaagugcacccugaaguccuucaccguggaaaagggcaucuaccagaccagcaacuuccgggugcagcccaccgaauccaucgugcgguuccccaauaucaccaaucugugccccuucggcgagguguucaaugccaccagauucgccucuguguacgccuggaaccggaagcggaucagcaauugcguggccgacuacuccgugcuguacaacuccgccagcuucagcaccuucaagugcuacggcguguccccuaccaagcugaacgaccugugcuucacaaacguguacgccgacagcuucgugauccggggagaugaagugcggcagauugccccuggacagacaggcaagaucgccgacuacaacuacaagcugcccgacgacuucaccggcugugugauugccuggaacagcaacaaccuggacuccaaagucggcggcaacuacaauuaccuguuccggcuguuccggaaguccaaucugaagcccuucgagcgggacaucuccaccgagaucuaucaggccggcaacaccccuuguaacggcguggaaggcuucaacugcuacuucccacugcaguccuacggcuuucagcccacaaauggcgugggcuaucagcccuacagagugguggugcugagcuucgaacugcugcaugccccugccacagugugcggcccuaagaaaagcaccaaucucgugaagaacaaaugcgugaacuucaacuucaacggccugaccggcaccggcgugcugacagagagcaacaagaaguuccugccauuccagcaguuuggccgggauaucgccgauaccacagacgccguuagagauccccagacacuggaaauccuggacaucaccccuugcagcuucggcggagugucugugaucaccccuggcaccaacaccagcaaucagguggcagugcuguaccagggcgugaacuguaccgaagugcccguggccauucacgccgaucagcugacaccuacauggcggguguacuccaccggcagcaauguguuucagaccagagccggcugucugaucggagccgagcacgugaacaauagcuacgagugcgacauccccaucggcgcuggaaucugcgccagcuaccagacacagacaaacagcccucggagagccagaagcguggccagccagagcgugauugccuacacaaugucucugggcgccgagaacagcguggccuacuccaacaacucuaucgcuauccccaccaacuucaccaucagcgugaccacagagauccugccuguguccaugaccaagaccagcguggacugcaccauguacaucugcggcgauuccaccgagugcuccaaccugcugcugcaguacggcagcuucugcacccagcugaauagagcccugacagggaucgccguggaacaggacaagaacacccaagagguguucgcccaagugaagcagaucuacaagaccccuccuaucaaggacuucggcggcuucaauuucagccagauucugcccgauccuagcaagcccagcaagcggagcuucaucgaggaccugcuguucaacaaagugacacuggccgacgccggcuucaucaagcaguauggcgauugucugggcgacauugccgccagggaucugauuugcgcccagaaguuuaacggacugacagugcugccuccucugcugaccgaugagaugaucgcccaguacacaucugcccugcuggccggcacaaucacaagcggcuggacauuuggagcaggcgccgcucugcagauccccuuugcuaugcagauggccuaccgguucaacggcaucggagugacccagaaugugcuguacgagaaccagaagcugaucgccaaccaguucaacagcgccaucggcaagauccaggacagccugagcagcacagcaagcgcccugggaaagcugcaggacguggucaaccagaaugcccaggcacugaacacccuggucaagcagcuguccuccaacuucggcgccaucagcucugugcugaacgauauccugagcagacuggacaaggucgaggccgaggugcagaucgacagacugaucacaggcagacugcagagccuccagacauacgugacccagcagcugaucagagccgccgagauuagagccucugccaaucuggccgccaccaagaugucugagugugugcugggccagagcaagagaguggacuuuugcggcaagggcuaccaccugaugagcuucccucagucugccccucacggcgugguguuucugcacgugacauaugugcccgcucaagagaagaauuucaccaccgcuccagccaucugccacgacggcaaagcccacuuuccuagagaaggcguguucguguccaacggcacccauugguucgugacacagcggaacuucuacgagccccagaucaucaccaccgacaacaccuucgugucuggcaacugcgacgucgugaucggcauugugaacaauaccguguacgacccucugcagcccgagcuggacagcuucaaagaggaacuggacaaguacuuuaagaaccacacaagccccgacguggaccugggcgauaucagcggaaucaaugccagcgucgugaacauccagaaagagaucgaccggcugaacgagguggccaagaaucugaacgagagccugaucgaccugcaagaacuggggaaguacgagcaguacaucaaguggcccugguacaucuggcugggcuuuaucgccggacugauugccaucgugauggucacaaucaugcuguguugcaugaccagcugcuguagcugccugaagggcuguuguagcuguggcagcugcugcaaguucgacgaggacgauucugagcccgugcugaagggcgugaaacugcacuacacaugaggacuaguguccaccugucccuccugggcugcuggauugucucguuuuccugccaaauaaacaggaucagcgcuuuacagaucucaaaggcucuuuucagagccaccaaaaaaaaaaaaaaaaaaaaaaaaaaaaaaaaaaaaaaaaaaaaaaaaaaaaaaaaaaaaaaaaaaaaaaaaaaaaaaaaaaaaaaaaaaaaaaaaaaaaa

SEQ ID NO: 23950 - RNA, 4123 nt, Artificial Sequence
  SARS-CoV-2/Wuhan/WIV05/2019__EPI_ISL_402128 spike protein mRNA gc mod (1-1273)(H69del_V70del_Y453F_D614G_I692V_M1229I)
aggagacccgugacccggaaguuguacggcuacgcgacuuucccucccacaaacccucgcgcccuuccuuuccuacuugggcccggcagaaagcuuaccauguucguguuccuggugcugcugccucugguguccagccagugugugaaccugaccaccagaacacagcugccuccagccuacaccaacagcuuuaccagaggcguguacuaccccgacaagguguucagauccagcgugcugcacucuacccaggaccuguuccugccuuucuucagcaacgugaccugguuccacgccaucuccggcaccaauggcaccaagagauucgacaaccccgugcugcccuucaacgacgggguguacuuugccagcaccgagaaguccaacaucaucagaggcuggaucuucggcaccacacuggacagcaagacccagagccugcugaucgugaacaacgccaccaacguggucaucaaagugugcgaguuccaguucugcaacgaccccuuccugggcgucuacuaccacaagaacaacaagagcuggauggaaagcgaguuccggguguacagcagcgccaacaacugcaccuucgaguacgugucccagccuuuccugauggaccuggaaggcaagcagggcaacuucaagaaccugcgcgaguucguguuuaagaacaucgacggcuacuucaagaucuacagcaagcacaccccuaucaaccucgugcgggaucugccucagggcuucucugcucuggaaccccugguggaucugcccaucggcaucaacaucacccgguuucagacacugcuggcccugcacagaagcuaccugacaccuggcgauagcagcagcggauggacagcuggugccgccgcuuacuaugugggcuaccugcagccuagaaccuuccugcugaaguacaacgagaacggcaccaucaccgacgccguggauugugcucuggauccucugagcgagacaaagugcacccugaaguccuucaccguggaaaagggcaucuaccagaccagcaacuuccgggugcagcccaccgaauccaucgugcgguuccccaauaucaccaaucugugccccuucggcgagguguucaaugccaccagauucgccucuguguacgccuggaaccggaagcggaucagcaauugcguggccgacuacuccgugcuguacaacuccgccagcuucagcaccuucaagugcuacggcguguccccuaccaagcugaacgaccugugcuucacaaacguguacgccgacagcuucgugauccggggagaugaagugcggcagauugccccuggacagacaggcaagaucgccgacuacaacuacaagcugcccgacgacuucaccggcugugugauugccuggaacagcaacaaccuggacuccaaagucggcggcaacuacaauuaccuguuccggcuguuccggaaguccaaucugaagcccuucgagcgggacaucuccaccgagaucuaucaggccggcagcaccccuuguaacggcguggaaggcuucaacugcuacuucccacugcaguccuacggcuuucagcccacaaauggcgugggcuaucagcccuacagagugguggugcugagcuucgaacugcugcaugccccugccacagugugcggcccuaagaaaagcaccaaucucgugaagaacaaaugcgugaacuucaacuucaacggccugaccggcaccggcgugcugacagagagcaacaagaaguuccugccauuccagcaguuuggccgggauaucgccgauaccacagacgccguuagagauccccagacacuggaaauccuggacaucaccccuugcagcuucggcggagugucugugaucaccccuggcaccaacaccagcaaucagguggcagugcuguaccagggcgugaacuguaccgaagugcccguggccauucacgccgaucagcugacaccuacauggcggguguacuccaccggcagcaauguguuucagaccagagccggcugucugaucggagccgagcacgugaacaauagcuacgagugcgacauccccaucggcgcuggaaucugcgccagcuaccagacacagacaaacagcccucggagagccagaagcguggccagccagagcgugauugccuacacaaugucucugggcgccgagaacagcguggccuacuccaacaacucuaucgcuauccccaccaacuucaccaucagcgugaccacagagauccugccuguguccaugaccaagaccagcguggacugcaccauguacaucugcggcgauuccaccgagugcuccaaccugcugcugcaguacggcagcuucugcacccagcugaauagagcccugacagggaucgccguggaacaggacaagaacacccaagagguguucgcccaagugaagcagaucuacaagaccccuccuaucaaggacuucggcggcuucaauuucagccagauucugcccgauccuagcaagcccagcaagcggagcuucaucgaggaccugcuguucaacaaagugacacuggccgacgccggcuucaucaagcaguauggcgauugucugggcgacauugccgccagggaucugauuugcgcccagaaguuuaacggacugacagugcugccuccucugcugaccgaugagaugaucgcccaguacacaucugcccugcuggccggcacaaucacaagcggcuggacauuuggagcaggcgccgcucugcagauccccuuugcuaugcagauggccuaccgguucaacggcaucggagugacccagaaugugcuguacgagaaccagaagcugaucgccaaccaguucaacagcgccaucggcaagauccaggacagccugagcagcacagcaagcgcccugggaaagcugcaggacguggucaaccagaaugcccaggcacugaacacccuggucaagcagcuguccuccaacuucggcgccaucagcucugugcugaacgauauccugagcagacuggacaaggucgaggccgaggugcagaucgacagacugaucacaggcagacugcagagccuccagacauacgugacccagcagcugaucagagccgccgagauuagagccucugccaaucuggccgccaccaagaugucugagugugugcugggccagagcaagagaguggacuuuugcggcaagggcuaccaccugaugagcuucccucagucugccccucacggcgugguguuucugcacgugacauaugugcccgcucaagagaagaauuucaccaccgcuccagccaucugccacgacggcaaagcccacuuuccuagagaaggcguguucguguccaacggcacccauugguucgugacacagcggaacuucuacgagccccagaucaucaccaccgacaacaccuucgugucuggcaacugcgacgucgugaucggcauugugaacaauaccguguacgacccucugcagcccgagcuggacagcuucaaagaggaacuggacaaguacuuuaagaaccacacaagccccgacguggaccugggcgauaucagcggaaucaaugccagcgucgugaacauccagaaagagaucgaccggcugaacgagguggccaagaaucugaacgagagccugaucgaccugcaagaacuggggaaguacgagcaguacaucaaguggcccugguacaucuggcugggcuuuaucgccggacugauugccaucgugaucgucacaaucaugcuguguugcaugaccagcugcuguagcugccugaagggcuguuguagcuguggcagcugcugcaaguucgacgaggacgauucugagcccgugcugaagggcgugaaacugcacuacacaugaggacuaguguccaccugucccuccugggcugcuggauugucucguuuuccugccaaauaaacaggaucagcgcuuuacagaucucaaaggcucuuuucagagccaccaaaaaaaaaaaaaaaaaaaaaaaaaaaaaaaaaaaaaaaaaaaaaaaaaaaaaaaaaaaaaaaaaaaaaaaaaaaaaaaaaaaaaaaaaaaaaaaaaaaaa

SEQ ID NO: 23951 - RNA, 4120 nt, Artificial Sequence
  SARS-CoV-2/Wuhan/WIV05/2019__EPI_ISL_402128 spike protein mRNA gc mod (1-1273)(H69del_V70del_Y144del_N501Y_A570D_D614G_P681H_T716I_S982 A_D1118H)
aggagacccgugacccggaaguuguacggcuacgcgacuuucccucccacaaacccucgcgcccuuccuuuccuacuugggcccggcagaaagcuuaccauguucguguuccuggugcugcugccucugguguccagccagugugugaaccugaccaccagaacacagcugccuccagccuacaccaacagcuuuaccagaggcguguacuaccccgacaagguguucagauccagcgugcugcacucuacccaggaccuguuccugccuuucuucagcaacgugaccugguuccacgccaucuccggcaccaauggcaccaagagauucgacaaccccgugcugcccuucaacgacgggguguacuuugccagcaccgagaaguccaacaucaucagaggcuggaucuucggcaccacacuggacagcaagacccagagccugcugaucgugaacaacgccaccaacguggucaucaaagugugcgaguuccaguucugcaacgaccccuuccugggcgucuaccacaagaacaacaagagcuggauggaaagcgaguuccggguguacagcagcgccaacaacugcaccuucgaguacgugucccagccuuuccugauggaccuggaaggcaagcagggcaacuucaagaaccugcgcgaguucguguuuaagaacaucgacggcuacuucaagaucuacagcaagcacaccccuaucaaccucgugcgggaucugccucagggcuucucugcucuggaaccccugguggaucugcccaucggcaucaacaucacccgguuucagacacugcuggcccugcacagaagcuaccugacaccuggcgauagcagcagcggauggacagcuggugccgccgcuuacuaugugggcuaccugcagccuagaaccuuccugcugaaguacaacgagaacggcaccaucaccgacgccguggauugugcucuggauccucugagcgagacaaagugcacccugaaguccuucaccguggaaaagggcaucuaccagaccagcaacuuccgggugcagcccaccgaauccaucgugcgguuccccaauaucaccaaucugugccccuucggcgagguguucaaugccaccagauucgccucuguguacgccuggaaccggaagcggaucagcaauugcguggccgacuacuccgugcuguacaacuccgccagcuucagcaccuucaagugcuacggcguguccccuaccaagcugaacgaccugugcuucacaaacguguacgccgacagcuucgugauccggggagaugaagugcggcagauugccccuggacagacaggcaagaucgccgacuacaacuacaagcugcccgacgacuucaccggcugugugauugccuggaacagcaacaaccuggacuccaaagucggcggcaacuacaauuaccuguaccggcuguuccggaaguccaaucugaagcccuucgagcgggacaucuccaccgagaucuaucaggccggcagcaccccuuguaacggcguggaaggcuucaacugcuacuucccacugcaguccuacggcuuucagcccacauacggcgugggcuaucagcccuacagagugguggugcugagcuucgaacugcugcaugccccugccacagugugcggcccuaagaaaagcaccaaucucgugaagaacaaaugcgugaacuucaacuucaacggccugaccggcaccggcgugcugacagagagcaacaagaaguuccugccauuccagcaguuuggccgggauaucgacgauaccacagacgccguuagagauccccagacacuggaaauccuggacaucaccccuugcagcuucggcggagugucugugaucaccccuggcaccaacaccagcaaucagguggcagugcuguaccagggcgugaacuguaccgaagugcccguggccauucacgccgaucagcugacaccuacauggcggguguacuccaccggcagcaauguguuucagaccagagccggcugucugaucggagccgagcacgugaacaauagcuacgagugcgacauccccaucggcgcuggaaucugcgccagcuaccagacacagacaaacagccaccggagagccagaagcguggccagccagagcaucauugccuacacaaugucucugggcgccgagaacagcguggccuacuccaacaacucuaucgcuauccccaucaacuucaccaucagcgugaccacagagauccugccuguguccaugaccaagaccagcguggacugcaccauguacaucugcggcgauuccaccgagugcuccaaccugcugcugcaguacggcagcuucugcacccagcugaauagagcccugacagggaucgccguggaacaggacaagaacacccaagagguguucgcccaagugaagcagaucuacaagaccccuccuaucaaggacuucggcggcuucaauuucagccagauucugcccgauccuagcaagcccagcaagcggagcuucaucgaggaccugcuguucaacaaagugacacuggccgacgccggcuucaucaagcaguauggcgauugucugggcgacauugccgccagggaucugauuugcgcccagaaguuuaacggacugacagugcugccuccucugcugaccgaugagaugaucgcccaguacacaucugcccugcuggccggcacaaucacaagcggcuggacauuuggagcaggcgccgcucugcagauccccuuugcuaugcagauggccuaccgguucaacggcaucggagugacccagaaugugcuguacgagaaccagaagcugaucgccaaccaguucaacagcgccaucggcaagauccaggacagccugagcagcacagcaagcgcccugggaaagcugcaggacguggucaaccagaaugcccaggcacugaacacccuggucaagcagcuguccuccaacuucggcgccaucagcucugugcugaacgauauccuggccagacuggacaaggucgaggccgaggugcagaucgacagacugaucacaggcagacugcagagccuccagacauacgugacccagcagcugaucagagccgccgagauuagagccucugccaaucuggccgccaccaagaugucugagugugugcugggccagagcaagagaguggacuuuugcggcaagggcuaccaccugaugagcuucccucagucugccccucacggcgugguguuucugcacgugacauaugugcccgcucaagagaagaauuucaccaccgcuccagccaucugccacgacggcaaagcccacuuuccuagagaaggcguguucguguccaacggcacccauugguucgugacacagcggaacuucuacgagccccagaucaucaccacccacaacaccuucgugucuggcaacugcgacgucgugaucggcauugugaacaauaccguguacgacccucugcagcccgagcuggacagcuucaaagaggaacuggacaaguacuuuaagaaccacacaagccccgacguggaccugggcgauaucagcggaaucaaugccagcgucgugaacauccagaaagagaucgaccggcugaacgagguggccaagaaucugaacgagagccugaucgaccugcaagaacuggggaaguacgagcaguacaucaaguggcccugguacaucuggcugggcuuuaucgccggacugauugccaucgugauggucacaaucaugcuguguugcaugaccagcugcuguagcugccugaagggcuguuguagcuguggcagcugcugcaaguucgacgaggacgauucugagcccgugcugaagggcgugaaacugcacuacacaugaggacuaguguccaccugucccuccugggcugcuggauugucucguuuuccugccaaauaaacaggaucagcgcuuuacagaucucaaaggcucuuuucagagccaccaaaaaaaaaaaaaaaaaaaaaaaaaaaaaaaaaaaaaaaaaaaaaaaaaaaaaaaaaaaaaaaaaaaaaaaaaaaaaaaaaaaaaaaaaaaaaaaaaaaaa

SEQ ID NO: 23952 - RNA, 4129 nt, Artificial Sequence
  SARS-CoV-2/Wuhan/WIV05/2019__EPI_ISL_402128 spike protein mRNA gc mod (1-1273)(K417N_E484K_N501Y_D614G)
aggagacccgugacccggaaguuguacggcuacgcgacuuucccucccacaaacccucgcgcccuuccuuuccuacuugggcccggcagaaagcuuaccauguucguguuccuggugcugcugccucugguguccagccagugugugaaccugaccaccagaacacagcugccuccagccuacaccaacagcuuuaccagaggcguguacuaccccgacaagguguucagauccagcgugcugcacucuacccaggaccuguuccugccuuucuucagcaacgugaccugguuccacgccauccacguguccggcaccaauggcaccaagagauucgacaaccccgugcugcccuucaacgacgggguguacuuugccagcaccgagaaguccaacaucaucagaggcuggaucuucggcaccacacuggacagcaagacccagagccugcugaucgugaacaacgccaccaacguggucaucaaagugugcgaguuccaguucugcaacgaccccuuccugggcgucuacuaccacaagaacaacaagagcuggauggaaagcgaguuccggguguacagcagcgccaacaacugcaccuucgaguacgugucccagccuuuccugauggaccuggaaggcaagcagggcaacuucaagaaccugcgcgaguucguguuuaagaacaucgacggcuacuucaagaucuacagcaagcacaccccuaucaaccucgugcgggaucugccucagggcuucucugcucuggaaccccugguggaucugcccaucggcaucaacaucacccgguuucagacacugcuggcccugcacagaagcuaccugacaccuggcgauagcagcagcggauggacagcuggugccgccgcuuacuaugugggcuaccugcagccuagaaccuuccugcugaaguacaacgagaacggcaccaucaccgacgccguggauugugcucuggauccucugagcgagacaaagugcacccugaaguccuucaccguggaaaagggcaucuaccagaccagcaacuuccgggugcagcccaccgaauccaucgugcgguuccccaauaucaccaaucugugccccuucggcgagguguucaaugccaccagauucgccucuguguacgccuggaaccggaagcggaucagcaauugcguggccgacuacuccgugcuguacaacuccgccagcuucagcaccuucaagugcuacggcguguccccuaccaagcugaacgaccugugcuucacaaacguguacgccgacagcuucgugauccggggagaugaagugcggcagauugccccuggacagacaggcaacaucgccgacuacaacuacaagcugcccgacgacuucaccggcugugugauugccuggaacagcaacaaccuggacuccaaagucggcggcaacuacaauuaccuguaccggcuguuccggaaguccaaucugaagcccuucgagcgggacaucuccaccgagaucuaucaggccggcagcaccccuuguaacggcgugaagggcuucaacugcuacuucccacugcaguccuacggcuuucagcccacauacggcgugggcuaucagcccuacagagugguggugcugagcuucgaacugcugcaugccccugccacagugugcggcccuaagaaaagcaccaaucucgugaagaacaaaugcgugaacuucaacuucaacggccugaccggcaccggcgugcugacagagagcaacaagaaguuccugccauuccagcaguuuggccgggauaucgccgauaccacagacgccguuagagauccccagacacuggaaauccuggacaucaccccuugcagcuucggcggagugucugugaucaccccuggcaccaacaccagcaaucagguggcagugcuguaccagggcgugaacuguaccgaagugcccguggccauucacgccgaucagcugacaccuacauggcggguguacuccaccggcagcaauguguuucagaccagagccggcugucugaucggagccgagcacgugaacaauagcuacgagugcgacauccccaucggcgcuggaaucugcgccagcuaccagacacagacaaacagcccucggagagccagaagcguggccagccagagcaucauugccuacacaaugucucugggcgccgagaacagcguggccuacuccaacaacucuaucgcuauccccaccaacuucaccaucagcgugaccacagagauccugccuguguccaugaccaagaccagcguggacugcaccauguacaucugcggcgauuccaccgagugcuccaaccugcugcugcaguacggcagcuucugcacccagcugaauagagcccugacagggaucgccguggaacaggacaagaacacccaagagguguucgcccaagugaagcagaucuacaagaccccuccuaucaaggacuucggcggcuucaauuucagccagauucugcccgauccuagcaagcccagcaagcggagcuucaucgaggaccugcuguucaacaaagugacacuggccgacgccggcuucaucaagcaguauggcgauugucugggcgacauugccgccagggaucugauuugcgcccagaaguuuaacggacugacagugcugccuccucugcugaccgaugagaugaucgcccaguacacaucugcccugcuggccggcacaaucacaagcggcuggacauuuggagcaggcgccgcucugcagauccccuuugcuaugcagauggccuaccgguucaacggcaucggagugacccagaaugugcuguacgagaaccagaagcugaucgccaaccaguucaacagcgccaucggcaagauccaggacagccugagcagcacagcaagcgcccugggaaagcugcaggacguggucaaccagaaugcccaggcacugaacacccuggucaagcagcuguccuccaacuucggcgccaucagcucugugcugaacgauauccugagcagacuggacaaggucgaggccgaggugcagaucgacagacugaucacaggcagacugcagagccuccagacauacgugacccagcagcugaucagagccgccgagauuagagccucugccaaucuggccgccaccaagaugucugagugugugcugggccagagcaagagaguggacuuuugcggcaagggcuaccaccugaugagcuucccucagucugccccucacggcgugguguuucugcacgugacauaugugcccgcucaagagaagaauuucaccaccgcuccagccaucugccacgacggcaaagcccacuuuccuagagaaggcguguucguguccaacggcacccauugguucgugacacagcggaacuucuacgagccccagaucaucaccaccgacaacaccuucgugucuggcaacugcgacgucgugaucggcauugugaacaauaccguguacgacccucugcagcccgagcuggacagcuucaaagaggaacuggacaaguacuuuaagaaccacacaagccccgacguggaccugggcgauaucagcggaaucaaugccagcgucgugaacauccagaaagagaucgaccggcugaacgagguggccaagaaucugaacgagagccugaucgaccugcaagaacuggggaaguacgagcaguacaucaaguggcccugguacaucuggcugggcuuuaucgccggacugauugccaucgugauggucacaaucaugcuguguugcaugaccagcugcuguagcugccugaagggcuguuguagcuguggcagcugcugcaaguucgacgaggacgauucugagcccgugcugaagggcgugaaacugcacuacacaugaggacuaguguccaccugucccuccugggcugcuggauugucucguuuuccugccaaauaaacaggaucagcgcuuuacagaucucaaaggcucuuuucagagccaccaaaaaaaaaaaaaaaaaaaaaaaaaaaaaaaaaaaaaaaaaaaaaaaaaaaaaaaaaaaaaaaaaaaaaaaaaaaaaaaaaaaaaaaaaaaaaaaaaaaaa

SEQ ID NO: 23953 - RNA, 4120 nt, Artificial Sequence
  SARS-CoV-2/Wuhan/WIV05/2019__EPI_ISL_402128 spike protein mRNA gc mod (1-1273)(L18F_D80A_D215G_L242del_A243del_L244del_R246I_K417N_E484 K_N501Y_D614G_A701V)
aggagacccgugacccggaaguuguacggcuacgcgacuuucccucccacaaacccucgcgcccuuccuuuccuacuugggcccggcagaaagcuuaccauguucguguuccuggugcugcugccucugguguccagccagugugugaacuucaccaccagaacacagcugccuccagccuacaccaacagcuuuaccagaggcguguacuaccccgacaagguguucagauccagcgugcugcacucuacccaggaccuguuccugccuuucuucagcaacgugaccugguuccacgccauccacguguccggcaccaauggcaccaagagauucgccaaccccgugcugcccuucaacgacgggguguacuuugccagcaccgagaaguccaacaucaucagaggcuggaucuucggcaccacacuggacagcaagacccagagccugcugaucgugaacaacgccaccaacguggucaucaaagugugcgaguuccaguucugcaacgaccccuuccugggcgucuacuaccacaagaacaacaagagcuggauggaaagcgaguuccggguguacagcagcgccaacaacugcaccuucgaguacgugucccagccuuuccugauggaccuggaaggcaagcagggcaacuucaagaaccugcgcgaguucguguuuaagaacaucgacggcuacuucaagaucuacagcaagcacaccccuaucaaccucgugcggggccugccucagggcuucucugcucuggaaccccugguggaucugcccaucggcaucaacaucacccgguuucagacacugcacaucagcuaccugacaccuggcgauagcagcagcggauggacagcuggugccgccgcuuacuaugugggcuaccugcagccuagaaccuuccugcugaaguacaacgagaacggcaccaucaccgacgccguggauugugcucuggauccucugagcgagacaaagugcacccugaaguccuucaccguggaaaagggcaucuaccagaccagcaacuuccgggugcagcccaccgaauccaucgugcgguuccccaauaucaccaaucugugccccuucggcgagguguucaaugccaccagauucgccucuguguacgccuggaaccggaagcggaucagcaauugcguggccgacuacuccgugcuguacaacuccgccagcuucagcaccuucaagugcuacggcguguccccuaccaagcugaacgaccugugcuucacaaacguguacgccgacagcuucgugauccggggagaugaagugcggcagauugccccuggacagacaggcaacaucgccgacuacaacuacaagcugcccgacgacuucaccggcugugugauugccuggaacagcaacaaccuggacuccaaagucggcggcaacuacaauuaccuguaccggcuguuccggaaguccaaucugaagcccuucgagcgggacaucuccaccgagaucuaucaggccggcagcaccccuuguaacggcgugaagggcuucaacugcuacuucccacugcaguccuacggcuuucagcccacauacggcgugggcuaucagcccuacagagugguggugcugagcuucgaacugcugcaugccccugccacagugugcggcccuaagaaaagcaccaaucucgugaagaacaaaugcgugaacuucaacuucaacggccugaccggcaccggcgugcugacagagagcaacaagaaguuccugccauuccagcaguuuggccgggauaucgccgauaccacagacgccguuagagauccccagacacuggaaauccuggacaucaccccuugcagcuucggcggagugucugugaucaccccuggcaccaacaccagcaaucagguggcagugcuguaccagggcgugaacuguaccgaagugcccguggccauucacgccgaucagcugacaccuacauggcggguguacuccaccggcagcaauguguuucagaccagagccggcugucugaucggagccgagcacgugaacaauagcuacgagugcgacauccccaucggcgcuggaaucugcgccagcuaccagacacagacaaacagcccucggagagccagaagcguggccagccagagcaucauugccuacacaaugucucugggcguggagaacagcguggccuacuccaacaacucuaucgcuauccccaccaacuucaccaucagcgugaccacagagauccugccuguguccaugaccaagaccagcguggacugcaccauguacaucugcggcgauuccaccgagugcuccaaccugcugcugcaguacggcagcuucugcacccagcugaauagagcccugacagggaucgccguggaacaggacaagaacacccaagagguguucgcccaagugaagcagaucuacaagaccccuccuaucaaggacuucggcggcuucaauuucagccagauucugcccgauccuagcaagcccagcaagcggagcuucaucgaggaccugcuguucaacaaagugacacuggccgacgccggcuucaucaagcaguauggcgauugucugggcgacauugccgccagggaucugauuugcgcccagaaguuuaacggacugacagugcugccuccucugcugaccgaugagaugaucgcccaguacacaucugcccugcuggccggcacaaucacaagcggcuggacauuuggagcaggcgccgcucugcagauccccuuugcuaugcagauggccuaccgguucaacggcaucggagugacccagaaugugcuguacgagaaccagaagcugaucgccaaccaguucaacagcgccaucggcaagauccaggacagccugagcagcacagcaagcgcccugggaaagcugcaggacguggucaaccagaaugcccaggcacugaacacccuggucaagcagcuguccuccaacuucggcgccaucagcucugugcugaacgauauccugagcagacuggacaaggucgaggccgaggugcagaucgacagacugaucacaggcagacugcagagccuccagacauacgugacccagcagcugaucagagccgccgagauuagagccucugccaaucuggccgccaccaagaugucugagugugugcugggccagagcaagagaguggacuuuugcggcaagggcuaccaccugaugagcuucccucagucugccccucacggcgugguguuucugcacgugacauaugugcccgcucaagagaagaauuucaccaccgcuccagccaucugccacgacggcaaagcccacuuuccuagagaaggcguguucguguccaacggcacccauugguucgugacacagcggaacuucuacgagccccagaucaucaccaccgacaacaccuucgugucuggcaacugcgacgucgugaucggcauugugaacaauaccguguacgacccucugcagcccgagcuggacagcuucaaagaggaacuggacaaguacuuuaagaaccacacaagccccgacguggaccugggcgauaucagcggaaucaaugccagcgucgugaacauccagaaagagaucgaccggcugaacgagguggccaagaaucugaacgagagccugaucgaccugcaagaacuggggaaguacgagcaguacaucaaguggcccugguacaucuggcugggcuuuaucgccggacugauugccaucgugauggucacaaucaugcuguguugcaugaccagcugcuguagcugccugaagggcuguuguagcuguggcagcugcugcaaguucgacgaggacgauucugagcccgugcugaagggcgugaaacugcacuacacaugaggacuaguguccaccugucccuccugggcugcuggauugucucguuuuccugccaaauaaacaggaucagcgcuuuacagaucucaaaggcucuuuucagagccaccaaaaaaaaaaaaaaaaaaaaaaaaaaaaaaaaaaaaaaaaaaaaaaaaaaaaaaaaaaaaaaaaaaaaaaaaaaaaaaaaaaaaaaaaaaaaaaaaaaaaa

SEQ ID NO: 23954 - RNA, 4129 nt, Artificial Sequence
  SARS-CoV-2/Wuhan/WIV05/2019__EPI_ISL_402128 spike protein mRNA gc mod (1-1273)(E484K_D614G)
aggagacccgugacccggaaguuguacggcuacgcgacuuucccucccacaaacccucgcgcccuuccuuuccuacuugggcccggcagaaagcuuaccauguucguguuccuggugcugcugccucugguguccagccagugugugaaccugaccaccagaacacagcugccuccagccuacaccaacagcuuuaccagaggcguguacuaccccgacaagguguucagauccagcgugcugcacucuacccaggaccuguuccugccuuucuucagcaacgugaccugguuccacgccauccacguguccggcaccaauggcaccaagagauucgacaaccccgugcugcccuucaacgacgggguguacuuugccagcaccgagaaguccaacaucaucagaggcuggaucuucggcaccacacuggacagcaagacccagagccugcugaucgugaacaacgccaccaacguggucaucaaagugugcgaguuccaguucugcaacgaccccuuccugggcgucuacuaccacaagaacaacaagagcuggauggaaagcgaguuccggguguacagcagcgccaacaacugcaccuucgaguacgugucccagccuuuccugauggaccuggaaggcaagcagggcaacuucaagaaccugcgcgaguucguguuuaagaacaucgacggcuacuucaagaucuacagcaagcacaccccuaucaaccucgugcgggaucugccucagggcuucucugcucuggaaccccugguggaucugcccaucggcaucaacaucacccgguuucagacacugcuggcccugcacagaagcuaccugacaccuggcgauagcagcagcggauggacagcuggugccgccgcuuacuaugugggcuaccugcagccuagaaccuuccugcugaaguacaacgagaacggcaccaucaccgacgccguggauugugcucuggauccucugagcgagacaaagugcacccugaaguccuucaccguggaaaagggcaucuaccagaccagcaacuuccgggugcagcccaccgaauccaucgugcgguuccccaauaucaccaaucugugccccuucggcgagguguucaaugccaccagauucgccucuguguacgccuggaaccggaagcggaucagcaauugcguggccgacuacuccgugcuguacaacuccgccagcuucagcaccuucaagugcuacggcguguccccuaccaagcugaacgaccugugcuucacaaacguguacgccgacagcuucgugauccggggagaugaagugcggcagauugccccuggacagacaggcaagaucgccgacuacaacuacaagcugcccgacgacuucaccggcugugugauugccuggaacagcaacaaccuggacuccaaagucggcggcaacuacaauuaccuguaccggcuguuccggaaguccaaucugaagcccuucgagcgggacaucuccaccgagaucuaucaggccggcagcaccccuuguaacggcgugaagggcuucaacugcuacuucccacugcaguccuacggcuuucagcccacaaauggcgugggcuaucagcccuacagagugguggugcugagcuucgaacugcugcaugccccugccacagugugcggcccuaagaaaagcaccaaucucgugaagaacaaaugcgugaacuucaacuucaacggccugaccggcaccggcgugcugacagagagcaacaagaaguuccugccauuccagcaguuuggccgggauaucgccgauaccacagacgccguuagagauccccagacacuggaaauccuggacaucaccccuugcagcuucggcggagugucugugaucaccccuggcaccaacaccagcaaucagguggcagugcuguaccagggcgugaacuguaccgaagugcccguggccauucacgccgaucagcugacaccuacauggcggguguacuccaccggcagcaauguguuucagaccagagccggcugucugaucggagccgagcacgugaacaauagcuacgagugcgacauccccaucggcgcuggaaucugcgccagcuaccagacacagacaaacagcccucggagagccagaagcguggccagccagagcaucauugccuacacaaugucucugggcgccgagaacagcguggccuacuccaacaacucuaucgcuauccccaccaacuucaccaucagcgugaccacagagauccugccuguguccaugaccaagaccagcguggacugcaccauguacaucugcggcgauuccaccgagugcuccaaccugcugcugcaguacggcagcuucugcacccagcugaauagagcccugacagggaucgccguggaacaggacaagaacacccaagagguguucgcccaagugaagcagaucuacaagaccccuccuaucaaggacuucggcggcuucaauuucagccagauucugcccgauccuagcaagcccagcaagcggagcuucaucgaggaccugcuguucaacaaagugacacuggccgacgccggcuucaucaagcaguauggcgauugucugggcgacauugccgccagggaucugauuugcgcccagaaguuuaacggacugacagugcugccuccucugcugaccgaugagaugaucgcccaguacacaucugcccugcuggccggcacaaucacaagcggcuggacauuuggagcaggcgccgcucugcagauccccuuugcuaugcagauggccuaccgguucaacggcaucggagugacccagaaugugcuguacgagaaccagaagcugaucgccaaccaguucaacagcgccaucggcaagauccaggacagccugagcagcacagcaagcgcccugggaaagcugcaggacguggucaaccagaaugcccaggcacugaacacccuggucaagcagcuguccuccaacuucggcgccaucagcucugugcugaacgauauccugagcagacuggacaaggucgaggccgaggugcagaucgacagacugaucacaggcagacugcagagccuccagacauacgugacccagcagcugaucagagccgccgagauuagagccucugccaaucuggccgccaccaagaugucugagugugugcugggccagagcaagagaguggacuuuugcggcaagggcuaccaccugaugagcuucccucagucugccccucacggcgugguguuucugcacgugacauaugugcccgcucaagagaagaauuucaccaccgcuccagccaucugccacgacggcaaagcccacuuuccuagagaaggcguguucguguccaacggcacccauugguucgugacacagcggaacuucuacgagccccagaucaucaccaccgacaacaccuucgugucuggcaacugcgacgucgugaucggcauugugaacaauaccguguacgacccucugcagcccgagcuggacagcuucaaagaggaacuggacaaguacuuuaagaaccacacaagccccgacguggaccugggcgauaucagcggaaucaaugccagcgucgugaacauccagaaagagaucgaccggcugaacgagguggccaagaaucugaacgagagccugaucgaccugcaagaacuggggaaguacgagcaguacaucaaguggcccugguacaucuggcugggcuuuaucgccggacugauugccaucgugauggucacaaucaugcuguguugcaugaccagcugcuguagcugccugaagggcuguuguagcuguggcagcugcugcaaguucgacgaggacgauucugagcccgugcugaagggcgugaaacugcacuacacaugaggacuaguguccaccugucccuccugggcugcuggauugucucguuuuccugccaaauaaacaggaucagcgcuuuacagaucucaaaggcucuuuucagagccaccaaaaaaaaaaaaaaaaaaaaaaaaaaaaaaaaaaaaaaaaaaaaaaaaaaaaaaaaaaaaaaaaaaaaaaaaaaaaaaaaaaaaaaaaaaaaaaaaaaaaa

SEQ ID NO: 23955 - RNA, 4129 nt, Artificial Sequence
  SARS-CoV-2/Wuhan/WIV05/2019__EPI_ISL_402128 spike protein mRNA gc mod (1-1273)(L18F_T20N_P26S_D138Y_R190S_K417T_E484K_N501Y_D614G_H655Y _T1027I)
aggagacccgugacccggaaguuguacggcuacgcgacuuucccucccacaaacccucgcgcccuuccuuuccuacuugggcccggcagaaagcuuaccauguucguguuccuggugcugcugccucugguguccagccagugugugaacuucaccaacagaacacagcugccuagcgccuacaccaacagcuuuaccagaggcguguacuaccccgacaagguguucagauccagcgugcugcacucuacccaggaccuguuccugccuuucuucagcaacgugaccugguuccacgccauccacguguccggcaccaauggcaccaagagauucgacaaccccgugcugcccuucaacgacgggguguacuuugccagcaccgagaaguccaacaucaucagaggcuggaucuucggcaccacacuggacagcaagacccagagccugcugaucgugaacaacgccaccaacguggucaucaaagugugcgaguuccaguucugcaacuaccccuuccugggcgucuacuaccacaagaacaacaagagcuggauggaaagcgaguuccggguguacagcagcgccaacaacugcaccuucgaguacgugucccagccuuuccugauggaccuggaaggcaagcagggcaacuucaagaaccugagcgaguucguguuuaagaacaucgacggcuacuucaagaucuacagcaagcacaccccuaucaaccucgugcgggaucugccucagggcuucucugcucuggaaccccugguggaucugcccaucggcaucaacaucacccgguuucagacacugcuggcccugcacagaagcuaccugacaccuggcgauagcagcagcggauggacagcuggugccgccgcuuacuaugugggcuaccugcagccuagaaccuuccugcugaaguacaacgagaacggcaccaucaccgacgccguggauugugcucuggauccucugagcgagacaaagugcacccugaaguccuucaccguggaaaagggcaucuaccagaccagcaacuuccgggugcagcccaccgaauccaucgugcgguuccccaauaucaccaaucugugccccuucggcgagguguucaaugccaccagauucgccucuguguacgccuggaaccggaagcggaucagcaauugcguggccgacuacuccgugcuguacaacuccgccagcuucagcaccuucaagugcuacggcguguccccuaccaagcugaacgaccugugcuucacaaacguguacgccgacagcuucgugauccggggagaugaagugcggcagauugccccuggacagacaggcaccaucgccgacuacaacuacaagcugcccgacgacuucaccggcugugugauugccuggaacagcaacaaccuggacuccaaagucggcggcaacuacaauuaccuguaccggcuguuccggaaguccaaucugaagcccuucgagcgggacaucuccaccgagaucuaucaggccggcagcaccccuuguaacggcgugaagggcuucaacugcuacuucccacugcaguccuacggcuuucagcccacauacggcgugggcuaucagcccuacagagugguggugcugagcuucgaacugcugcaugccccugccacagugugcggcccuaagaaaagcaccaaucucgugaagaacaaaugcgugaacuucaacuucaacggccugaccggcaccggcgugcugacagagagcaacaagaaguuccugccauuccagcaguuuggccgggauaucgccgauaccacagacgccguuagagauccccagacacuggaaauccuggacaucaccccuugcagcuucggcggagugucugugaucaccccuggcaccaacaccagcaaucagguggcagugcuguaccagggcgugaacuguaccgaagugcccguggccauucacgccgaucagcugacaccuacauggcggguguacuccaccggcagcaauguguuucagaccagagccggcugucugaucggagccgaguacgugaacaauagcuacgagugcgacauccccaucggcgcuggaaucugcgccagcuaccagacacagacaaacagcccucggagagccagaagcguggccagccagagcaucauugccuacacaaugucucugggcgccgagaacagcguggccuacuccaacaacucuaucgcuauccccaccaacuucaccaucagcgugaccacagagauccugccuguguccaugaccaagaccagcguggacugcaccauguacaucugcggcgauuccaccgagugcuccaaccugcugcugcaguacggcagcuucugcacccagcugaauagagcccugacagggaucgccguggaacaggacaagaacacccaagagguguucgcccaagugaagcagaucuacaagaccccuccuaucaaggacuucggcggcuucaauuucagccagauucugcccgauccuagcaagcccagcaagcggagcuucaucgaggaccugcuguucaacaaagugacacuggccgacgccggcuucaucaagcaguauggcgauugucugggcgacauugccgccagggaucugauuugcgcccagaaguuuaacggacugacagugcugccuccucugcugaccgaugagaugaucgcccaguacacaucugcccugcuggccggcacaaucacaagcggcuggacauuuggagcaggcgccgcucugcagauccccuuugcuaugcagauggccuaccgguucaacggcaucggagugacccagaaugugcuguacgagaaccagaagcugaucgccaaccaguucaacagcgccaucggcaagauccaggacagccugagcagcacagcaagcgcccugggaaagcugcaggacguggucaaccagaaugcccaggcacugaacacccuggucaagcagcuguccuccaacuucggcgccaucagcucugugcugaacgauauccugagcagacuggacaaggucgaggccgaggugcagaucgacagacugaucacaggcagacugcagagccuccagacauacgugacccagcagcugaucagagccgccgagauuagagccucugccaaucuggccgccaucaagaugucugagugugugcugggccagagcaagagaguggacuuuugcggcaagggcuaccaccugaugagcuucccucagucugccccucacggcgugguguuucugcacgugacauaugugcccgcucaagagaagaauuucaccaccgcuccagccaucugccacgacggcaaagcccacuuuccuagagaaggcguguucguguccaacggcacccauugguucgugacacagcggaacuucuacgagccccagaucaucaccaccgacaacaccuucgugucuggcaacugcgacgucgugaucggcauugugaacaauaccguguacgacccucugcagcccgagcuggacagcuucaaagaggaacuggacaaguacuuuaagaaccacacaagccccgacguggaccugggcgauaucagcggaaucaaugccagcgucgugaacauccagaaagagaucgaccggcugaacgagguggccaagaaucugaacgagagccugaucgaccugcaagaacuggggaaguacgagcaguacaucaaguggcccugguacaucuggcugggcuuuaucgccggacugauugccaucgugauggucacaaucaugcuguguugcaugaccagcugcuguagcugccugaagggcuguuguagcuguggcagcugcugcaaguucgacgaggacgauucugagcccgugcugaagggcgugaaacugcacuacacaugaggacuaguguccaccugucccuccugggcugcuggauugucucguuuuccugccaaauaaacaggaucagcgcuuuacagaucucaaaggcucuuuucagagccaccaaaaaaaaaaaaaaaaaaaaaaaaaaaaaaaaaaaaaaaaaaaaaaaaaaaaaaaaaaaaaaaaaaaaaaaaaaaaaaaaaaaaaaaaaaaaaaaaaaaaa

SEQ ID NO: 23956 - RNA, 4129 nt, Artificial Sequence
  SARS-CoV-2/Wuhan/WIV05/2019__EPI_ISL_402128 spike protein mRNA gc mod (1-1273)(S13I_W152C_L452R_D614G)
aggagacccgugacccggaaguuguacggcuacgcgacuuucccucccacaaacccucgcgcccuuccuuuccuacuugggcccggcagaaagcuuaccauguucguguuccuggugcugcugccucugguguccauccagugugugaaccugaccaccagaacacagcugccuccagccuacaccaacagcuuuaccagaggcguguacuaccccgacaagguguucagauccagcgugcugcacucuacccaggaccuguuccugccuuucuucagcaacgugaccugguuccacgccauccacguguccggcaccaauggcaccaagagauucgacaaccccgugcugcccuucaacgacgggguguacuuugccagcaccgagaaguccaacaucaucagaggcuggaucuucggcaccacacuggacagcaagacccagagccugcugaucgugaacaacgccaccaacguggucaucaaagugugcgaguuccaguucugcaacgaccccuuccugggcgucuacuaccacaagaacaacaagagcugcauggaaagcgaguuccggguguacagcagcgccaacaacugcaccuucgaguacgugucccagccuuuccugauggaccuggaaggcaagcagggcaacuucaagaaccugcgcgaguucguguuuaagaacaucgacggcuacuucaagaucuacagcaagcacaccccuaucaaccucgugcgggaucugccucagggcuucucugcucuggaaccccugguggaucugcccaucggcaucaacaucacccgguuucagacacugcuggcccugcacagaagcuaccugacaccuggcgauagcagcagcggauggacagcuggugccgccgcuuacuaugugggcuaccugcagccuagaaccuuccugcugaaguacaacgagaacggcaccaucaccgacgccguggauugugcucuggauccucugagcgagacaaagugcacccugaaguccuucaccguggaaaagggcaucuaccagaccagcaacuuccgggugcagcccaccgaauccaucgugcgguuccccaauaucaccaaucugugccccuucggcgagguguucaaugccaccagauucgccucuguguacgccuggaaccggaagcggaucagcaauugcguggccgacuacuccgugcuguacaacuccgccagcuucagcaccuucaagugcuacggcguguccccuaccaagcugaacgaccugugcuucacaaacguguacgccgacagcuucgugauccggggagaugaagugcggcagauugccccuggacagacaggcaagaucgccgacuacaacuacaagcugcccgacgacuucaccggcugugugauugccuggaacagcaacaaccuggacuccaaagucggcggcaacuacaauuaccgcuaccggcuguuccggaaguccaaucugaagcccuucgagcgggacaucuccaccgagaucuaucaggccggcagcaccccuuguaacggcguggaaggcuucaacugcuacuucccacugcaguccuacggcuuucagcccacaaauggcgugggcuaucagcccuacagagugguggugcugagcuucgaacugcugcaugccccugccacagugugcggcccuaagaaaagcaccaaucucgugaagaacaaaugcgugaacuucaacuucaacggccugaccggcaccggcgugcugacagagagcaacaagaaguuccugccauuccagcaguuuggccgggauaucgccgauaccacagacgccguuagagauccccagacacuggaaauccuggacaucaccccuugcagcuucggcggagugucugugaucaccccuggcaccaacaccagcaaucagguggcagugcuguaccagggcgugaacuguaccgaagugcccguggccauucacgccgaucagcugacaccuacauggcggguguacuccaccggcagcaauguguuucagaccagagccggcugucugaucggagccgagcacgugaacaauagcuacgagugcgacauccccaucggcgcuggaaucugcgccagcuaccagacacagacaaacagcccucggagagccagaagcguggccagccagagcaucauugccuacacaaugucucugggcgccgagaacagcguggccuacuccaacaacucuaucgcuauccccaccaacuucaccaucagcgugaccacagagauccugccuguguccaugaccaagaccagcguggacugcaccauguacaucugcggcgauuccaccgagugcuccaaccugcugcugcaguacggcagcuucugcacccagcugaauagagcccugacagggaucgccguggaacaggacaagaacacccaagagguguucgcccaagugaagcagaucuacaagaccccuccuaucaaggacuucggcggcuucaauuucagccagauucugcccgauccuagcaagcccagcaagcggagcuucaucgaggaccugcuguucaacaaagugacacuggccgacgccggcuucaucaagcaguauggcgauugucugggcgacauugccgccagggaucugauuugcgcccagaaguuuaacggacugacagugcugccuccucugcugaccgaugagaugaucgcccaguacacaucugcccugcuggccggcacaaucacaagcggcuggacauuuggagcaggcgccgcucugcagauccccuuugcuaugcagauggccuaccgguucaacggcaucggagugacccagaaugugcuguacgagaaccagaagcugaucgccaaccaguucaacagcgccaucggcaagauccaggacagccugagcagcacagcaagcgcccugggaaagcugcaggacguggucaaccagaaugcccaggcacugaacacccuggucaagcagcuguccuccaacuucggcgccaucagcucugugcugaacgauauccugagcagacuggacaaggucgaggccgaggugcagaucgacagacugaucacaggcagacugcagagccuccagacauacgugacccagcagcugaucagagccgccgagauuagagccucugccaaucuggccgccaccaagaugucugagugugugcugggccagagcaagagaguggacuuuugcggcaagggcuaccaccugaugagcuucccucagucugccccucacggcgugguguuucugcacgugacauaugugcccgcucaagagaagaauuucaccaccgcuccagccaucugccacgacggcaaagcccacuuuccuagagaaggcguguucguguccaacggcacccauugguucgugacacagcggaacuucuacgagccccagaucaucaccaccgacaacaccuucgugucuggcaacugcgacgucgugaucggcauugugaacaauaccguguacgacccucugcagcccgagcuggacagcuucaaagaggaacuggacaaguacuuuaagaaccacacaagccccgacguggaccugggcgauaucagcggaaucaaugccagcgucgugaacauccagaaagagaucgaccggcugaacgagguggccaagaaucugaacgagagccugaucgaccugcaagaacuggggaaguacgagcaguacaucaaguggcccugguacaucuggcugggcuuuaucgccggacugauugccaucgugauggucacaaucaugcuguguugcaugaccagcugcuguagcugccugaagggcuguuguagcuguggcagcugcugcaaguucgacgaggacgauucugagcccgugcugaagggcgugaaacugcacuacacaugaggacuaguguccaccugucccuccugggcugcuggauugucucguuuuccugccaaauaaacaggaucagcgcuuuacagaucucaaaggcucuuuucagagccaccaaaaaaaaaaaaaaaaaaaaaaaaaaaaaaaaaaaaaaaaaaaaaaaaaaaaaaaaaaaaaaaaaaaaaaaaaaaaaaaaaaaaaaaaaaaaaaaaaaaaa

SEQ ID NO: 23957 - RNA, 4129 nt, Artificial Sequence
  SARS-CoV-2/Wuhan/WIV05/2019__EPI_ISL_402128 spike protein mRNA gc (1-1273)(K986P_V987P) R10155
aggagacccgugacccggaaguuguacggcuacgcgacuuucccucccacaaacccucgcgcccuuccuuuccuacuugggcccggcagaaagcuuaccauguucguguuccugguccuccugccccuggugagcucccagugcgugaaccucaccacccgcacgcagcugccgcccgccuacaccaacagcuucacccggggcgucuacuaccccgacaagguguuccgcuccagcgugcugcacuccacccaggaccucuuccugcccuucuucagcaacgucacgugguuccacgccauccacguguccgggaccaacggcaccaagcgguucgacaacccggugcugcccuucaacgacggggucuacuucgcgagcaccgagaaguccaacaucauccgcggcuggaucuucgggacgacccucgacagcaagacccagucccugcugaucgugaacaacgccaccaacguggucaucaaggugugcgaguuccaguucugcaacgaccccuuccucggcguguacuaccacaagaacaacaagagcuggauggaguccgaguuccgggucuacagcuccgccaacaacugcacguucgaguacgugagccagcccuuccugauggaccuggagggcaagcaggggaacuucaagaaccuccgcgaguucguguucaagaacaucgacggcuacuucaagaucuacuccaagcacaccccgaucaaccugguccgggaccugccccagggguucagcgcccucgagccccugguggaccugcccaucggcaucaacaucacccgcuuccagacccuccuggcccugcaccgguccuaccucacgccgggggacagcagcuccggcuggaccgcgggcgccgccgccuacuacgugggguaccugcagccccgcaccuuccugcucaaguacaacgagaacggcaccaucacggacgcggucgacugcgcccuggacccccugagcgagaccaagugcacccucaaguccuucaccguggagaaggggaucuaccagacgagcaacuuccgggugcagcccaccgaguccaucguccgcuucccgaacaucaccaaccugugccccuucggcgagguguucaacgccacccgguucgccagcgucuacgccuggaaccgcaagcggaucuccaacugcguggcggacuacagcgugcuguacaacuccgccagcuucuccacguucaagugcuacggcgucagccccaccaagcucaacgaccugugcuucaccaacguguacgccgacuccuucgugauccgcggggacgagguccggcagaucgcccccggccagaccgggaagaucgccgacuacaacuacaagcugccggacgacuucacgggcugcgugaucgcguggaacagcaacaaccucgacuccaaggucgggggcaacuacaacuaccuguaccgccuguuccgcaagagcaaccucaagcccuucgagcgggacaucuccaccgagaucuaccaggccggcagcacccccugcaacgggguggagggcuucaacugcuacuucccccugcaguccuacggguuccagccgaccaacggcgugggguaccagcccuaccggguggucgugcugagcuucgagcuccugcacgcccccgccacggugugcggccccaagaaguccaccaaccuggucaagaacaagugcgugaacuucaacuucaacggccucaccgggaccggcgugcugaccgagagcaacaagaaguuccugccguuccagcaguucgggcgcgacaucgccgacacgaccgacgcgguccgcgacccccagacccuggagauccucgacaucacccccugcagcuucggcgggguguccgugaucacgccgggcaccaacaccagcaaccaggucgccgugcuguaccaggacgugaacugcaccgagguccccguggccauccacgccgaccagcugacgcccaccuggcggguguacuccaccggcagcaacgucuuccagacccgcgccgggugccucaucggcgcggagcacgugaacaacuccuacgagugcgacauccccaucggggccggcaucugcgccagcuaccagacgcagaccaacuccccgcggcgcgcccggagcguggcgucccagagcaucaucgccuacaccaugucccugggcgccgagaacagcgucgccuacuccaacaacagcaucgccauccccaccaacuucacgaucuccgugaccaccgagauccugcccgugagcaugaccaagacgagcgucgacugcaccauguacaucugcggggacuccaccgagugcagcaaccuccugcugcaguacggcuccuucugcacccagcucaaccgcgcgcugacggggaucgccguggagcaggacaagaacacccaggagguguucgcccaggucaagcagaucuacaagacgcccccgaucaaggacuucggcggguucaacuucagccagauccugcccgaccccuccaagcccagcaagcgguccuucaucgaggaccuccuguucaacaaggugacccuggccgacgccggcuucaucaagcaguacggcgacugccucggggacaucgcggcccgcgaccugaucugcgcccagaaguucaacggccugaccgugcucccgccccugcugaccgacgagaugaucgcccaguacaccagcgcccuccuggcggggaccaucacguccggcuggaccuucggggccggcgccgcccugcagauccccuucgcgaugcagauggccuaccgguucaacggcaucggggucacccagaacgugcucuacgagaaccagaagcugaucgccaaccaguucaacagcgccaucggcaagauccaggacucccugagcuccaccgccagcgcgcucgggaagcugcaggacguggucaaccagaacgcccaggcccugaacacgcucgugaagcagcuguccagcaacuucggcgccaucuccagcgugcugaacgacauccucucccgccuggacccgcccgaggccgaggugcagaucgaccggcugaucaccgggcgccuccagagccugcagaccuacgugacccagcagcugauccgggcggccgagauccgcgccagcgccaaccucgccgcgaccaagauguccgagugcguccugggccagagcaagcggguggacuucugcggcaagggguaccaccugauguccuucccccagagcgccccgcacggcguggucuuccuccacgugacguacguccccgcccaggagaagaacuucaccaccgcccccgcgaucugccacgacgggaaggcccacuucccccgcgagggcguguucguguccaacgggacccacugguucgucacgcagcggaacuucuacgagccgcagaucaucaccaccgacaacaccuucgugagcggcaacugcgacguggucaucggcaucgugaacaacacgguguacgacccccugcagcccgagcuggacuccuucaaggaggagcucgacaaguacuucaagaaccacaccagccccgacgucgaccugggggacaucuccggcaucaacgccagcguggugaacauccagaaggagaucgaccgccugaacgaggucgccaagaaccucaacgagucccugaucgaccugcaggagcucgggaaguacgagcaguacaucaaguggccgugguacaucuggcugggcuucaucgccggccugaucgcgaucgugauggugaccaucaugcucugcugcaugaccagcugcugcuccugccugaaggggugcugcagcugcggcuccugcugcaaguucgacgaggacgacagcgagcccguccugaagggggugaagcuccacuacacgugaggacuaguguccaccugucccuccugggcugcuggauugucucguuuuccugccaaauaaacaggaucagcgcuuuacagaucucaaaggcucuuuucagagccaccaaaaaaaaaaaaaaaaaaaaaaaaaaaaaaaaaaaaaaaaaaaaaaaaaaaaaaaaaaaaaaaaaaaaaaaaaaaaaaaaaaaaaaaaaaaaaaaaaaaaa

SEQ ID NO: 23958 - RNA, 4129 nt, Artificial Sequence
  SARS-CoV-2/Wuhan/WIV05/2019__EPI_ISL_402128 spike protein mRNA gc (1-1273)(K986P_V987P_ D614G)
aggagacccgugacccggaaguuguacggcuacgcgacuuucccucccacaaacccucgcgcccuuccuuuccuacuugggcccggcagaaagcuuaccauguucguguuccugguccuccugccccuggugagcucccagugcgugaaccucaccacccgcacgcagcugccgcccgccuacaccaacagcuucacccggggcgucuacuaccccgacaagguguuccgcuccagcgugcugcacuccacccaggaccucuuccugcccuucuucagcaacgucacgugguuccacgccauccacguguccgggaccaacggcaccaagcgguucgacaacccggugcugcccuucaacgacggggucuacuucgcgagcaccgagaaguccaacaucauccgcggcuggaucuucgggacgacccucgacagcaagacccagucccugcugaucgugaacaacgccaccaacguggucaucaaggugugcgaguuccaguucugcaacgaccccuuccucggcguguacuaccacaagaacaacaagagcuggauggaguccgaguuccgggucuacagcuccgccaacaacugcacguucgaguacgugagccagcccuuccugauggaccuggagggcaagcaggggaacuucaagaaccuccgcgaguucguguucaagaacaucgacggcuacuucaagaucuacuccaagcacaccccgaucaaccugguccgggaccugccccagggguucagcgcccucgagccccugguggaccugcccaucggcaucaacaucacccgcuuccagacccuccuggcccugcaccgguccuaccucacgccgggggacagcagcuccggcuggaccgcgggcgccgccgccuacuacgugggguaccugcagccccgcaccuuccugcucaaguacaacgagaacggcaccaucacggacgcggucgacugcgcccuggacccccugagcgagaccaagugcacccucaaguccuucaccguggagaaggggaucuaccagacgagcaacuuccgggugcagcccaccgaguccaucguccgcuucccgaacaucaccaaccugugccccuucggcgagguguucaacgccacccgguucgccagcgucuacgccuggaaccgcaagcggaucuccaacugcguggcggacuacagcgugcuguacaacuccgccagcuucuccacguucaagugcuacggcgucagccccaccaagcucaacgaccugugcuucaccaacguguacgccgacuccuucgugauccgcggggacgagguccggcagaucgcccccggccagaccgggaagaucgccgacuacaacuacaagcugccggacgacuucacgggcugcgugaucgcguggaacagcaacaaccucgacuccaaggucgggggcaacuacaacuaccuguaccgccuguuccgcaagagcaaccucaagcccuucgagcgggacaucuccaccgagaucuaccaggccggcagcacccccugcaacgggguggagggcuucaacugcuacuucccccugcaguccuacggguuccagccgaccaacggcgugggguaccagcccuaccggguggucgugcugagcuucgagcuccugcacgcccccgccacggugugcggccccaagaaguccaccaaccuggucaagaacaagugcgugaacuucaacuucaacggccucaccgggaccggcgugcugaccgagagcaacaagaaguuccugccguuccagcaguucgggcgcgacaucgccgacacgaccgacgcgguccgcgacccccagacccuggagauccucgacaucacccccugcagcuucggcgggguguccgugaucacgccgggcaccaacaccagcaaccaggucgccgugcuguaccagggcgugaacugcaccgagguccccguggccauccacgccgaccagcugacgcccaccuggcggguguacuccaccggcagcaacgucuuccagacccgcgccgggugccucaucggcgcggagcacgugaacaacuccuacgagugcgacauccccaucggggccggcaucugcgccagcuaccagacgcagaccaacuccccgcggcgcgcccggagcguggcgucccagagcaucaucgccuacaccaugucccugggcgccgagaacagcgucgccuacuccaacaacagcaucgccauccccaccaacuucacgaucuccgugaccaccgagauccugcccgugagcaugaccaagacgagcgucgacugcaccauguacaucugcggggacuccaccgagugcagcaaccuccugcugcaguacggcuccuucugcacccagcucaaccgcgcgcugacggggaucgccguggagcaggacaagaacacccaggagguguucgcccaggucaagcagaucuacaagacgcccccgaucaaggacuucggcggguucaacuucagccagauccugcccgaccccuccaagcccagcaagcgguccuucaucgaggaccuccuguucaacaaggugacccuggccgacgccggcuucaucaagcaguacggcgacugccucggggacaucgcggcccgcgaccugaucugcgcccagaaguucaacggccugaccgugcucccgccccugcugaccgacgagaugaucgcccaguacaccagcgcccuccuggcggggaccaucacguccggcuggaccuucggggccggcgccgcccugcagauccccuucgcgaugcagauggccuaccgguucaacggcaucggggucacccagaacgugcucuacgagaaccagaagcugaucgccaaccaguucaacagcgccaucggcaagauccaggacucccugagcuccaccgccagcgcgcucgggaagcugcaggacguggucaaccagaacgcccaggcccugaacacgcucgugaagcagcuguccagcaacuucggcgccaucuccagcgugcugaacgacauccucucccgccuggacccgcccgaggccgaggugcagaucgaccggcugaucaccgggcgccuccagagccugcagaccuacgugacccagcagcugauccgggcggccgagauccgcgccagcgccaaccucgccgcgaccaagauguccgagugcguccugggccagagcaagcggguggacuucugcggcaagggguaccaccugauguccuucccccagagcgccccgcacggcguggucuuccuccacgugacguacguccccgcccaggagaagaacuucaccaccgcccccgcgaucugccacgacgggaaggcccacuucccccgcgagggcguguucguguccaacgggacccacugguucgucacgcagcggaacuucuacgagccgcagaucaucaccaccgacaacaccuucgugagcggcaacugcgacguggucaucggcaucgugaacaacacgguguacgacccccugcagcccgagcuggacuccuucaaggaggagcucgacaaguacuucaagaaccacaccagccccgacgucgaccugggggacaucuccggcaucaacgccagcguggugaacauccagaaggagaucgaccgccugaacgaggucgccaagaaccucaacgagucccugaucgaccugcaggagcucgggaaguacgagcaguacaucaaguggccgugguacaucuggcugggcuucaucgccggccugaucgcgaucgugauggugaccaucaugcucugcugcaugaccagcugcugcuccugccugaaggggugcugcagcugcggcuccugcugcaaguucgacgaggacgacagcgagcccguccugaagggggugaagcuccacuacacgugaggacuaguguccaccugucccuccugggcugcuggauugucucguuuuccugccaaauaaacaggaucagcgcuuuacagaucucaaaggcucuuuucagagccaccaaaaaaaaaaaaaaaaaaaaaaaaaaaaaaaaaaaaaaaaaaaaaaaaaaaaaaaaaaaaaaaaaaaaaaaaaaaaaaaaaaaaaaaaaaaaaaaaaaaaa

SEQ ID NO: 23959 - RNA, 4129 nt, Artificial Sequence
  SARS-CoV-2/Wuhan/WIV05/2019__EPI_ISL_402128 spike protein mRNA gc (1-1273)(K986P_V987P_A222V_D614G)
aggagacccgugacccggaaguuguacggcuacgcgacuuucccucccacaaacccucgcgcccuuccuuuccuacuugggcccggcagaaagcuuaccauguucguguuccugguccuccugccccuggugagcucccagugcgugaaccucaccacccgcacgcagcugccgcccgccuacaccaacagcuucacccggggcgucuacuaccccgacaagguguuccgcuccagcgugcugcacuccacccaggaccucuuccugcccuucuucagcaacgucacgugguuccacgccauccacguguccgggaccaacggcaccaagcgguucgacaacccggugcugcccuucaacgacggggucuacuucgcgagcaccgagaaguccaacaucauccgcggcuggaucuucgggacgacccucgacagcaagacccagucccugcugaucgugaacaacgccaccaacguggucaucaaggugugcgaguuccaguucugcaacgaccccuuccucggcguguacuaccacaagaacaacaagagcuggauggaguccgaguuccgggucuacagcuccgccaacaacugcacguucgaguacgugagccagcccuuccugauggaccuggagggcaagcaggggaacuucaagaaccuccgcgaguucguguucaagaacaucgacggcuacuucaagaucuacuccaagcacaccccgaucaaccugguccgggaccugccccagggguucagcguccucgagccccugguggaccugcccaucggcaucaacaucacccgcuuccagacccuccuggcccugcaccgguccuaccucacgccgggggacagcagcuccggcuggaccgcgggcgccgccgccuacuacgugggguaccugcagccccgcaccuuccugcucaaguacaacgagaacggcaccaucacggacgcggucgacugcgcccuggacccccugagcgagaccaagugcacccucaaguccuucaccguggagaaggggaucuaccagacgagcaacuuccgggugcagcccaccgaguccaucguccgcuucccgaacaucaccaaccugugccccuucggcgagguguucaacgccacccgguucgccagcgucuacgccuggaaccgcaagcggaucuccaacugcguggcggacuacagcgugcuguacaacuccgccagcuucuccacguucaagugcuacggcgucagccccaccaagcucaacgaccugugcuucaccaacguguacgccgacuccuucgugauccgcggggacgagguccggcagaucgcccccggccagaccgggaagaucgccgacuacaacuacaagcugccggacgacuucacgggcugcgugaucgcguggaacagcaacaaccucgacuccaaggucgggggcaacuacaacuaccuguaccgccuguuccgcaagagcaaccucaagcccuucgagcgggacaucuccaccgagaucuaccaggccggcagcacccccugcaacgggguggagggcuucaacugcuacuucccccugcaguccuacggguuccagccgaccaacggcgugggguaccagcccuaccggguggucgugcugagcuucgagcuccugcacgcccccgccacggugugcggccccaagaaguccaccaaccuggucaagaacaagugcgugaacuucaacuucaacggccucaccgggaccggcgugcugaccgagagcaacaagaaguuccugccguuccagcaguucgggcgcgacaucgccgacacgaccgacgcgguccgcgacccccagacccuggagauccucgacaucacccccugcagcuucggcgggguguccgugaucacgccgggcaccaacaccagcaaccaggucgccgugcuguaccagggcgugaacugcaccgagguccccguggccauccacgccgaccagcugacgcccaccuggcggguguacuccaccggcagcaacgucuuccagacccgcgccgggugccucaucggcgcggagcacgugaacaacuccuacgagugcgacauccccaucggggccggcaucugcgccagcuaccagacgcagaccaacuccccgcggcgcgcccggagcguggcgucccagagcaucaucgccuacaccaugucccugggcgccgagaacagcgucgccuacuccaacaacagcaucgccauccccaccaacuucacgaucuccgugaccaccgagauccugcccgugagcaugaccaagacgagcgucgacugcaccauguacaucugcggggacuccaccgagugcagcaaccuccugcugcaguacggcuccuucugcacccagcucaaccgcgcgcugacggggaucgccguggagcaggacaagaacacccaggagguguucgcccaggucaagcagaucuacaagacgcccccgaucaaggacuucggcggguucaacuucagccagauccugcccgaccccuccaagcccagcaagcgguccuucaucgaggaccuccuguucaacaaggugacccuggccgacgccggcuucaucaagcaguacggcgacugccucggggacaucgcggcccgcgaccugaucugcgcccagaaguucaacggccugaccgugcucccgccccugcugaccgacgagaugaucgcccaguacaccagcgcccuccuggcggggaccaucacguccggcuggaccuucggggccggcgccgcccugcagauccccuucgcgaugcagauggccuaccgguucaacggcaucggggucacccagaacgugcucuacgagaaccagaagcugaucgccaaccaguucaacagcgccaucggcaagauccaggacucccugagcuccaccgccagcgcgcucgggaagcugcaggacguggucaaccagaacgcccaggcccugaacacgcucgugaagcagcuguccagcaacuucggcgccaucuccagcgugcugaacgacauccucucccgccuggacccgcccgaggccgaggugcagaucgaccggcugaucaccgggcgccuccagagccugcagaccuacgugacccagcagcugauccgggcggccgagauccgcgccagcgccaaccucgccgcgaccaagauguccgagugcguccugggccagagcaagcggguggacuucugcggcaagggguaccaccugauguccuucccccagagcgccccgcacggcguggucuuccuccacgugacguacguccccgcccaggagaagaacuucaccaccgcccccgcgaucugccacgacgggaaggcccacuucccccgcgagggcguguucguguccaacgggacccacugguucgucacgcagcggaacuucuacgagccgcagaucaucaccaccgacaacaccuucgugagcggcaacugcgacguggucaucggcaucgugaacaacacgguguacgacccccugcagcccgagcuggacuccuucaaggaggagcucgacaaguacuucaagaaccacaccagccccgacgucgaccugggggacaucuccggcaucaacgccagcguggugaacauccagaaggagaucgaccgccugaacgaggucgccaagaaccucaacgagucccugaucgaccugcaggagcucgggaaguacgagcaguacaucaaguggccgugguacaucuggcugggcuucaucgccggccugaucgcgaucgugauggugaccaucaugcucugcugcaugaccagcugcugcuccugccugaaggggugcugcagcugcggcuccugcugcaaguucgacgaggacgacagcgagcccguccugaagggggugaagcuccacuacacgugaggacuaguguccaccugucccuccugggcugcuggauugucucguuuuccugccaaauaaacaggaucagcgcuuuacagaucucaaaggcucuuuucagagccaccaaaaaaaaaaaaaaaaaaaaaaaaaaaaaaaaaaaaaaaaaaaaaaaaaaaaaaaaaaaaaaaaaaaaaaaaaaaaaaaaaaaaaaaaaaaaaaaaaaaaa

SEQ ID NO: 23960 - RNA, 4129 nt, Artificial Sequence
  SARS-CoV-2/Wuhan/WIV05/2019__EPI_ISL_402128 spike protein mRNA gc (1-1273)(K986P_V987P_N439K_D614G)
aggagacccgugacccggaaguuguacggcuacgcgacuuucccucccacaaacccucgcgcccuuccuuuccuacuugggcccggcagaaagcuuaccauguucguguuccugguccuccugccccuggugagcucccagugcgugaaccucaccacccgcacgcagcugccgcccgccuacaccaacagcuucacccggggcgucuacuaccccgacaagguguuccgcuccagcgugcugcacuccacccaggaccucuuccugcccuucuucagcaacgucacgugguuccacgccauccacguguccgggaccaacggcaccaagcgguucgacaacccggugcugcccuucaacgacggggucuacuucgcgagcaccgagaaguccaacaucauccgcggcuggaucuucgggacgacccucgacagcaagacccagucccugcugaucgugaacaacgccaccaacguggucaucaaggugugcgaguuccaguucugcaacgaccccuuccucggcguguacuaccacaagaacaacaagagcuggauggaguccgaguuccgggucuacagcuccgccaacaacugcacguucgaguacgugagccagcccuuccugauggaccuggagggcaagcaggggaacuucaagaaccuccgcgaguucguguucaagaacaucgacggcuacuucaagaucuacuccaagcacaccccgaucaaccugguccgggaccugccccagggguucagcgcccucgagccccugguggaccugcccaucggcaucaacaucacccgcuuccagacccuccuggcccugcaccgguccuaccucacgccgggggacagcagcuccggcuggaccgcgggcgccgccgccuacuacgugggguaccugcagccccgcaccuuccugcucaaguacaacgagaacggcaccaucacggacgcggucgacugcgcccuggacccccugagcgagaccaagugcacccucaaguccuucaccguggagaaggggaucuaccagacgagcaacuuccgggugcagcccaccgaguccaucguccgcuucccgaacaucaccaaccugugccccuucggcgagguguucaacgccacccgguucgccagcgucuacgccuggaaccgcaagcggaucuccaacugcguggcggacuacagcgugcuguacaacuccgccagcuucuccacguucaagugcuacggcgucagccccaccaagcucaacgaccugugcuucaccaacguguacgccgacuccuucgugauccgcggggacgagguccggcagaucgcccccggccagaccgggaagaucgccgacuacaacuacaagcugccggacgacuucacgggcugcgugaucgcguggaacagcaagaaccucgacuccaaggucgggggcaacuacaacuaccuguaccgccuguuccgcaagagcaaccucaagcccuucgagcgggacaucuccaccgagaucuaccaggccggcagcacccccugcaacgggguggagggcuucaacugcuacuucccccugcaguccuacggguuccagccgaccaacggcgugggguaccagcccuaccggguggucgugcugagcuucgagcuccugcacgcccccgccacggugugcggccccaagaaguccaccaaccuggucaagaacaagugcgugaacuucaacuucaacggccucaccgggaccggcgugcugaccgagagcaacaagaaguuccugccguuccagcaguucgggcgcgacaucgccgacacgaccgacgcgguccgcgacccccagacccuggagauccucgacaucacccccugcagcuucggcgggguguccgugaucacgccgggcaccaacaccagcaaccaggucgccgugcuguaccagggcgugaacugcaccgagguccccguggccauccacgccgaccagcugacgcccaccuggcggguguacuccaccggcagcaacgucuuccagacccgcgccgggugccucaucggcgcggagcacgugaacaacuccuacgagugcgacauccccaucggggccggcaucugcgccagcuaccagacgcagaccaacuccccgcggcgcgcccggagcguggcgucccagagcaucaucgccuacaccaugucccugggcgccgagaacagcgucgccuacuccaacaacagcaucgccauccccaccaacuucacgaucuccgugaccaccgagauccugcccgugagcaugaccaagacgagcgucgacugcaccauguacaucugcggggacuccaccgagugcagcaaccuccugcugcaguacggcuccuucugcacccagcucaaccgcgcgcugacggggaucgccguggagcaggacaagaacacccaggagguguucgcccaggucaagcagaucuacaagacgcccccgaucaaggacuucggcggguucaacuucagccagauccugcccgaccccuccaagcccagcaagcgguccuucaucgaggaccuccuguucaacaaggugacccuggccgacgccggcuucaucaagcaguacggcgacugccucggggacaucgcggcccgcgaccugaucugcgcccagaaguucaacggccugaccgugcucccgccccugcugaccgacgagaugaucgcccaguacaccagcgcccuccuggcggggaccaucacguccggcuggaccuucggggccggcgccgcccugcagauccccuucgcgaugcagauggccuaccgguucaacggcaucggggucacccagaacgugcucuacgagaaccagaagcugaucgccaaccaguucaacagcgccaucggcaagauccaggacucccugagcuccaccgccagcgcgcucgggaagcugcaggacguggucaaccagaacgcccaggcccugaacacgcucgugaagcagcuguccagcaacuucggcgccaucuccagcgugcugaacgacauccucucccgccuggacccgcccgaggccgaggugcagaucgaccggcugaucaccgggcgccuccagagccugcagaccuacgugacccagcagcugauccgggcggccgagauccgcgccagcgccaaccucgccgcgaccaagauguccgagugcguccugggccagagcaagcggguggacuucugcggcaagggguaccaccugauguccuucccccagagcgccccgcacggcguggucuuccuccacgugacguacguccccgcccaggagaagaacuucaccaccgcccccgcgaucugccacgacgggaaggcccacuucccccgcgagggcguguucguguccaacgggacccacugguucgucacgcagcggaacuucuacgagccgcagaucaucaccaccgacaacaccuucgugagcggcaacugcgacguggucaucggcaucgugaacaacacgguguacgacccccugcagcccgagcuggacuccuucaaggaggagcucgacaaguacuucaagaaccacaccagccccgacgucgaccugggggacaucuccggcaucaacgccagcguggugaacauccagaaggagaucgaccgccugaacgaggucgccaagaaccucaacgagucccugaucgaccugcaggagcucgggaaguacgagcaguacaucaaguggccgugguacaucuggcugggcuucaucgccggccugaucgcgaucgugauggugaccaucaugcucugcugcaugaccagcugcugcuccugccugaaggggugcugcagcugcggcuccugcugcaaguucgacgaggacgacagcgagcccguccugaagggggugaagcuccacuacacgugaggacuaguguccaccugucccuccugggcugcuggauugucucguuuuccugccaaauaaacaggaucagcgcuuuacagaucucaaaggcucuuuucagagccaccaaaaaaaaaaaaaaaaaaaaaaaaaaaaaaaaaaaaaaaaaaaaaaaaaaaaaaaaaaaaaaaaaaaaaaaaaaaaaaaaaaaaaaaaaaaaaaaaaaaaa

SEQ ID NO: 23961 - RNA, 4129 nt, Artificial Sequence
  SARS-CoV-2/Wuhan/WIV05/2019__EPI_ISL_402128 spike protein mRNA gc (1-1273)(K986P_V987P_S477N_D614G)
aggagacccgugacccggaaguuguacggcuacgcgacuuucccucccacaaacccucgcgcccuuccuuuccuacuugggcccggcagaaagcuuaccauguucguguuccugguccuccugccccuggugagcucccagugcgugaaccucaccacccgcacgcagcugccgcccgccuacaccaacagcuucacccggggcgucuacuaccccgacaagguguuccgcuccagcgugcugcacuccacccaggaccucuuccugcccuucuucagcaacgucacgugguuccacgccauccacguguccgggaccaacggcaccaagcgguucgacaacccggugcugcccuucaacgacggggucuacuucgcgagcaccgagaaguccaacaucauccgcggcuggaucuucgggacgacccucgacagcaagacccagucccugcugaucgugaacaacgccaccaacguggucaucaaggugugcgaguuccaguucugcaacgaccccuuccucggcguguacuaccacaagaacaacaagagcuggauggaguccgaguuccgggucuacagcuccgccaacaacugcacguucgaguacgugagccagcccuuccugauggaccuggagggcaagcaggggaacuucaagaaccuccgcgaguucguguucaagaacaucgacggcuacuucaagaucuacuccaagcacaccccgaucaaccugguccgggaccugccccagggguucagcgcccucgagccccugguggaccugcccaucggcaucaacaucacccgcuuccagacccuccuggcccugcaccgguccuaccucacgccgggggacagcagcuccggcuggaccgcgggcgccgccgccuacuacgugggguaccugcagccccgcaccuuccugcucaaguacaacgagaacggcaccaucacggacgcggucgacugcgcccuggacccccugagcgagaccaagugcacccucaaguccuucaccguggagaaggggaucuaccagacgagcaacuuccgggugcagcccaccgaguccaucguccgcuucccgaacaucaccaaccugugccccuucggcgagguguucaacgccacccgguucgccagcgucuacgccuggaaccgcaagcggaucuccaacugcguggcggacuacagcgugcuguacaacuccgccagcuucuccacguucaagugcuacggcgucagccccaccaagcucaacgaccugugcuucaccaacguguacgccgacuccuucgugauccgcggggacgagguccggcagaucgcccccggccagaccgggaagaucgccgacuacaacuacaagcugccggacgacuucacgggcugcgugaucgcguggaacagcaacaaccucgacuccaaggucgggggcaacuacaacuaccuguaccgccuguuccgcaagagcaaccucaagcccuucgagcgggacaucuccaccgagaucuaccaggccggcaacacccccugcaacgggguggagggcuucaacugcuacuucccccugcaguccuacggguuccagccgaccaacggcgugggguaccagcccuaccggguggucgugcugagcuucgagcuccugcacgcccccgccacggugugcggccccaagaaguccaccaaccuggucaagaacaagugcgugaacuucaacuucaacggccucaccgggaccggcgugcugaccgagagcaacaagaaguuccugccguuccagcaguucgggcgcgacaucgccgacacgaccgacgcgguccgcgacccccagacccuggagauccucgacaucacccccugcagcuucggcgggguguccgugaucacgccgggcaccaacaccagcaaccaggucgccgugcuguaccagggcgugaacugcaccgagguccccguggccauccacgccgaccagcugacgcccaccuggcggguguacuccaccggcagcaacgucuuccagacccgcgccgggugccucaucggcgcggagcacgugaacaacuccuacgagugcgacauccccaucggggccggcaucugcgccagcuaccagacgcagaccaacuccccgcggcgcgcccggagcguggcgucccagagcaucaucgccuacaccaugucccugggcgccgagaacagcgucgccuacuccaacaacagcaucgccauccccaccaacuucacgaucuccgugaccaccgagauccugcccgugagcaugaccaagacgagcgucgacugcaccauguacaucugcggggacuccaccgagugcagcaaccuccugcugcaguacggcuccuucugcacccagcucaaccgcgcgcugacggggaucgccguggagcaggacaagaacacccaggagguguucgcccaggucaagcagaucuacaagacgcccccgaucaaggacuucggcggguucaacuucagccagauccugcccgaccccuccaagcccagcaagcgguccuucaucgaggaccuccuguucaacaaggugacccuggccgacgccggcuucaucaagcaguacggcgacugccucggggacaucgcggcccgcgaccugaucugcgcccagaaguucaacggccugaccgugcucccgccccugcugaccgacgagaugaucgcccaguacaccagcgcccuccuggcggggaccaucacguccggcuggaccuucggggccggcgccgcccugcagauccccuucgcgaugcagauggccuaccgguucaacggcaucggggucacccagaacgugcucuacgagaaccagaagcugaucgccaaccaguucaacagcgccaucggcaagauccaggacucccugagcuccaccgccagcgcgcucgggaagcugcaggacguggucaaccagaacgcccaggcccugaacacgcucgugaagcagcuguccagcaacuucggcgccaucuccagcgugcugaacgacauccucucccgccuggacccgcccgaggccgaggugcagaucgaccggcugaucaccgggcgccuccagagccugcagaccuacgugacccagcagcugauccgggcggccgagauccgcgccagcgccaaccucgccgcgaccaagauguccgagugcguccugggccagagcaagcggguggacuucugcggcaagggguaccaccugauguccuucccccagagcgccccgcacggcguggucuuccuccacgugacguacguccccgcccaggagaagaacuucaccaccgcccccgcgaucugccacgacgggaaggcccacuucccccgcgagggcguguucguguccaacgggacccacugguucgucacgcagcggaacuucuacgagccgcagaucaucaccaccgacaacaccuucgugagcggcaacugcgacguggucaucggcaucgugaacaacacgguguacgacccccugcagcccgagcuggacuccuucaaggaggagcucgacaaguacuucaagaaccacaccagccccgacgucgaccugggggacaucuccggcaucaacgccagcguggugaacauccagaaggagaucgaccgccugaacgaggucgccaagaaccucaacgagucccugaucgaccugcaggagcucgggaaguacgagcaguacaucaaguggccgugguacaucuggcugggcuucaucgccggccugaucgcgaucgugauggugaccaucaugcucugcugcaugaccagcugcugcuccugccugaaggggugcugcagcugcggcuccugcugcaaguucgacgaggacgacagcgagcccguccugaagggggugaagcuccacuacacgugaggacuaguguccaccugucccuccugggcugcuggauugucucguuuuccugccaaauaaacaggaucagcgcuuuacagaucucaaaggcucuuuucagagccaccaaaaaaaaaaaaaaaaaaaaaaaaaaaaaaaaaaaaaaaaaaaaaaaaaaaaaaaaaaaaaaaaaaaaaaaaaaaaaaaaaaaaaaaaaaaaaaaaaaaaa

SEQ ID NO: 23962 - RNA, 4129 nt, Artificial Sequence
  SARS-CoV-2/Wuhan/WIV05/2019__EPI_ISL_402128 spike protein mRNA gc (1-1273)(K986P_V987P_N501Y_D614G)
aggagacccgugacccggaaguuguacggcuacgcgacuuucccucccacaaacccucgcgcccuuccuuuccuacuugggcccggcagaaagcuuaccauguucguguuccugguccuccugccccuggugagcucccagugcgugaaccucaccacccgcacgcagcugccgcccgccuacaccaacagcuucacccggggcgucuacuaccccgacaagguguuccgcuccagcgugcugcacuccacccaggaccucuuccugcccuucuucagcaacgucacgugguuccacgccauccacguguccgggaccaacggcaccaagcgguucgacaacccggugcugcccuucaacgacggggucuacuucgcgagcaccgagaaguccaacaucauccgcggcuggaucuucgggacgacccucgacagcaagacccagucccugcugaucgugaacaacgccaccaacguggucaucaaggugugcgaguuccaguucugcaacgaccccuuccucggcguguacuaccacaagaacaacaagagcuggauggaguccgaguuccgggucuacagcuccgccaacaacugcacguucgaguacgugagccagcccuuccugauggaccuggagggcaagcaggggaacuucaagaaccuccgcgaguucguguucaagaacaucgacggcuacuucaagaucuacuccaagcacaccccgaucaaccugguccgggaccugccccagggguucagcgcccucgagccccugguggaccugcccaucggcaucaacaucacccgcuuccagacccuccuggcccugcaccgguccuaccucacgccgggggacagcagcuccggcuggaccgcgggcgccgccgccuacuacgugggguaccugcagccccgcaccuuccugcucaaguacaacgagaacggcaccaucacggacgcggucgacugcgcccuggacccccugagcgagaccaagugcacccucaaguccuucaccguggagaaggggaucuaccagacgagcaacuuccgggugcagcccaccgaguccaucguccgcuucccgaacaucaccaaccugugccccuucggcgagguguucaacgccacccgguucgccagcgucuacgccuggaaccgcaagcggaucuccaacugcguggcggacuacagcgugcuguacaacuccgccagcuucuccacguucaagugcuacggcgucagccccaccaagcucaacgaccugugcuucaccaacguguacgccgacuccuucgugauccgcggggacgagguccggcagaucgcccccggccagaccgggaagaucgccgacuacaacuacaagcugccggacgacuucacgggcugcgugaucgcguggaacagcaacaaccucgacuccaaggucgggggcaacuacaacuaccuguaccgccuguuccgcaagagcaaccucaagcccuucgagcgggacaucuccaccgagaucuaccaggccggcagcacccccugcaacgggguggagggcuucaacugcuacuucccccugcaguccuacggguuccagccgaccuacggcgugggguaccagcccuaccggguggucgugcugagcuucgagcuccugcacgcccccgccacggugugcggccccaagaaguccaccaaccuggucaagaacaagugcgugaacuucaacuucaacggccucaccgggaccggcgugcugaccgagagcaacaagaaguuccugccguuccagcaguucgggcgcgacaucgccgacacgaccgacgcgguccgcgacccccagacccuggagauccucgacaucacccccugcagcuucggcgggguguccgugaucacgccgggcaccaacaccagcaaccaggucgccgugcuguaccagggcgugaacugcaccgagguccccguggccauccacgccgaccagcugacgcccaccuggcggguguacuccaccggcagcaacgucuuccagacccgcgccgggugccucaucggcgcggagcacgugaacaacuccuacgagugcgacauccccaucggggccggcaucugcgccagcuaccagacgcagaccaacuccccgcggcgcgcccggagcguggcgucccagagcaucaucgccuacaccaugucccugggcgccgagaacagcgucgccuacuccaacaacagcaucgccauccccaccaacuucacgaucuccgugaccaccgagauccugcccgugagcaugaccaagacgagcgucgacugcaccauguacaucugcggggacuccaccgagugcagcaaccuccugcugcaguacggcuccuucugcacccagcucaaccgcgcgcugacggggaucgccguggagcaggacaagaacacccaggagguguucgcccaggucaagcagaucuacaagacgcccccgaucaaggacuucggcggguucaacuucagccagauccugcccgaccccuccaagcccagcaagcgguccuucaucgaggaccuccuguucaacaaggugacccuggccgacgccggcuucaucaagcaguacggcgacugccucggggacaucgcggcccgcgaccugaucugcgcccagaaguucaacggccugaccgugcucccgccccugcugaccgacgagaugaucgcccaguacaccagcgcccuccuggcggggaccaucacguccggcuggaccuucggggccggcgccgcccugcagauccccuucgcgaugcagauggccuaccgguucaacggcaucggggucacccagaacgugcucuacgagaaccagaagcugaucgccaaccaguucaacagcgccaucggcaagauccaggacucccugagcuccaccgccagcgcgcucgggaagcugcaggacguggucaaccagaacgcccaggcccugaacacgcucgugaagcagcuguccagcaacuucggcgccaucuccagcgugcugaacgacauccucucccgccuggacccgcccgaggccgaggugcagaucgaccggcugaucaccgggcgccuccagagccugcagaccuacgugacccagcagcugauccgggcggccgagauccgcgccagcgccaaccucgccgcgaccaagauguccgagugcguccugggccagagcaagcggguggacuucugcggcaagggguaccaccugauguccuucccccagagcgccccgcacggcguggucuuccuccacgugacguacguccccgcccaggagaagaacuucaccaccgcccccgcgaucugccacgacgggaaggcccacuucccccgcgagggcguguucguguccaacgggacccacugguucgucacgcagcggaacuucuacgagccgcagaucaucaccaccgacaacaccuucgugagcggcaacugcgacguggucaucggcaucgugaacaacacgguguacgacccccugcagcccgagcuggacuccuucaaggaggagcucgacaaguacuucaagaaccacaccagccccgacgucgaccugggggacaucuccggcaucaacgccagcguggugaacauccagaaggagaucgaccgccugaacgaggucgccaagaaccucaacgagucccugaucgaccugcaggagcucgggaaguacgagcaguacaucaaguggccgugguacaucuggcugggcuucaucgccggccugaucgcgaucgugauggugaccaucaugcucugcugcaugaccagcugcugcuccugccugaaggggugcugcagcugcggcuccugcugcaaguucgacgaggacgacagcgagcccguccugaagggggugaagcuccacuacacgugaggacuaguguccaccugucccuccugggcugcuggauugucucguuuuccugccaaauaaacaggaucagcgcuuuacagaucucaaaggcucuuuucagagccaccaaaaaaaaaaaaaaaaaaaaaaaaaaaaaaaaaaaaaaaaaaaaaaaaaaaaaaaaaaaaaaaaaaaaaaaaaaaaaaaaaaaaaaaaaaaaaaaaaaaaa

SEQ ID NO: 23963 - RNA, 4123 nt, Artificial Sequence
  SARS-CoV-2/Wuhan/WIV05/2019__EPI_ISL_402128 spike protein mRNA gc (1-1273)(K986P_V987P_H69del_V70del_D614G)
aggagacccgugacccggaaguuguacggcuacgcgacuuucccucccacaaacccucgcgcccuuccuuuccuacuugggcccggcagaaagcuuaccauguucguguuccugguccuccugccccuggugagcucccagugcgugaaccucaccacccgcacgcagcugccgcccgccuacaccaacagcuucacccggggcgucuacuaccccgacaagguguuccgcuccagcgugcugcacuccacccaggaccucuuccugcccuucuucagcaacgucacgugguuccacgccaucuccgggaccaacggcaccaagcgguucgacaacccggugcugcccuucaacgacggggucuacuucgcgagcaccgagaaguccaacaucauccgcggcuggaucuucgggacgacccucgacagcaagacccagucccugcugaucgugaacaacgccaccaacguggucaucaaggugugcgaguuccaguucugcaacgaccccuuccucggcguguacuaccacaagaacaacaagagcuggauggaguccgaguuccgggucuacagcuccgccaacaacugcacguucgaguacgugagccagcccuuccugauggaccuggagggcaagcaggggaacuucaagaaccuccgcgaguucguguucaagaacaucgacggcuacuucaagaucuacuccaagcacaccccgaucaaccugguccgggaccugccccagggguucagcgcccucgagccccugguggaccugcccaucggcaucaacaucacccgcuuccagacccuccuggcccugcaccgguccuaccucacgccgggggacagcagcuccggcuggaccgcgggcgccgccgccuacuacgugggguaccugcagccccgcaccuuccugcucaaguacaacgagaacggcaccaucacggacgcggucgacugcgcccuggacccccugagcgagaccaagugcacccucaaguccuucaccguggagaaggggaucuaccagacgagcaacuuccgggugcagcccaccgaguccaucguccgcuucccgaacaucaccaaccugugccccuucggcgagguguucaacgccacccgguucgccagcgucuacgccuggaaccgcaagcggaucuccaacugcguggcggacuacagcgugcuguacaacuccgccagcuucuccacguucaagugcuacggcgucagccccaccaagcucaacgaccugugcuucaccaacguguacgccgacuccuucgugauccgcggggacgagguccggcagaucgcccccggccagaccgggaagaucgccgacuacaacuacaagcugccggacgacuucacgggcugcgugaucgcguggaacagcaacaaccucgacuccaaggucgggggcaacuacaacuaccuguaccgccuguuccgcaagagcaaccucaagcccuucgagcgggacaucuccaccgagaucuaccaggccggcagcacccccugcaacgggguggagggcuucaacugcuacuucccccugcaguccuacggguuccagccgaccaacggcgugggguaccagcccuaccggguggucgugcugagcuucgagcuccugcacgcccccgccacggugugcggccccaagaaguccaccaaccuggucaagaacaagugcgugaacuucaacuucaacggccucaccgggaccggcgugcugaccgagagcaacaagaaguuccugccguuccagcaguucgggcgcgacaucgccgacacgaccgacgcgguccgcgacccccagacccuggagauccucgacaucacccccugcagcuucggcgggguguccgugaucacgccgggcaccaacaccagcaaccaggucgccgugcuguaccagggcgugaacugcaccgagguccccguggccauccacgccgaccagcugacgcccaccuggcggguguacuccaccggcagcaacgucuuccagacccgcgccgggugccucaucggcgcggagcacgugaacaacuccuacgagugcgacauccccaucggggccggcaucugcgccagcuaccagacgcagaccaacuccccgcggcgcgcccggagcguggcgucccagagcaucaucgccuacaccaugucccugggcgccgagaacagcgucgccuacuccaacaacagcaucgccauccccaccaacuucacgaucuccgugaccaccgagauccugcccgugagcaugaccaagacgagcgucgacugcaccauguacaucugcggggacuccaccgagugcagcaaccuccugcugcaguacggcuccuucugcacccagcucaaccgcgcgcugacggggaucgccguggagcaggacaagaacacccaggagguguucgcccaggucaagcagaucuacaagacgcccccgaucaaggacuucggcggguucaacuucagccagauccugcccgaccccuccaagcccagcaagcgguccuucaucgaggaccuccuguucaacaaggugacccuggccgacgccggcuucaucaagcaguacggcgacugccucggggacaucgcggcccgcgaccugaucugcgcccagaaguucaacggccugaccgugcucccgccccugcugaccgacgagaugaucgcccaguacaccagcgcccuccuggcggggaccaucacguccggcuggaccuucggggccggcgccgcccugcagauccccuucgcgaugcagauggccuaccgguucaacggcaucggggucacccagaacgugcucuacgagaaccagaagcugaucgccaaccaguucaacagcgccaucggcaagauccaggacucccugagcuccaccgccagcgcgcucgggaagcugcaggacguggucaaccagaacgcccaggcccugaacacgcucgugaagcagcuguccagcaacuucggcgccaucuccagcgugcugaacgacauccucucccgccuggacccgcccgaggccgaggugcagaucgaccggcugaucaccgggcgccuccagagccugcagaccuacgugacccagcagcugauccgggcggccgagauccgcgccagcgccaaccucgccgcgaccaagauguccgagugcguccugggccagagcaagcggguggacuucugcggcaagggguaccaccugauguccuucccccagagcgccccgcacggcguggucuuccuccacgugacguacguccccgcccaggagaagaacuucaccaccgcccccgcgaucugccacgacgggaaggcccacuucccccgcgagggcguguucguguccaacgggacccacugguucgucacgcagcggaacuucuacgagccgcagaucaucaccaccgacaacaccuucgugagcggcaacugcgacguggucaucggcaucgugaacaacacgguguacgacccccugcagcccgagcuggacuccuucaaggaggagcucgacaaguacuucaagaaccacaccagccccgacgucgaccugggggacaucuccggcaucaacgccagcguggugaacauccagaaggagaucgaccgccugaacgaggucgccaagaaccucaacgagucccugaucgaccugcaggagcucgggaaguacgagcaguacaucaaguggccgugguacaucuggcugggcuucaucgccggccugaucgcgaucgugauggugaccaucaugcucugcugcaugaccagcugcugcuccugccugaaggggugcugcagcugcggcuccugcugcaaguucgacgaggacgacagcgagcccguccugaagggggugaagcuccacuacacgugaggacuaguguccaccugucccuccugggcugcuggauugucucguuuuccugccaaauaaacaggaucagcgcuuuacagaucucaaaggcucuuuucagagccaccaaaaaaaaaaaaaaaaaaaaaaaaaaaaaaaaaaaaaaaaaaaaaaaaaaaaaaaaaaaaaaaaaaaaaaaaaaaaaaaaaaaaaaaaaaaaaaaaaaaaa

SEQ ID NO: 23964 - RNA, 4129 nt, Artificial Sequence
  SARS-CoV-2/Wuhan/WIV05/2019__EPI_ISL_402128 spike protein mRNA gc (1-1273)(K986P_V987P_Y453F_D614G)
aggagacccgugacccggaaguuguacggcuacgcgacuuucccucccacaaacccucgcgcccuuccuuuccuacuugggcccggcagaaagcuuaccauguucguguuccugguccuccugccccuggugagcucccagugcgugaaccucaccacccgcacgcagcugccgcccgccuacaccaacagcuucacccggggcgucuacuaccccgacaagguguuccgcuccagcgugcugcacuccacccaggaccucuuccugcccuucuucagcaacgucacgugguuccacgccauccacguguccgggaccaacggcaccaagcgguucgacaacccggugcugcccuucaacgacggggucuacuucgcgagcaccgagaaguccaacaucauccgcggcuggaucuucgggacgacccucgacagcaagacccagucccugcugaucgugaacaacgccaccaacguggucaucaaggugugcgaguuccaguucugcaacgaccccuuccucggcguguacuaccacaagaacaacaagagcuggauggaguccgaguuccgggucuacagcuccgccaacaacugcacguucgaguacgugagccagcccuuccugauggaccuggagggcaagcaggggaacuucaagaaccuccgcgaguucguguucaagaacaucgacggcuacuucaagaucuacuccaagcacaccccgaucaaccugguccgggaccugccccagggguucagcgcccucgagccccugguggaccugcccaucggcaucaacaucacccgcuuccagacccuccuggcccugcaccgguccuaccucacgccgggggacagcagcuccggcuggaccgcgggcgccgccgccuacuacgugggguaccugcagccccgcaccuuccugcucaaguacaacgagaacggcaccaucacggacgcggucgacugcgcccuggacccccugagcgagaccaagugcacccucaaguccuucaccguggagaaggggaucuaccagacgagcaacuuccgggugcagcccaccgaguccaucguccgcuucccgaacaucaccaaccugugccccuucggcgagguguucaacgccacccgguucgccagcgucuacgccuggaaccgcaagcggaucuccaacugcguggcggacuacagcgugcuguacaacuccgccagcuucuccacguucaagugcuacggcgucagccccaccaagcucaacgaccugugcuucaccaacguguacgccgacuccuucgugauccgcggggacgagguccggcagaucgcccccggccagaccgggaagaucgccgacuacaacuacaagcugccggacgacuucacgggcugcgugaucgcguggaacagcaacaaccucgacuccaaggucgggggcaacuacaacuaccuguuccgccuguuccgcaagagcaaccucaagcccuucgagcgggacaucuccaccgagaucuaccaggccggcagcacccccugcaacgggguggagggcuucaacugcuacuucccccugcaguccuacggguuccagccgaccaacggcgugggguaccagcccuaccggguggucgugcugagcuucgagcuccugcacgcccccgccacggugugcggccccaagaaguccaccaaccuggucaagaacaagugcgugaacuucaacuucaacggccucaccgggaccggcgugcugaccgagagcaacaagaaguuccugccguuccagcaguucgggcgcgacaucgccgacacgaccgacgcgguccgcgacccccagacccuggagauccucgacaucacccccugcagcuucggcgggguguccgugaucacgccgggcaccaacaccagcaaccaggucgccgugcuguaccagggcgugaacugcaccgagguccccguggccauccacgccgaccagcugacgcccaccuggcggguguacuccaccggcagcaacgucuuccagacccgcgccgggugccucaucggcgcggagcacgugaacaacuccuacgagugcgacauccccaucggggccggcaucugcgccagcuaccagacgcagaccaacuccccgcggcgcgcccggagcguggcgucccagagcaucaucgccuacaccaugucccugggcgccgagaacagcgucgccuacuccaacaacagcaucgccauccccaccaacuucacgaucuccgugaccaccgagauccugcccgugagcaugaccaagacgagcgucgacugcaccauguacaucugcggggacuccaccgagugcagcaaccuccugcugcaguacggcuccuucugcacccagcucaaccgcgcgcugacggggaucgccguggagcaggacaagaacacccaggagguguucgcccaggucaagcagaucuacaagacgcccccgaucaaggacuucggcggguucaacuucagccagauccugcccgaccccuccaagcccagcaagcgguccuucaucgaggaccuccuguucaacaaggugacccuggccgacgccggcuucaucaagcaguacggcgacugccucggggacaucgcggcccgcgaccugaucugcgcccagaaguucaacggccugaccgugcucccgccccugcugaccgacgagaugaucgcccaguacaccagcgcccuccuggcggggaccaucacguccggcuggaccuucggggccggcgccgcccugcagauccccuucgcgaugcagauggccuaccgguucaacggcaucggggucacccagaacgugcucuacgagaaccagaagcugaucgccaaccaguucaacagcgccaucggcaagauccaggacucccugagcuccaccgccagcgcgcucgggaagcugcaggacguggucaaccagaacgcccaggcccugaacacgcucgugaagcagcuguccagcaacuucggcgccaucuccagcgugcugaacgacauccucucccgccuggacccgcccgaggccgaggugcagaucgaccggcugaucaccgggcgccuccagagccugcagaccuacgugacccagcagcugauccgggcggccgagauccgcgccagcgccaaccucgccgcgaccaagauguccgagugcguccugggccagagcaagcggguggacuucugcggcaagggguaccaccugauguccuucccccagagcgccccgcacggcguggucuuccuccacgugacguacguccccgcccaggagaagaacuucaccaccgcccccgcgaucugccacgacgggaaggcccacuucccccgcgagggcguguucguguccaacgggacccacugguucgucacgcagcggaacuucuacgagccgcagaucaucaccaccgacaacaccuucgugagcggcaacugcgacguggucaucggcaucgugaacaacacgguguacgacccccugcagcccgagcuggacuccuucaaggaggagcucgacaaguacuucaagaaccacaccagccccgacgucgaccugggggacaucuccggcaucaacgccagcguggugaacauccagaaggagaucgaccgccugaacgaggucgccaagaaccucaacgagucccugaucgaccugcaggagcucgggaaguacgagcaguacaucaaguggccgugguacaucuggcugggcuucaucgccggccugaucgcgaucgugauggugaccaucaugcucugcugcaugaccagcugcugcuccugccugaaggggugcugcagcugcggcuccugcugcaaguucgacgaggacgacagcgagcccguccugaagggggugaagcuccacuacacgugaggacuaguguccaccugucccuccugggcugcuggauugucucguuuuccugccaaauaaacaggaucagcgcuuuacagaucucaaaggcucuuuucagagccaccaaaaaaaaaaaaaaaaaaaaaaaaaaaaaaaaaaaaaaaaaaaaaaaaaaaaaaaaaaaaaaaaaaaaaaaaaaaaaaaaaaaaaaaaaaaaaaaaaaaaa

SEQ ID NO: 23965 - RNA, 4129 nt, Artificial Sequence
  SARS-CoV-2/Wuhan/WIV05/2019__EPI_ISL_402128 spike protein mRNA gc (1-1273)(K986P_V987P_D614G_I692V)
aggagacccgugacccggaaguuguacggcuacgcgacuuucccucccacaaacccucgcgcccuuccuuuccuacuugggcccggcagaaagcuuaccauguucguguuccugguccuccugccccuggugagcucccagugcgugaaccucaccacccgcacgcagcugccgcccgccuacaccaacagcuucacccggggcgucuacuaccccgacaagguguuccgcuccagcgugcugcacuccacccaggaccucuuccugcccuucuucagcaacgucacgugguuccacgccauccacguguccgggaccaacggcaccaagcgguucgacaacccggugcugcccuucaacgacggggucuacuucgcgagcaccgagaaguccaacaucauccgcggcuggaucuucgggacgacccucgacagcaagacccagucccugcugaucgugaacaacgccaccaacguggucaucaaggugugcgaguuccaguucugcaacgaccccuuccucggcguguacuaccacaagaacaacaagagcuggauggaguccgaguuccgggucuacagcuccgccaacaacugcacguucgaguacgugagccagcccuuccugauggaccuggagggcaagcaggggaacuucaagaaccuccgcgaguucguguucaagaacaucgacggcuacuucaagaucuacuccaagcacaccccgaucaaccugguccgggaccugccccagggguucagcgcccucgagccccugguggaccugcccaucggcaucaacaucacccgcuuccagacccuccuggcccugcaccgguccuaccucacgccgggggacagcagcuccggcuggaccgcgggcgccgccgccuacuacgugggguaccugcagccccgcaccuuccugcucaaguacaacgagaacggcaccaucacggacgcggucgacugcgcccuggacccccugagcgagaccaagugcacccucaaguccuucaccguggagaaggggaucuaccagacgagcaacuuccgggugcagcccaccgaguccaucguccgcuucccgaacaucaccaaccugugccccuucggcgagguguucaacgccacccgguucgccagcgucuacgccuggaaccgcaagcggaucuccaacugcguggcggacuacagcgugcuguacaacuccgccagcuucuccacguucaagugcuacggcgucagccccaccaagcucaacgaccugugcuucaccaacguguacgccgacuccuucgugauccgcggggacgagguccggcagaucgcccccggccagaccgggaagaucgccgacuacaacuacaagcugccggacgacuucacgggcugcgugaucgcguggaacagcaacaaccucgacuccaaggucgggggcaacuacaacuaccuguaccgccuguuccgcaagagcaaccucaagcccuucgagcgggacaucuccaccgagaucuaccaggccggcagcacccccugcaacgggguggagggcuucaacugcuacuucccccugcaguccuacggguuccagccgaccaacggcgugggguaccagcccuaccggguggucgugcugagcuucgagcuccugcacgcccccgccacggugugcggccccaagaaguccaccaaccuggucaagaacaagugcgugaacuucaacuucaacggccucaccgggaccggcgugcugaccgagagcaacaagaaguuccugccguuccagcaguucgggcgcgacaucgccgacacgaccgacgcgguccgcgacccccagacccuggagauccucgacaucacccccugcagcuucggcgggguguccgugaucacgccgggcaccaacaccagcaaccaggucgccgugcuguaccagggcgugaacugcaccgagguccccguggccauccacgccgaccagcugacgcccaccuggcggguguacuccaccggcagcaacgucuuccagacccgcgccgggugccucaucggcgcggagcacgugaacaacuccuacgagugcgacauccccaucggggccggcaucugcgccagcuaccagacgcagaccaacuccccgcggcgcgcccggagcguggcgucccagagcgucaucgccuacaccaugucccugggcgccgagaacagcgucgccuacuccaacaacagcaucgccauccccaccaacuucacgaucuccgugaccaccgagauccugcccgugagcaugaccaagacgagcgucgacugcaccauguacaucugcggggacuccaccgagugcagcaaccuccugcugcaguacggcuccuucugcacccagcucaaccgcgcgcugacggggaucgccguggagcaggacaagaacacccaggagguguucgcccaggucaagcagaucuacaagacgcccccgaucaaggacuucggcggguucaacuucagccagauccugcccgaccccuccaagcccagcaagcgguccuucaucgaggaccuccuguucaacaaggugacccuggccgacgccggcuucaucaagcaguacggcgacugccucggggacaucgcggcccgcgaccugaucugcgcccagaaguucaacggccugaccgugcucccgccccugcugaccgacgagaugaucgcccaguacaccagcgcccuccuggcggggaccaucacguccggcuggaccuucggggccggcgccgcccugcagauccccuucgcgaugcagauggccuaccgguucaacggcaucggggucacccagaacgugcucuacgagaaccagaagcugaucgccaaccaguucaacagcgccaucggcaagauccaggacucccugagcuccaccgccagcgcgcucgggaagcugcaggacguggucaaccagaacgcccaggcccugaacacgcucgugaagcagcuguccagcaacuucggcgccaucuccagcgugcugaacgacauccucucccgccuggacccgcccgaggccgaggugcagaucgaccggcugaucaccgggcgccuccagagccugcagaccuacgugacccagcagcugauccgggcggccgagauccgcgccagcgccaaccucgccgcgaccaagauguccgagugcguccugggccagagcaagcggguggacuucugcggcaagggguaccaccugauguccuucccccagagcgccccgcacggcguggucuuccuccacgugacguacguccccgcccaggagaagaacuucaccaccgcccccgcgaucugccacgacgggaaggcccacuucccccgcgagggcguguucguguccaacgggacccacugguucgucacgcagcggaacuucuacgagccgcagaucaucaccaccgacaacaccuucgugagcggcaacugcgacguggucaucggcaucgugaacaacacgguguacgacccccugcagcccgagcuggacuccuucaaggaggagcucgacaaguacuucaagaaccacaccagccccgacgucgaccugggggacaucuccggcaucaacgccagcguggugaacauccagaaggagaucgaccgccugaacgaggucgccaagaaccucaacgagucccugaucgaccugcaggagcucgggaaguacgagcaguacaucaaguggccgugguacaucuggcugggcuucaucgccggccugaucgcgaucgugauggugaccaucaugcucugcugcaugaccagcugcugcuccugccugaaggggugcugcagcugcggcuccugcugcaaguucgacgaggacgacagcgagcccguccugaagggggugaagcuccacuacacgugaggacuaguguccaccugucccuccugggcugcuggauugucucguuuuccugccaaauaaacaggaucagcgcuuuacagaucucaaaggcucuuuucagagccaccaaaaaaaaaaaaaaaaaaaaaaaaaaaaaaaaaaaaaaaaaaaaaaaaaaaaaaaaaaaaaaaaaaaaaaaaaaaaaaaaaaaaaaaaaaaaaaaaaaaaa

SEQ ID NO: 23966 - RNA, 4129 nt, Artificial Sequence
  SARS-CoV-2/Wuhan/WIV05/2019__EPI_ISL_402128 spike protein mRNA gc (1-1273)(K986P_V987P_D614G_M1229I)
aggagacccgugacccggaaguuguacggcuacgcgacuuucccucccacaaacccucgcgcccuuccuuuccuacuugggcccggcagaaagcuuaccauguucguguuccugguccuccugccccuggugagcucccagugcgugaaccucaccacccgcacgcagcugccgcccgccuacaccaacagcuucacccggggcgucuacuaccccgacaagguguuccgcuccagcgugcugcacuccacccaggaccucuuccugcccuucuucagcaacgucacgugguuccacgccauccacguguccgggaccaacggcaccaagcgguucgacaacccggugcugcccuucaacgacggggucuacuucgcgagcaccgagaaguccaacaucauccgcggcuggaucuucgggacgacccucgacagcaagacccagucccugcugaucgugaacaacgccaccaacguggucaucaaggugugcgaguuccaguucugcaacgaccccuuccucggcguguacuaccacaagaacaacaagagcuggauggaguccgaguuccgggucuacagcuccgccaacaacugcacguucgaguacgugagccagcccuuccugauggaccuggagggcaagcaggggaacuucaagaaccuccgcgaguucguguucaagaacaucgacggcuacuucaagaucuacuccaagcacaccccgaucaaccugguccgggaccugccccagggguucagcgcccucgagccccugguggaccugcccaucggcaucaacaucacccgcuuccagacccuccuggcccugcaccgguccuaccucacgccgggggacagcagcuccggcuggaccgcgggcgccgccgccuacuacgugggguaccugcagccccgcaccuuccugcucaaguacaacgagaacggcaccaucacggacgcggucgacugcgcccuggacccccugagcgagaccaagugcacccucaaguccuucaccguggagaaggggaucuaccagacgagcaacuuccgggugcagcccaccgaguccaucguccgcuucccgaacaucaccaaccugugccccuucggcgagguguucaacgccacccgguucgccagcgucuacgccuggaaccgcaagcggaucuccaacugcguggcggacuacagcgugcuguacaacuccgccagcuucuccacguucaagugcuacggcgucagccccaccaagcucaacgaccugugcuucaccaacguguacgccgacuccuucgugauccgcggggacgagguccggcagaucgcccccggccagaccgggaagaucgccgacuacaacuacaagcugccggacgacuucacgggcugcgugaucgcguggaacagcaacaaccucgacuccaaggucgggggcaacuacaacuaccuguaccgccuguuccgcaagagcaaccucaagcccuucgagcgggacaucuccaccgagaucuaccaggccggcagcacccccugcaacgggguggagggcuucaacugcuacuucccccugcaguccuacggguuccagccgaccaacggcgugggguaccagcccuaccggguggucgugcugagcuucgagcuccugcacgcccccgccacggugugcggccccaagaaguccaccaaccuggucaagaacaagugcgugaacuucaacuucaacggccucaccgggaccggcgugcugaccgagagcaacaagaaguuccugccguuccagcaguucgggcgcgacaucgccgacacgaccgacgcgguccgcgacccccagacccuggagauccucgacaucacccccugcagcuucggcgggguguccgugaucacgccgggcaccaacaccagcaaccaggucgccgugcuguaccagggcgugaacugcaccgagguccccguggccauccacgccgaccagcugacgcccaccuggcggguguacuccaccggcagcaacgucuuccagacccgcgccgggugccucaucggcgcggagcacgugaacaacuccuacgagugcgacauccccaucggggccggcaucugcgccagcuaccagacgcagaccaacuccccgcggcgcgcccggagcguggcgucccagagcaucaucgccuacaccaugucccugggcgccgagaacagcgucgccuacuccaacaacagcaucgccauccccaccaacuucacgaucuccgugaccaccgagauccugcccgugagcaugaccaagacgagcgucgacugcaccauguacaucugcggggacuccaccgagugcagcaaccuccugcugcaguacggcuccuucugcacccagcucaaccgcgcgcugacggggaucgccguggagcaggacaagaacacccaggagguguucgcccaggucaagcagaucuacaagacgcccccgaucaaggacuucggcggguucaacuucagccagauccugcccgaccccuccaagcccagcaagcgguccuucaucgaggaccuccuguucaacaaggugacccuggccgacgccggcuucaucaagcaguacggcgacugccucggggacaucgcggcccgcgaccugaucugcgcccagaaguucaacggccugaccgugcucccgccccugcugaccgacgagaugaucgcccaguacaccagcgcccuccuggcggggaccaucacguccggcuggaccuucggggccggcgccgcccugcagauccccuucgcgaugcagauggccuaccgguucaacggcaucggggucacccagaacgugcucuacgagaaccagaagcugaucgccaaccaguucaacagcgccaucggcaagauccaggacucccugagcuccaccgccagcgcgcucgggaagcugcaggacguggucaaccagaacgcccaggcccugaacacgcucgugaagcagcuguccagcaacuucggcgccaucuccagcgugcugaacgacauccucucccgccuggacccgcccgaggccgaggugcagaucgaccggcugaucaccgggcgccuccagagccugcagaccuacgugacccagcagcugauccgggcggccgagauccgcgccagcgccaaccucgccgcgaccaagauguccgagugcguccugggccagagcaagcggguggacuucugcggcaagggguaccaccugauguccuucccccagagcgccccgcacggcguggucuuccuccacgugacguacguccccgcccaggagaagaacuucaccaccgcccccgcgaucugccacgacgggaaggcccacuucccccgcgagggcguguucguguccaacgggacccacugguucgucacgcagcggaacuucuacgagccgcagaucaucaccaccgacaacaccuucgugagcggcaacugcgacguggucaucggcaucgugaacaacacgguguacgacccccugcagcccgagcuggacuccuucaaggaggagcucgacaaguacuucaagaaccacaccagccccgacgucgaccugggggacaucuccggcaucaacgccagcguggugaacauccagaaggagaucgaccgccugaacgaggucgccaagaaccucaacgagucccugaucgaccugcaggagcucgggaaguacgagcaguacaucaaguggccgugguacaucuggcugggcuucaucgccggccugaucgcgaucgugaucgugaccaucaugcucugcugcaugaccagcugcugcuccugccugaaggggugcugcagcugcggcuccugcugcaaguucgacgaggacgacagcgagcccguccugaagggggugaagcuccacuacacgugaggacuaguguccaccugucccuccugggcugcuggauugucucguuuuccugccaaauaaacaggaucagcgcuuuacagaucucaaaggcucuuuucagagccaccaaaaaaaaaaaaaaaaaaaaaaaaaaaaaaaaaaaaaaaaaaaaaaaaaaaaaaaaaaaaaaaaaaaaaaaaaaaaaaaaaaaaaaaaaaaaaaaaaaaaa

SEQ ID NO: 23967 - RNA, 4123 nt, Artificial Sequence
  SARS-CoV-2/Wuhan/WIV05/2019__EPI_ISL_402128 spike protein mRNA gc (1-1273)(K986P_V987P_H69del_V70del_A222V_Y453F_S477N_D614G_I692V)
aggagacccgugacccggaaguuguacggcuacgcgacuuucccucccacaaacccucgcgcccuuccuuuccuacuugggcccggcagaaagcuuaccauguucguguuccugguccuccugccccuggugagcucccagugcgugaaccucaccacccgcacgcagcugccgcccgccuacaccaacagcuucacccggggcgucuacuaccccgacaagguguuccgcuccagcgugcugcacuccacccaggaccucuuccugcccuucuucagcaacgucacgugguuccacgccaucuccgggaccaacggcaccaagcgguucgacaacccggugcugcccuucaacgacggggucuacuucgcgagcaccgagaaguccaacaucauccgcggcuggaucuucgggacgacccucgacagcaagacccagucccugcugaucgugaacaacgccaccaacguggucaucaaggugugcgaguuccaguucugcaacgaccccuuccucggcguguacuaccacaagaacaacaagagcuggauggaguccgaguuccgggucuacagcuccgccaacaacugcacguucgaguacgugagccagcccuuccugauggaccuggagggcaagcaggggaacuucaagaaccuccgcgaguucguguucaagaacaucgacggcuacuucaagaucuacuccaagcacaccccgaucaaccugguccgggaccugccccagggguucagcguccucgagccccugguggaccugcccaucggcaucaacaucacccgcuuccagacccuccuggcccugcaccgguccuaccucacgccgggggacagcagcuccggcuggaccgcgggcgccgccgccuacuacgugggguaccugcagccccgcaccuuccugcucaaguacaacgagaacggcaccaucacggacgcggucgacugcgcccuggacccccugagcgagaccaagugcacccucaaguccuucaccguggagaaggggaucuaccagacgagcaacuuccgggugcagcccaccgaguccaucguccgcuucccgaacaucaccaaccugugccccuucggcgagguguucaacgccacccgguucgccagcgucuacgccuggaaccgcaagcggaucuccaacugcguggcggacuacagcgugcuguacaacuccgccagcuucuccacguucaagugcuacggcgucagccccaccaagcucaacgaccugugcuucaccaacguguacgccgacuccuucgugauccgcggggacgagguccggcagaucgcccccggccagaccgggaagaucgccgacuacaacuacaagcugccggacgacuucacgggcugcgugaucgcguggaacagcaacaaccucgacuccaaggucgggggcaacuacaacuaccuguuccgccuguuccgcaagagcaaccucaagcccuucgagcgggacaucuccaccgagaucuaccaggccggcaacacccccugcaacgggguggagggcuucaacugcuacuucccccugcaguccuacggguuccagccgaccaacggcgugggguaccagcccuaccggguggucgugcugagcuucgagcuccugcacgcccccgccacggugugcggccccaagaaguccaccaaccuggucaagaacaagugcgugaacuucaacuucaacggccucaccgggaccggcgugcugaccgagagcaacaagaaguuccugccguuccagcaguucgggcgcgacaucgccgacacgaccgacgcgguccgcgacccccagacccuggagauccucgacaucacccccugcagcuucggcgggguguccgugaucacgccgggcaccaacaccagcaaccaggucgccgugcuguaccagggcgugaacugcaccgagguccccguggccauccacgccgaccagcugacgcccaccuggcggguguacuccaccggcagcaacgucuuccagacccgcgccgggugccucaucggcgcggagcacgugaacaacuccuacgagugcgacauccccaucggggccggcaucugcgccagcuaccagacgcagaccaacuccccgcggcgcgcccggagcguggcgucccagagcgucaucgccuacaccaugucccugggcgccgagaacagcgucgccuacuccaacaacagcaucgccauccccaccaacuucacgaucuccgugaccaccgagauccugcccgugagcaugaccaagacgagcgucgacugcaccauguacaucugcggggacuccaccgagugcagcaaccuccugcugcaguacggcuccuucugcacccagcucaaccgcgcgcugacggggaucgccguggagcaggacaagaacacccaggagguguucgcccaggucaagcagaucuacaagacgcccccgaucaaggacuucggcggguucaacuucagccagauccugcccgaccccuccaagcccagcaagcgguccuucaucgaggaccuccuguucaacaaggugacccuggccgacgccggcuucaucaagcaguacggcgacugccucggggacaucgcggcccgcgaccugaucugcgcccagaaguucaacggccugaccgugcucccgccccugcugaccgacgagaugaucgcccaguacaccagcgcccuccuggcggggaccaucacguccggcuggaccuucggggccggcgccgcccugcagauccccuucgcgaugcagauggccuaccgguucaacggcaucggggucacccagaacgugcucuacgagaaccagaagcugaucgccaaccaguucaacagcgccaucggcaagauccaggacucccugagcuccaccgccagcgcgcucgggaagcugcaggacguggucaaccagaacgcccaggcccugaacacgcucgugaagcagcuguccagcaacuucggcgccaucuccagcgugcugaacgacauccucucccgccuggacccgcccgaggccgaggugcagaucgaccggcugaucaccgggcgccuccagagccugcagaccuacgugacccagcagcugauccgggcggccgagauccgcgccagcgccaaccucgccgcgaccaagauguccgagugcguccugggccagagcaagcggguggacuucugcggcaagggguaccaccugauguccuucccccagagcgccccgcacggcguggucuuccuccacgugacguacguccccgcccaggagaagaacuucaccaccgcccccgcgaucugccacgacgggaaggcccacuucccccgcgagggcguguucguguccaacgggacccacugguucgucacgcagcggaacuucuacgagccgcagaucaucaccaccgacaacaccuucgugagcggcaacugcgacguggucaucggcaucgugaacaacacgguguacgacccccugcagcccgagcuggacuccuucaaggaggagcucgacaaguacuucaagaaccacaccagccccgacgucgaccugggggacaucuccggcaucaacgccagcguggugaacauccagaaggagaucgaccgccugaacgaggucgccaagaaccucaacgagucccugaucgaccugcaggagcucgggaaguacgagcaguacaucaaguggccgugguacaucuggcugggcuucaucgccggccugaucgcgaucgugauggugaccaucaugcucugcugcaugaccagcugcugcuccugccugaaggggugcugcagcugcggcuccugcugcaaguucgacgaggacgacagcgagcccguccugaagggggugaagcuccacuacacgugaggacuaguguccaccugucccuccugggcugcuggauugucucguuuuccugccaaauaaacaggaucagcgcuuuacagaucucaaaggcucuuuucagagccaccaaaaaaaaaaaaaaaaaaaaaaaaaaaaaaaaaaaaaaaaaaaaaaaaaaaaaaaaaaaaaaaaaaaaaaaaaaaaaaaaaaaaaaaaaaaaaaaaaaaaa

SEQ ID NO: 23968 - RNA, 4123 nt, Artificial Sequence
  SARS-CoV-2/Wuhan/WIV05/2019__EPI_ISL_402128 spike protein mRNA gc (1-1273)(K986P_V987P_H69del_V70del_Y453F_D614G_I692V_M1229I)
aggagacccgugacccggaaguuguacggcuacgcgacuuucccucccacaaacccucgcgcccuuccuuuccuacuugggcccggcagaaagcuuaccauguucguguuccugguccuccugccccuggugagcucccagugcgugaaccucaccacccgcacgcagcugccgcccgccuacaccaacagcuucacccggggcgucuacuaccccgacaagguguuccgcuccagcgugcugcacuccacccaggaccucuuccugcccuucuucagcaacgucacgugguuccacgccaucuccgggaccaacggcaccaagcgguucgacaacccggugcugcccuucaacgacggggucuacuucgcgagcaccgagaaguccaacaucauccgcggcuggaucuucgggacgacccucgacagcaagacccagucccugcugaucgugaacaacgccaccaacguggucaucaaggugugcgaguuccaguucugcaacgaccccuuccucggcguguacuaccacaagaacaacaagagcuggauggaguccgaguuccgggucuacagcuccgccaacaacugcacguucgaguacgugagccagcccuuccugauggaccuggagggcaagcaggggaacuucaagaaccuccgcgaguucguguucaagaacaucgacggcuacuucaagaucuacuccaagcacaccccgaucaaccugguccgggaccugccccagggguucagcgcccucgagccccugguggaccugcccaucggcaucaacaucacccgcuuccagacccuccuggcccugcaccgguccuaccucacgccgggggacagcagcuccggcuggaccgcgggcgccgccgccuacuacgugggguaccugcagccccgcaccuuccugcucaaguacaacgagaacggcaccaucacggacgcggucgacugcgcccuggacccccugagcgagaccaagugcacccucaaguccuucaccguggagaaggggaucuaccagacgagcaacuuccgggugcagcccaccgaguccaucguccgcuucccgaacaucaccaaccugugccccuucggcgagguguucaacgccacccgguucgccagcgucuacgccuggaaccgcaagcggaucuccaacugcguggcggacuacagcgugcuguacaacuccgccagcuucuccacguucaagugcuacggcgucagccccaccaagcucaacgaccugugcuucaccaacguguacgccgacuccuucgugauccgcggggacgagguccggcagaucgcccccggccagaccgggaagaucgccgacuacaacuacaagcugccggacgacuucacgggcugcgugaucgcguggaacagcaacaaccucgacuccaaggucgggggcaacuacaacuaccuguuccgccuguuccgcaagagcaaccucaagcccuucgagcgggacaucuccaccgagaucuaccaggccggcagcacccccugcaacgggguggagggcuucaacugcuacuucccccugcaguccuacggguuccagccgaccaacggcgugggguaccagcccuaccggguggucgugcugagcuucgagcuccugcacgcccccgccacggugugcggccccaagaaguccaccaaccuggucaagaacaagugcgugaacuucaacuucaacggccucaccgggaccggcgugcugaccgagagcaacaagaaguuccugccguuccagcaguucgggcgcgacaucgccgacacgaccgacgcgguccgcgacccccagacccuggagauccucgacaucacccccugcagcuucggcgggguguccgugaucacgccgggcaccaacaccagcaaccaggucgccgugcuguaccagggcgugaacugcaccgagguccccguggccauccacgccgaccagcugacgcccaccuggcggguguacuccaccggcagcaacgucuuccagacccgcgccgggugccucaucggcgcggagcacgugaacaacuccuacgagugcgacauccccaucggggccggcaucugcgccagcuaccagacgcagaccaacuccccgcggcgcgcccggagcguggcgucccagagcgugaucgccuacaccaugucccugggcgccgagaacagcgucgccuacuccaacaacagcaucgccauccccaccaacuucacgaucuccgugaccaccgagauccugcccgugagcaugaccaagacgagcgucgacugcaccauguacaucugcggggacuccaccgagugcagcaaccuccugcugcaguacggcuccuucugcacccagcucaaccgcgcgcugacggggaucgccguggagcaggacaagaacacccaggagguguucgcccaggucaagcagaucuacaagacgcccccgaucaaggacuucggcggguucaacuucagccagauccugcccgaccccuccaagcccagcaagcgguccuucaucgaggaccuccuguucaacaaggugacccuggccgacgccggcuucaucaagcaguacggcgacugccucggggacaucgcggcccgcgaccugaucugcgcccagaaguucaacggccugaccgugcucccgccccugcugaccgacgagaugaucgcccaguacaccagcgcccuccuggcggggaccaucacguccggcuggaccuucggggccggcgccgcccugcagauccccuucgcgaugcagauggccuaccgguucaacggcaucggggucacccagaacgugcucuacgagaaccagaagcugaucgccaaccaguucaacagcgccaucggcaagauccaggacucccugagcuccaccgccagcgcgcucgggaagcugcaggacguggucaaccagaacgcccaggcccugaacacgcucgugaagcagcuguccagcaacuucggcgccaucuccagcgugcugaacgacauccucucccgccuggacccgcccgaggccgaggugcagaucgaccggcugaucaccgggcgccuccagagccugcagaccuacgugacccagcagcugauccgggcggccgagauccgcgccagcgccaaccucgccgcgaccaagauguccgagugcguccugggccagagcaagcggguggacuucugcggcaagggguaccaccugauguccuucccccagagcgccccgcacggcguggucuuccuccacgugacguacguccccgcccaggagaagaacuucaccaccgcccccgcgaucugccacgacgggaaggcccacuucccccgcgagggcguguucguguccaacgggacccacugguucgucacgcagcggaacuucuacgagccgcagaucaucaccaccgacaacaccuucgugagcggcaacugcgacguggucaucggcaucgugaacaacacgguguacgacccccugcagcccgagcuggacuccuucaaggaggagcucgacaaguacuucaagaaccacaccagccccgacgucgaccugggggacaucuccggcaucaacgccagcguggugaacauccagaaggagaucgaccgccugaacgaggucgccaagaaccucaacgagucccugaucgaccugcaggagcucgggaaguacgagcaguacaucaaguggccgugguacaucuggcugggcuucaucgccggccugaucgcgaucgugaucgugaccaucaugcucugcugcaugaccagcugcugcuccugccugaaggggugcugcagcugcggcuccugcugcaaguucgacgaggacgacagcgagcccguccugaagggggugaagcuccacuacacgugaggacuaguguccaccugucccuccugggcugcuggauugucucguuuuccugccaaauaaacaggaucagcgcuuuacagaucucaaaggcucuuuucagagccaccaaaaaaaaaaaaaaaaaaaaaaaaaaaaaaaaaaaaaaaaaaaaaaaaaaaaaaaaaaaaaaaaaaaaaaaaaaaaaaaaaaaaaaaaaaaaaaaaaaaaa

SEQ ID NO: 23969 - RNA, 4120 nt, Artificial Sequence
  SARS-CoV-2/Wuhan/WIV05/2019__EPI_ISL_402128 spike protein mRNA gc (1-1273)(K986P_V987P_K986P_V987P_H69del_V70del_Y144del_N501Y_A570 D_D614G_P681H_T716I_S982A_D1118H)
aggagacccgugacccggaaguuguacggcuacgcgacuuucccucccacaaacccucgcgcccuuccuuuccuacuugggcccggcagaaagcuuaccauguucguguuccugguccuccugccccuggugagcucccagugcgugaaccucaccacccgcacgcagcugccgcccgccuacaccaacagcuucacccggggcgucuacuaccccgacaagguguuccgcuccagcgugcugcacuccacccaggaccucuuccugcccuucuucagcaacgucacgugguuccacgccaucuccgggaccaacggcaccaagcgguucgacaacccggugcugcccuucaacgacggggucuacuucgcgagcaccgagaaguccaacaucauccgcggcuggaucuucgggacgacccucgacagcaagacccagucccugcugaucgugaacaacgccaccaacguggucaucaaggugugcgaguuccaguucugcaacgaccccuuccucggcguguaccacaagaacaacaagagcuggauggaguccgaguuccgggucuacagcuccgccaacaacugcacguucgaguacgugagccagcccuuccugauggaccuggagggcaagcaggggaacuucaagaaccuccgcgaguucguguucaagaacaucgacggcuacuucaagaucuacuccaagcacaccccgaucaaccugguccgggaccugccccagggguucagcgcccucgagccccugguggaccugcccaucggcaucaacaucacccgcuuccagacccuccuggcccugcaccgguccuaccucacgccgggggacagcagcuccggcuggaccgcgggcgccgccgccuacuacgugggguaccugcagccccgcaccuuccugcucaaguacaacgagaacggcaccaucacggacgcggucgacugcgcccuggacccccugagcgagaccaagugcacccucaaguccuucaccguggagaaggggaucuaccagacgagcaacuuccgggugcagcccaccgaguccaucguccgcuucccgaacaucaccaaccugugccccuucggcgagguguucaacgccacccgguucgccagcgucuacgccuggaaccgcaagcggaucuccaacugcguggcggacuacagcgugcuguacaacuccgccagcuucuccacguucaagugcuacggcgucagccccaccaagcucaacgaccugugcuucaccaacguguacgccgacuccuucgugauccgcggggacgagguccggcagaucgcccccggccagaccgggaagaucgccgacuacaacuacaagcugccggacgacuucacgggcugcgugaucgcguggaacagcaacaaccucgacuccaaggucgggggcaacuacaacuaccuguaccgccuguuccgcaagagcaaccucaagcccuucgagcgggacaucuccaccgagaucuaccaggccggcagcacccccugcaacgggguggagggcuucaacugcuacuucccccugcaguccuacggguuccagccgaccuacggcgugggguaccagcccuaccggguggucgugcugagcuucgagcuccugcacgcccccgccacggugugcggccccaagaaguccaccaaccuggucaagaacaagugcgugaacuucaacuucaacggccucaccgggaccggcgugcugaccgagagcaacaagaaguuccugccguuccagcaguucgggcgcgacaucgacgacacgaccgacgcgguccgcgacccccagacccuggagauccucgacaucacccccugcagcuucggcgggguguccgugaucacgccgggcaccaacaccagcaaccaggucgccgugcuguaccagggcgugaacugcaccgagguccccguggccauccacgccgaccagcugacgcccaccuggcggguguacuccaccggcagcaacgucuuccagacccgcgccgggugccucaucggcgcggagcacgugaacaacuccuacgagugcgacauccccaucggggccggcaucugcgccagcuaccagacgcagaccaacucccaccggcgcgcccggagcguggcgucccagagcaucaucgccuacaccaugucccugggcgccgagaacagcgucgccuacuccaacaacagcaucgccauccccaucaacuucacgaucuccgugaccaccgagauccugcccgugagcaugaccaagacgagcgucgacugcaccauguacaucugcggggacuccaccgagugcagcaaccuccugcugcaguacggcuccuucugcacccagcucaaccgcgcgcugacggggaucgccguggagcaggacaagaacacccaggagguguucgcccaggucaagcagaucuacaagacgcccccgaucaaggacuucggcggguucaacuucagccagauccugcccgaccccuccaagcccagcaagcgguccuucaucgaggaccuccuguucaacaaggugacccuggccgacgccggcuucaucaagcaguacggcgacugccucggggacaucgcggcccgcgaccugaucugcgcccagaaguucaacggccugaccgugcucccgccccugcugaccgacgagaugaucgcccaguacaccagcgcccuccuggcggggaccaucacguccggcuggaccuucggggccggcgccgcccugcagauccccuucgcgaugcagauggccuaccgguucaacggcaucggggucacccagaacgugcucuacgagaaccagaagcugaucgccaaccaguucaacagcgccaucggcaagauccaggacucccugagcuccaccgccagcgcgcucgggaagcugcaggacguggucaaccagaacgcccaggcccugaacacgcucgugaagcagcuguccagcaacuucggcgccaucuccagcgugcugaacgacauccucgcccgccuggacccgcccgaggccgaggugcagaucgaccggcugaucaccgggcgccuccagagccugcagaccuacgugacccagcagcugauccgggcggccgagauccgcgccagcgccaaccucgccgcgaccaagauguccgagugcguccugggccagagcaagcggguggacuucugcggcaagggguaccaccugauguccuucccccagagcgccccgcacggcguggucuuccuccacgugacguacguccccgcccaggagaagaacuucaccaccgcccccgcgaucugccacgacgggaaggcccacuucccccgcgagggcguguucguguccaacgggacccacugguucgucacgcagcggaacuucuacgagccgcagaucaucaccacccacaacaccuucgugagcggcaacugcgacguggucaucggcaucgugaacaacacgguguacgacccccugcagcccgagcuggacuccuucaaggaggagcucgacaaguacuucaagaaccacaccagccccgacgucgaccugggggacaucuccggcaucaacgccagcguggugaacauccagaaggagaucgaccgccugaacgaggucgccaagaaccucaacgagucccugaucgaccugcaggagcucgggaaguacgagcaguacaucaaguggccgugguacaucuggcugggcuucaucgccggccugaucgcgaucgugauggugaccaucaugcucugcugcaugaccagcugcugcuccugccugaaggggugcugcagcugcggcuccugcugcaaguucgacgaggacgacagcgagcccguccugaagggggugaagcuccacuacacgugaggacuaguguccaccugucccuccugggcugcuggauugucucguuuuccugccaaauaaacaggaucagcgcuuuacagaucucaaaggcucuuuucagagccaccaaaaaaaaaaaaaaaaaaaaaaaaaaaaaaaaaaaaaaaaaaaaaaaaaaaaaaaaaaaaaaaaaaaaaaaaaaaaaaaaaaaaaaaaaaaaaaaaaaaaa

SEQ ID NO: 23970 - RNA, 4129 nt, Artificial Sequence
  SARS-CoV-2/Wuhan/WIV05/2019__EPI_ISL_402128 spike protein mRNA gc (1-1273)(K986P_V987P_K986P_V987P_K417N_E484K_N501Y_D614G)
aggagacccgugacccggaaguuguacggcuacgcgacuuucccucccacaaacccucgcgcccuuccuuuccuacuugggcccggcagaaagcuuaccauguucguguuccugguccuccugccccuggugagcucccagugcgugaaccucaccacccgcacgcagcugccgcccgccuacaccaacagcuucacccggggcgucuacuaccccgacaagguguuccgcuccagcgugcugcacuccacccaggaccucuuccugcccuucuucagcaacgucacgugguuccacgccauccacguguccgggaccaacggcaccaagcgguucgacaacccggugcugcccuucaacgacggggucuacuucgcgagcaccgagaaguccaacaucauccgcggcuggaucuucgggacgacccucgacagcaagacccagucccugcugaucgugaacaacgccaccaacguggucaucaaggugugcgaguuccaguucugcaacgaccccuuccucggcguguacuaccacaagaacaacaagagcuggauggaguccgaguuccgggucuacagcuccgccaacaacugcacguucgaguacgugagccagcccuuccugauggaccuggagggcaagcaggggaacuucaagaaccuccgcgaguucguguucaagaacaucgacggcuacuucaagaucuacuccaagcacaccccgaucaaccugguccgggaccugccccagggguucagcgcccucgagccccugguggaccugcccaucggcaucaacaucacccgcuuccagacccuccuggcccugcaccgguccuaccucacgccgggggacagcagcuccggcuggaccgcgggcgccgccgccuacuacgugggguaccugcagccccgcaccuuccugcucaaguacaacgagaacggcaccaucacggacgcggucgacugcgcccuggacccccugagcgagaccaagugcacccucaaguccuucaccguggagaaggggaucuaccagacgagcaacuuccgggugcagcccaccgaguccaucguccgcuucccgaacaucaccaaccugugccccuucggcgagguguucaacgccacccgguucgccagcgucuacgccuggaaccgcaagcggaucuccaacugcguggcggacuacagcgugcuguacaacuccgccagcuucuccacguucaagugcuacggcgucagccccaccaagcucaacgaccugugcuucaccaacguguacgccgacuccuucgugauccgcggggacgagguccggcagaucgcccccggccagaccgggaacaucgccgacuacaacuacaagcugccggacgacuucacgggcugcgugaucgcguggaacagcaacaaccucgacuccaaggucgggggcaacuacaacuaccuguaccgccuguuccgcaagagcaaccucaagcccuucgagcgggacaucuccaccgagaucuaccaggccggcagcacccccugcaacggggugaagggcuucaacugcuacuucccccugcaguccuacggguuccagccgaccuacggcgugggguaccagcccuaccggguggucgugcugagcuucgagcuccugcacgcccccgccacggugugcggccccaagaaguccaccaaccuggucaagaacaagugcgugaacuucaacuucaacggccucaccgggaccggcgugcugaccgagagcaacaagaaguuccugccguuccagcaguucgggcgcgacaucgccgacacgaccgacgcgguccgcgacccccagacccuggagauccucgacaucacccccugcagcuucggcgggguguccgugaucacgccgggcaccaacaccagcaaccaggucgccgugcuguaccagggcgugaacugcaccgagguccccguggccauccacgccgaccagcugacgcccaccuggcggguguacuccaccggcagcaacgucuuccagacccgcgccgggugccucaucggcgcggagcacgugaacaacuccuacgagugcgacauccccaucggggccggcaucugcgccagcuaccagacgcagaccaacuccccgcggcgcgcccggagcguggcgucccagagcaucaucgccuacaccaugucccugggcgccgagaacagcgucgccuacuccaacaacagcaucgccauccccaccaacuucacgaucuccgugaccaccgagauccugcccgugagcaugaccaagacgagcgucgacugcaccauguacaucugcggggacuccaccgagugcagcaaccuccugcugcaguacggcuccuucugcacccagcucaaccgcgcgcugacggggaucgccguggagcaggacaagaacacccaggagguguucgcccaggucaagcagaucuacaagacgcccccgaucaaggacuucggcggguucaacuucagccagauccugcccgaccccuccaagcccagcaagcgguccuucaucgaggaccuccuguucaacaaggugacccuggccgacgccggcuucaucaagcaguacggcgacugccucggggacaucgcggcccgcgaccugaucugcgcccagaaguucaacggccugaccgugcucccgccccugcugaccgacgagaugaucgcccaguacaccagcgcccuccuggcggggaccaucacguccggcuggaccuucggggccggcgccgcccugcagauccccuucgcgaugcagauggccuaccgguucaacggcaucggggucacccagaacgugcucuacgagaaccagaagcugaucgccaaccaguucaacagcgccaucggcaagauccaggacucccugagcuccaccgccagcgcgcucgggaagcugcaggacguggucaaccagaacgcccaggcccugaacacgcucgugaagcagcuguccagcaacuucggcgccaucuccagcgugcugaacgacauccucucccgccuggacccgcccgaggccgaggugcagaucgaccggcugaucaccgggcgccuccagagccugcagaccuacgugacccagcagcugauccgggcggccgagauccgcgccagcgccaaccucgccgcgaccaagauguccgagugcguccugggccagagcaagcggguggacuucugcggcaagggguaccaccugauguccuucccccagagcgccccgcacggcguggucuuccuccacgugacguacguccccgcccaggagaagaacuucaccaccgcccccgcgaucugccacgacgggaaggcccacuucccccgcgagggcguguucguguccaacgggacccacugguucgucacgcagcggaacuucuacgagccgcagaucaucaccaccgacaacaccuucgugagcggcaacugcgacguggucaucggcaucgugaacaacacgguguacgacccccugcagcccgagcuggacuccuucaaggaggagcucgacaaguacuucaagaaccacaccagccccgacgucgaccugggggacaucuccggcaucaacgccagcguggugaacauccagaaggagaucgaccgccugaacgaggucgccaagaaccucaacgagucccugaucgaccugcaggagcucgggaaguacgagcaguacaucaaguggccgugguacaucuggcugggcuucaucgccggccugaucgcgaucgugauggugaccaucaugcucugcugcaugaccagcugcugcuccugccugaaggggugcugcagcugcggcuccugcugcaaguucgacgaggacgacagcgagcccguccugaagggggugaagcuccacuacacgugaggacuaguguccaccugucccuccugggcugcuggauugucucguuuuccugccaaauaaacaggaucagcgcuuuacagaucucaaaggcucuuuucagagccaccaaaaaaaaaaaaaaaaaaaaaaaaaaaaaaaaaaaaaaaaaaaaaaaaaaaaaaaaaaaaaaaaaaaaaaaaaaaaaaaaaaaaaaaaaaaaaaaaaaaaa

SEQ ID NO: 23971 - RNA, 4120 nt, Artificial Sequence
  SARS-CoV-2/Wuhan/WIV05/2019__EPI_ISL_402128 spike protein mRNA gc (1-1273)(K986P_V987P_K986P_V987P_L18F_D80A_D215G_L242del_A243del_ L244del_R246I_K417N_E484K_N501Y_D614G_A701V)
aggagacccgugacccggaaguuguacggcuacgcgacuuucccucccacaaacccucgcgcccuuccuuuccuacuugggcccggcagaaagcuuaccauguucguguuccugguccuccugccccuggugagcucccagugcgugaacuucaccacccgcacgcagcugccgcccgccuacaccaacagcuucacccggggcgucuacuaccccgacaagguguuccgcuccagcgugcugcacuccacccaggaccucuuccugcccuucuucagcaacgucacgugguuccacgccauccacguguccgggaccaacggcaccaagcgguucgccaacccggugcugcccuucaacgacggggucuacuucgcgagcaccgagaaguccaacaucauccgcggcuggaucuucgggacgacccucgacagcaagacccagucccugcugaucgugaacaacgccaccaacguggucaucaaggugugcgaguuccaguucugcaacgaccccuuccucggcguguacuaccacaagaacaacaagagcuggauggaguccgaguuccgggucuacagcuccgccaacaacugcacguucgaguacgugagccagcccuuccugauggaccuggagggcaagcaggggaacuucaagaaccuccgcgaguucguguucaagaacaucgacggcuacuucaagaucuacuccaagcacaccccgaucaaccugguccggggccugccccagggguucagcgcccucgagccccugguggaccugcccaucggcaucaacaucacccgcuuccagacccuccacaucuccuaccucacgccgggggacagcagcuccggcuggaccgcgggcgccgccgccuacuacgugggguaccugcagccccgcaccuuccugcucaaguacaacgagaacggcaccaucacggacgcggucgacugcgcccuggacccccugagcgagaccaagugcacccucaaguccuucaccguggagaaggggaucuaccagacgagcaacuuccgggugcagcccaccgaguccaucguccgcuucccgaacaucaccaaccugugccccuucggcgagguguucaacgccacccgguucgccagcgucuacgccuggaaccgcaagcggaucuccaacugcguggcggacuacagcgugcuguacaacuccgccagcuucuccacguucaagugcuacggcgucagccccaccaagcucaacgaccugugcuucaccaacguguacgccgacuccuucgugauccgcggggacgagguccggcagaucgcccccggccagaccgggaacaucgccgacuacaacuacaagcugccggacgacuucacgggcugcgugaucgcguggaacagcaacaaccucgacuccaaggucgggggcaacuacaacuaccuguaccgccuguuccgcaagagcaaccucaagcccuucgagcgggacaucuccaccgagaucuaccaggccggcagcacccccugcaacggggugaagggcuucaacugcuacuucccccugcaguccuacggguuccagccgaccuacggcgugggguaccagcccuaccggguggucgugcugagcuucgagcuccugcacgcccccgccacggugugcggccccaagaaguccaccaaccuggucaagaacaagugcgugaacuucaacuucaacggccucaccgggaccggcgugcugaccgagagcaacaagaaguuccugccguuccagcaguucgggcgcgacaucgccgacacgaccgacgcgguccgcgacccccagacccuggagauccucgacaucacccccugcagcuucggcgggguguccgugaucacgccgggcaccaacaccagcaaccaggucgccgugcuguaccagggcgugaacugcaccgagguccccguggccauccacgccgaccagcugacgcccaccuggcggguguacuccaccggcagcaacgucuuccagacccgcgccgggugccucaucggcgcggagcacgugaacaacuccuacgagugcgacauccccaucggggccggcaucugcgccagcuaccagacgcagaccaacuccccgcggcgcgcccggagcguggcgucccagagcaucaucgccuacaccaugucccugggcguggagaacagcgucgccuacuccaacaacagcaucgccauccccaccaacuucacgaucuccgugaccaccgagauccugcccgugagcaugaccaagacgagcgucgacugcaccauguacaucugcggggacuccaccgagugcagcaaccuccugcugcaguacggcuccuucugcacccagcucaaccgcgcgcugacggggaucgccguggagcaggacaagaacacccaggagguguucgcccaggucaagcagaucuacaagacgcccccgaucaaggacuucggcggguucaacuucagccagauccugcccgaccccuccaagcccagcaagcgguccuucaucgaggaccuccuguucaacaaggugacccuggccgacgccggcuucaucaagcaguacggcgacugccucggggacaucgcggcccgcgaccugaucugcgcccagaaguucaacggccugaccgugcucccgccccugcugaccgacgagaugaucgcccaguacaccagcgcccuccuggcggggaccaucacguccggcuggaccuucggggccggcgccgcccugcagauccccuucgcgaugcagauggccuaccgguucaacggcaucggggucacccagaacgugcucuacgagaaccagaagcugaucgccaaccaguucaacagcgccaucggcaagauccaggacucccugagcuccaccgccagcgcgcucgggaagcugcaggacguggucaaccagaacgcccaggcccugaacacgcucgugaagcagcuguccagcaacuucggcgccaucuccagcgugcugaacgacauccucucccgccuggacccgcccgaggccgaggugcagaucgaccggcugaucaccgggcgccuccagagccugcagaccuacgugacccagcagcugauccgggcggccgagauccgcgccagcgccaaccucgccgcgaccaagauguccgagugcguccugggccagagcaagcggguggacuucugcggcaagggguaccaccugauguccuucccccagagcgccccgcacggcguggucuuccuccacgugacguacguccccgcccaggagaagaacuucaccaccgcccccgcgaucugccacgacgggaaggcccacuucccccgcgagggcguguucguguccaacgggacccacugguucgucacgcagcggaacuucuacgagccgcagaucaucaccaccgacaacaccuucgugagcggcaacugcgacguggucaucggcaucgugaacaacacgguguacgacccccugcagcccgagcuggacuccuucaaggaggagcucgacaaguacuucaagaaccacaccagccccgacgucgaccugggggacaucuccggcaucaacgccagcguggugaacauccagaaggagaucgaccgccugaacgaggucgccaagaaccucaacgagucccugaucgaccugcaggagcucgggaaguacgagcaguacaucaaguggccgugguacaucuggcugggcuucaucgccggccugaucgcgaucgugauggugaccaucaugcucugcugcaugaccagcugcugcuccugccugaaggggugcugcagcugcggcuccugcugcaaguucgacgaggacgacagcgagcccguccugaagggggugaagcuccacuacacgugaggacuaguguccaccugucccuccugggcugcuggauugucucguuuuccugccaaauaaacaggaucagcgcuuuacagaucucaaaggcucuuuucagagccaccaaaaaaaaaaaaaaaaaaaaaaaaaaaaaaaaaaaaaaaaaaaaaaaaaaaaaaaaaaaaaaaaaaaaaaaaaaaaaaaaaaaaaaaaaaaaaaaaaaaaa

SEQ ID NO: 23972 - RNA, 4129 nt, Artificial Sequence
  SARS-CoV-2/Wuhan/WIV05/2019__EPI_ISL_402128 spike protein mRNA gc (1-1273)(K986P_V987P_K986P_V987P_E484K_D614G)
aggagacccgugacccggaaguuguacggcuacgcgacuuucccucccacaaacccucgcgcccuuccuuuccuacuugggcccggcagaaagcuuaccauguucguguuccugguccuccugccccuggugagcucccagugcgugaaccucaccacccgcacgcagcugccgcccgccuacaccaacagcuucacccggggcgucuacuaccccgacaagguguuccgcuccagcgugcugcacuccacccaggaccucuuccugcccuucuucagcaacgucacgugguuccacgccauccacguguccgggaccaacggcaccaagcgguucgacaacccggugcugcccuucaacgacggggucuacuucgcgagcaccgagaaguccaacaucauccgcggcuggaucuucgggacgacccucgacagcaagacccagucccugcugaucgugaacaacgccaccaacguggucaucaaggugugcgaguuccaguucugcaacgaccccuuccucggcguguacuaccacaagaacaacaagagcuggauggaguccgaguuccgggucuacagcuccgccaacaacugcacguucgaguacgugagccagcccuuccugauggaccuggagggcaagcaggggaacuucaagaaccuccgcgaguucguguucaagaacaucgacggcuacuucaagaucuacuccaagcacaccccgaucaaccugguccgggaccugccccagggguucagcgcccucgagccccugguggaccugcccaucggcaucaacaucacccgcuuccagacccuccuggcccugcaccgguccuaccucacgccgggggacagcagcuccggcuggaccgcgggcgccgccgccuacuacgugggguaccugcagccccgcaccuuccugcucaaguacaacgagaacggcaccaucacggacgcggucgacugcgcccuggacccccugagcgagaccaagugcacccucaaguccuucaccguggagaaggggaucuaccagacgagcaacuuccgggugcagcccaccgaguccaucguccgcuucccgaacaucaccaaccugugccccuucggcgagguguucaacgccacccgguucgccagcgucuacgccuggaaccgcaagcggaucuccaacugcguggcggacuacagcgugcuguacaacuccgccagcuucuccacguucaagugcuacggcgucagccccaccaagcucaacgaccugugcuucaccaacguguacgccgacuccuucgugauccgcggggacgagguccggcagaucgcccccggccagaccgggaagaucgccgacuacaacuacaagcugccggacgacuucacgggcugcgugaucgcguggaacagcaacaaccucgacuccaaggucgggggcaacuacaacuaccuguaccgccuguuccgcaagagcaaccucaagcccuucgagcgggacaucuccaccgagaucuaccaggccggcagcacccccugcaacggggugaagggcuucaacugcuacuucccccugcaguccuacggguuccagccgaccaacggcgugggguaccagcccuaccggguggucgugcugagcuucgagcuccugcacgcccccgccacggugugcggccccaagaaguccaccaaccuggucaagaacaagugcgugaacuucaacuucaacggccucaccgggaccggcgugcugaccgagagcaacaagaaguuccugccguuccagcaguucgggcgcgacaucgccgacacgaccgacgcgguccgcgacccccagacccuggagauccucgacaucacccccugcagcuucggcgggguguccgugaucacgccgggcaccaacaccagcaaccaggucgccgugcuguaccagggcgugaacugcaccgagguccccguggccauccacgccgaccagcugacgcccaccuggcggguguacuccaccggcagcaacgucuuccagacccgcgccgggugccucaucggcgcggagcacgugaacaacuccuacgagugcgacauccccaucggggccggcaucugcgccagcuaccagacgcagaccaacuccccgcggcgcgcccggagcguggcgucccagagcaucaucgccuacaccaugucccugggcgccgagaacagcgucgccuacuccaacaacagcaucgccauccccaccaacuucacgaucuccgugaccaccgagauccugcccgugagcaugaccaagacgagcgucgacugcaccauguacaucugcggggacuccaccgagugcagcaaccuccugcugcaguacggcuccuucugcacccagcucaaccgcgcgcugacggggaucgccguggagcaggacaagaacacccaggagguguucgcccaggucaagcagaucuacaagacgcccccgaucaaggacuucggcggguucaacuucagccagauccugcccgaccccuccaagcccagcaagcgguccuucaucgaggaccuccuguucaacaaggugacccuggccgacgccggcuucaucaagcaguacggcgacugccucggggacaucgcggcccgcgaccugaucugcgcccagaaguucaacggccugaccgugcucccgccccugcugaccgacgagaugaucgcccaguacaccagcgcccuccuggcggggaccaucacguccggcuggaccuucggggccggcgccgcccugcagauccccuucgcgaugcagauggccuaccgguucaacggcaucggggucacccagaacgugcucuacgagaaccagaagcugaucgccaaccaguucaacagcgccaucggcaagauccaggacucccugagcuccaccgccagcgcgcucgggaagcugcaggacguggucaaccagaacgcccaggcccugaacacgcucgugaagcagcuguccagcaacuucggcgccaucuccagcgugcugaacgacauccucucccgccuggacccgcccgaggccgaggugcagaucgaccggcugaucaccgggcgccuccagagccugcagaccuacgugacccagcagcugauccgggcggccgagauccgcgccagcgccaaccucgccgcgaccaagauguccgagugcguccugggccagagcaagcggguggacuucugcggcaagggguaccaccugauguccuucccccagagcgccccgcacggcguggucuuccuccacgugacguacguccccgcccaggagaagaacuucaccaccgcccccgcgaucugccacgacgggaaggcccacuucccccgcgagggcguguucguguccaacgggacccacugguucgucacgcagcggaacuucuacgagccgcagaucaucaccaccgacaacaccuucgugagcggcaacugcgacguggucaucggcaucgugaacaacacgguguacgacccccugcagcccgagcuggacuccuucaaggaggagcucgacaaguacuucaagaaccacaccagccccgacgucgaccugggggacaucuccggcaucaacgccagcguggugaacauccagaaggagaucgaccgccugaacgaggucgccaagaaccucaacgagucccugaucgaccugcaggagcucgggaaguacgagcaguacaucaaguggccgugguacaucuggcugggcuucaucgccggccugaucgcgaucgugauggugaccaucaugcucugcugcaugaccagcugcugcuccugccugaaggggugcugcagcugcggcuccugcugcaaguucgacgaggacgacagcgagcccguccugaagggggugaagcuccacuacacgugaggacuaguguccaccugucccuccugggcugcuggauugucucguuuuccugccaaauaaacaggaucagcgcuuuacagaucucaaaggcucuuuucagagccaccaaaaaaaaaaaaaaaaaaaaaaaaaaaaaaaaaaaaaaaaaaaaaaaaaaaaaaaaaaaaaaaaaaaaaaaaaaaaaaaaaaaaaaaaaaaaaaaaaaaaa

SEQ ID NO: 23973 - RNA, 4129 nt, Artificial Sequence
  SARS-CoV-2/Wuhan/WIV05/2019__EPI_ISL_402128 spike protein mRNA gc (1-1273)(K986P_V987P_K986P_V987P_L18F_T20N_P26S_D138Y_R190S_K417T _E484K_N501Y_D614G_H655Y_T1027I)
aggagacccgugacccggaaguuguacggcuacgcgacuuucccucccacaaacccucgcgcccuuccuuuccuacuugggcccggcagaaagcuuaccauguucguguuccugguccuccugccccuggugagcucccagugcgugaacuucaccaaccgcacgcagcugccgagcgccuacaccaacagcuucacccggggcgucuacuaccccgacaagguguuccgcuccagcgugcugcacuccacccaggaccucuuccugcccuucuucagcaacgucacgugguuccacgccauccacguguccgggaccaacggcaccaagcgguucgacaacccggugcugcccuucaacgacggggucuacuucgcgagcaccgagaaguccaacaucauccgcggcuggaucuucgggacgacccucgacagcaagacccagucccugcugaucgugaacaacgccaccaacguggucaucaaggugugcgaguuccaguucugcaacuaccccuuccucggcguguacuaccacaagaacaacaagagcuggauggaguccgaguuccgggucuacagcuccgccaacaacugcacguucgaguacgugagccagcccuuccugauggaccuggagggcaagcaggggaacuucaagaaccucagcgaguucguguucaagaacaucgacggcuacuucaagaucuacuccaagcacaccccgaucaaccugguccgggaccugccccagggguucagcgcccucgagccccugguggaccugcccaucggcaucaacaucacccgcuuccagacccuccuggcccugcaccgguccuaccucacgccgggggacagcagcuccggcuggaccgcgggcgccgccgccuacuacgugggguaccugcagccccgcaccuuccugcucaaguacaacgagaacggcaccaucacggacgcggucgacugcgcccuggacccccugagcgagaccaagugcacccucaaguccuucaccguggagaaggggaucuaccagacgagcaacuuccgggugcagcccaccgaguccaucguccgcuucccgaacaucaccaaccugugccccuucggcgagguguucaacgccacccgguucgccagcgucuacgccuggaaccgcaagcggaucuccaacugcguggcggacuacagcgugcuguacaacuccgccagcuucuccacguucaagugcuacggcgucagccccaccaagcucaacgaccugugcuucaccaacguguacgccgacuccuucgugauccgcggggacgagguccggcagaucgcccccggccagaccgggaccaucgccgacuacaacuacaagcugccggacgacuucacgggcugcgugaucgcguggaacagcaacaaccucgacuccaaggucgggggcaacuacaacuaccuguaccgccuguuccgcaagagcaaccucaagcccuucgagcgggacaucuccaccgagaucuaccaggccggcagcacccccugcaacggggugaagggcuucaacugcuacuucccccugcaguccuacggguuccagccgaccuacggcgugggguaccagcccuaccggguggucgugcugagcuucgagcuccugcacgcccccgccacggugugcggccccaagaaguccaccaaccuggucaagaacaagugcgugaacuucaacuucaacggccucaccgggaccggcgugcugaccgagagcaacaagaaguuccugccguuccagcaguucgggcgcgacaucgccgacacgaccgacgcgguccgcgacccccagacccuggagauccucgacaucacccccugcagcuucggcgggguguccgugaucacgccgggcaccaacaccagcaaccaggucgccgugcuguaccagggcgugaacugcaccgagguccccguggccauccacgccgaccagcugacgcccaccuggcggguguacuccaccggcagcaacgucuuccagacccgcgccgggugccucaucggcgcggaguacgugaacaacuccuacgagugcgacauccccaucggggccggcaucugcgccagcuaccagacgcagaccaacuccccgcggcgcgcccggagcguggcgucccagagcaucaucgccuacaccaugucccugggcgccgagaacagcgucgccuacuccaacaacagcaucgccauccccaccaacuucacgaucuccgugaccaccgagauccugcccgugagcaugaccaagacgagcgucgacugcaccauguacaucugcggggacuccaccgagugcagcaaccuccugcugcaguacggcuccuucugcacccagcucaaccgcgcgcugacggggaucgccguggagcaggacaagaacacccaggagguguucgcccaggucaagcagaucuacaagacgcccccgaucaaggacuucggcggguucaacuucagccagauccugcccgaccccuccaagcccagcaagcgguccuucaucgaggaccuccuguucaacaaggugacccuggccgacgccggcuucaucaagcaguacggcgacugccucggggacaucgcggcccgcgaccugaucugcgcccagaaguucaacggccugaccgugcucccgccccugcugaccgacgagaugaucgcccaguacaccagcgcccuccuggcggggaccaucacguccggcuggaccuucggggccggcgccgcccugcagauccccuucgcgaugcagauggccuaccgguucaacggcaucggggucacccagaacgugcucuacgagaaccagaagcugaucgccaaccaguucaacagcgccaucggcaagauccaggacucccugagcuccaccgccagcgcgcucgggaagcugcaggacguggucaaccagaacgcccaggcccugaacacgcucgugaagcagcuguccagcaacuucggcgccaucuccagcgugcugaacgacauccucucccgccuggacccgcccgaggccgaggugcagaucgaccggcugaucaccgggcgccuccagagccugcagaccuacgugacccagcagcugauccgggcggccgagauccgcgccagcgccaaccucgccgcgaucaagauguccgagugcguccugggccagagcaagcggguggacuucugcggcaagggguaccaccugauguccuucccccagagcgccccgcacggcguggucuuccuccacgugacguacguccccgcccaggagaagaacuucaccaccgcccccgcgaucugccacgacgggaaggcccacuucccccgcgagggcguguucguguccaacgggacccacugguucgucacgcagcggaacuucuacgagccgcagaucaucaccaccgacaacaccuucgugagcggcaacugcgacguggucaucggcaucgugaacaacacgguguacgacccccugcagcccgagcuggacuccuucaaggaggagcucgacaaguacuucaagaaccacaccagccccgacgucgaccugggggacaucuccggcaucaacgccagcguggugaacauccagaaggagaucgaccgccugaacgaggucgccaagaaccucaacgagucccugaucgaccugcaggagcucgggaaguacgagcaguacaucaaguggccgugguacaucuggcugggcuucaucgccggccugaucgcgaucgugauggugaccaucaugcucugcugcaugaccagcugcugcuccugccugaaggggugcugcagcugcggcuccugcugcaaguucgacgaggacgacagcgagcccguccugaagggggugaagcuccacuacacgugaggacuaguguccaccugucccuccugggcugcuggauugucucguuuuccugccaaauaaacaggaucagcgcuuuacagaucucaaaggcucuuuucagagccaccaaaaaaaaaaaaaaaaaaaaaaaaaaaaaaaaaaaaaaaaaaaaaaaaaaaaaaaaaaaaaaaaaaaaaaaaaaaaaaaaaaaaaaaaaaaaaaaaaaaaa

SEQ ID NO: 23974 - RNA, 4129 nt, Artificial Sequence
  SARS-CoV-2/Wuhan/WIV05/2019__EPI_ISL_402128 spike protein mRNA gc (1-1273)(K986P_V987P_K986P_V987P_S13I_W152C_L452R_D614G)
aggagacccgugacccggaaguuguacggcuacgcgacuuucccucccacaaacccucgcgcccuuccuuuccuacuugggcccggcagaaagcuuaccauguucguguuccugguccuccugccccuggugagcauccagugcgugaaccucaccacccgcacgcagcugccgcccgccuacaccaacagcuucacccggggcgucuacuaccccgacaagguguuccgcuccagcgugcugcacuccacccaggaccucuuccugcccuucuucagcaacgucacgugguuccacgccauccacguguccgggaccaacggcaccaagcgguucgacaacccggugcugcccuucaacgacggggucuacuucgcgagcaccgagaaguccaacaucauccgcggcuggaucuucgggacgacccucgacagcaagacccagucccugcugaucgugaacaacgccaccaacguggucaucaaggugugcgaguuccaguucugcaacgaccccuuccucggcguguacuaccacaagaacaacaagagcugcauggaguccgaguuccgggucuacagcuccgccaacaacugcacguucgaguacgugagccagcccuuccugauggaccuggagggcaagcaggggaacuucaagaaccuccgcgaguucguguucaagaacaucgacggcuacuucaagaucuacuccaagcacaccccgaucaaccugguccgggaccugccccagggguucagcgcccucgagccccugguggaccugcccaucggcaucaacaucacccgcuuccagacccuccuggcccugcaccgguccuaccucacgccgggggacagcagcuccggcuggaccgcgggcgccgccgccuacuacgugggguaccugcagccccgcaccuuccugcucaaguacaacgagaacggcaccaucacggacgcggucgacugcgcccuggacccccugagcgagaccaagugcacccucaaguccuucaccguggagaaggggaucuaccagacgagcaacuuccgggugcagcccaccgaguccaucguccgcuucccgaacaucaccaaccugugccccuucggcgagguguucaacgccacccgguucgccagcgucuacgccuggaaccgcaagcggaucuccaacugcguggcggacuacagcgugcuguacaacuccgccagcuucuccacguucaagugcuacggcgucagccccaccaagcucaacgaccugugcuucaccaacguguacgccgacuccuucgugauccgcggggacgagguccggcagaucgcccccggccagaccgggaagaucgccgacuacaacuacaagcugccggacgacuucacgggcugcgugaucgcguggaacagcaacaaccucgacuccaaggucgggggcaacuacaacuaccgcuaccgccuguuccgcaagagcaaccucaagcccuucgagcgggacaucuccaccgagaucuaccaggccggcagcacccccugcaacgggguggagggcuucaacugcuacuucccccugcaguccuacggguuccagccgaccaacggcgugggguaccagcccuaccggguggucgugcugagcuucgagcuccugcacgcccccgccacggugugcggccccaagaaguccaccaaccuggucaagaacaagugcgugaacuucaacuucaacggccucaccgggaccggcgugcugaccgagagcaacaagaaguuccugccguuccagcaguucgggcgcgacaucgccgacacgaccgacgcgguccgcgacccccagacccuggagauccucgacaucacccccugcagcuucggcgggguguccgugaucacgccgggcaccaacaccagcaaccaggucgccgugcuguaccagggcgugaacugcaccgagguccccguggccauccacgccgaccagcugacgcccaccuggcggguguacuccaccggcagcaacgucuuccagacccgcgccgggugccucaucggcgcggagcacgugaacaacuccuacgagugcgacauccccaucggggccggcaucugcgccagcuaccagacgcagaccaacuccccgcggcgcgcccggagcguggcgucccagagcaucaucgccuacaccaugucccugggcgccgagaacagcgucgccuacuccaacaacagcaucgccauccccaccaacuucacgaucuccgugaccaccgagauccugcccgugagcaugaccaagacgagcgucgacugcaccauguacaucugcggggacuccaccgagugcagcaaccuccugcugcaguacggcuccuucugcacccagcucaaccgcgcgcugacggggaucgccguggagcaggacaagaacacccaggagguguucgcccaggucaagcagaucuacaagacgcccccgaucaaggacuucggcggguucaacuucagccagauccugcccgaccccuccaagcccagcaagcgguccuucaucgaggaccuccuguucaacaaggugacccuggccgacgccggcuucaucaagcaguacggcgacugccucggggacaucgcggcccgcgaccugaucugcgcccagaaguucaacggccugaccgugcucccgccccugcugaccgacgagaugaucgcccaguacaccagcgcccuccuggcggggaccaucacguccggcuggaccuucggggccggcgccgcccugcagauccccuucgcgaugcagauggccuaccgguucaacggcaucggggucacccagaacgugcucuacgagaaccagaagcugaucgccaaccaguucaacagcgccaucggcaagauccaggacucccugagcuccaccgccagcgcgcucgggaagcugcaggacguggucaaccagaacgcccaggcccugaacacgcucgugaagcagcuguccagcaacuucggcgccaucuccagcgugcugaacgacauccucucccgccuggacccgcccgaggccgaggugcagaucgaccggcugaucaccgggcgccuccagagccugcagaccuacgugacccagcagcugauccgggcggccgagauccgcgccagcgccaaccucgccgcgaccaagauguccgagugcguccugggccagagcaagcggguggacuucugcggcaagggguaccaccugauguccuucccccagagcgccccgcacggcguggucuuccuccacgugacguacguccccgcccaggagaagaacuucaccaccgcccccgcgaucugccacgacgggaaggcccacuucccccgcgagggcguguucguguccaacgggacccacugguucgucacgcagcggaacuucuacgagccgcagaucaucaccaccgacaacaccuucgugagcggcaacugcgacguggucaucggcaucgugaacaacacgguguacgacccccugcagcccgagcuggacuccuucaaggaggagcucgacaaguacuucaagaaccacaccagccccgacgucgaccugggggacaucuccggcaucaacgccagcguggugaacauccagaaggagaucgaccgccugaacgaggucgccaagaaccucaacgagucccugaucgaccugcaggagcucgggaaguacgagcaguacaucaaguggccgugguacaucuggcugggcuucaucgccggccugaucgcgaucgugauggugaccaucaugcucugcugcaugaccagcugcugcuccugccugaaggggugcugcagcugcggcuccugcugcaaguucgacgaggacgacagcgagcccguccugaagggggugaagcuccacuacacgugaggacuaguguccaccugucccuccugggcugcuggauugucucguuuuccugccaaauaaacaggaucagcgcuuuacagaucucaaaggcucuuuucagagccaccaaaaaaaaaaaaaaaaaaaaaaaaaaaaaaaaaaaaaaaaaaaaaaaaaaaaaaaaaaaaaaaaaaaaaaaaaaaaaaaaaaaaaaaaaaaaaaaaaaaaa

SEQ ID NO: 23975 - RNA, 4129 nt, Artificial Sequence
  SARS-CoV-2/Wuhan/WIV05/2019__EPI_ISL_402128 spike protein mRNA gc (1-1273)(K986P_V987P)
aggagacccgugacccggaaguuguacggcuacgcgacuuucccucccacaaacccucgcgcccuuccuuuccuacuugggcccggcagaaagcuuaccauguucguguuccugguccuccugccccuggugagcucccagugcgugaaccucaccacccgcacgcagcugccgcccgccuacaccaacagcuucacccggggcgucuacuaccccgacaagguguuccgcuccagcgugcugcacuccacccaggaccucuuccugcccuucuucagcaacgucacgugguuccacgccauccacguguccgggaccaacggcaccaagcgguucgacaacccggugcugcccuucaacgacggggucuacuucgcgagcaccgagaaguccaacaucauccgcggcuggaucuucgggacgacccucgacagcaagacccagucccugcugaucgugaacaacgccaccaacguggucaucaaggugugcgaguuccaguucugcaacgaccccuuccucggcguguacuaccacaagaacaacaagagcuggauggaguccgaguuccgggucuacagcuccgccaacaacugcacguucgaguacgugagccagcccuuccugauggaccuggagggcaagcaggggaacuucaagaaccuccgcgaguucguguucaagaacaucgacggcuacuucaagaucuacuccaagcacaccccgaucaaccugguccgggaccugccccagggguucagcgcccucgagccccugguggaccugcccaucggcaucaacaucacccgcuuccagacccuccuggcccugcaccgguccuaccucacgccgggggacagcagcuccggcuggaccgcgggcgccgccgccuacuacgugggguaccugcagccccgcaccuuccugcucaaguacaacgagaacggcaccaucacggacgcggucgacugcgcccuggacccccugagcgagaccaagugcacccucaaguccuucaccguggagaaggggaucuaccagacgagcaacuuccgggugcagcccaccgaguccaucguccgcuucccgaacaucaccaaccugugccccuucggcgagguguucaacgccacccgguucgccagcgucuacgccuggaaccgcaagcggaucuccaacugcguggcggacuacagcgugcuguacaacuccgccagcuucuccacguucaagugcuacggcgucagccccaccaagcucaacgaccugugcuucaccaacguguacgccgacuccuucgugauccgcggggacgagguccggcagaucgcccccggccagaccgggaagaucgccgacuacaacuacaagcugccggacgacuucacgggcugcgugaucgcguggaacagcaacaaccucgacuccaaggucgggggcaacuacaacuaccuguaccgccuguuccgcaagagcaaccucaagcccuucgagcgggacaucuccaccgagaucuaccaggccggcagcacccccugcaacgggguggagggcuucaacugcuacuucccccugcaguccuacggguuccagccgaccaacggcgugggguaccagcccuaccggguggucgugcugagcuucgagcuccugcacgcccccgccacggugugcggccccaagaaguccaccaaccuggucaagaacaagugcgugaacuucaacuucaacggccucaccgggaccggcgugcugaccgagagcaacaagaaguuccugccguuccagcaguucgggcgcgacaucgccgacacgaccgacgcgguccgcgacccccagacccuggagauccucgacaucacccccugcagcuucggcgggguguccgugaucacgccgggcaccaacaccagcaaccaggucgccgugcuguaccaggacgugaacugcaccgagguccccguggccauccacgccgaccagcugacgcccaccuggcggguguacuccaccggcagcaacgucuuccagacccgcgccgggugccucaucggcgcggagcacgugaacaacuccuacgagugcgacauccccaucggggccggcaucugcgccagcuaccagacgcagaccaacuccccgcggcgcgcccggagcguggcgucccagagcaucaucgccuacaccaugucccugggcgccgagaacagcgucgccuacuccaacaacagcaucgccauccccaccaacuucacgaucuccgugaccaccgagauccugcccgugagcaugaccaagacgagcgucgacugcaccauguacaucugcggggacuccaccgagugcagcaaccuccugcugcaguacggcuccuucugcacccagcucaaccgcgcgcugacggggaucgccguggagcaggacaagaacacccaggagguguucgcccaggucaagcagaucuacaagacgcccccgaucaaggacuucggcggguucaacuucagccagauccugcccgaccccuccaagcccagcaagcgguccuucaucgaggaccuccuguucaacaaggugacccuggccgacgccggcuucaucaagcaguacggcgacugccucggggacaucgcggcccgcgaccugaucugcgcccagaaguucaacggccugaccgugcucccgccccugcugaccgacgagaugaucgcccaguacaccagcgcccuccuggcggggaccaucacguccggcuggaccuucggggccggcgccgcccugcagauccccuucgcgaugcagauggccuaccgguucaacggcaucggggucacccagaacgugcucuacgagaaccagaagcugaucgccaaccaguucaacagcgccaucggcaagauccaggacucccugagcuccaccgccagcgcgcucgggaagcugcaggacguggucaaccagaacgcccaggcccugaacacgcucgugaagcagcuguccagcaacuucggcgccaucuccagcgugcugaacgacauccucucccgccuggacccgcccgaggccgagguccagaucgaccggcugaucaccgggcgccuccagagccugcagaccuacgugacccagcagcugauccgggcggccgagauccgcgccagcgccaaccucgccgcgaccaagauguccgagugcgugcugggccagagcaagcgggucgacuucugcggcaagggguaccaccugauguccuucccccagagcgcgccccacggcgugguguuccuccacgucacguacgugcccgcccaggagaagaacuucaccaccgccccggccaucugccacgacgggaaggcccacuucccccgcgagggcgucuucguguccaacgggacccacugguucgugacgcagcggaacuucuacgagccccagaucaucaccaccgacaacaccuucgucagcggcaacugcgacguggugaucggcaucgucaacaacacgguguacgacccccugcagccggagcuggacuccuucaaggaggagcucgacaaguacuucaagaaccacaccagccccgacguggaccugggggacaucuccggcaucaacgccagcgucgugaacauccagaaggagaucgaccgccugaacgagguggccaagaaccucaacgagucccugaucgaccugcaggagcucgggaaguacgagcaguacaucaaguggcccugguacaucuggcugggcuucaucgccggccugaucgcgaucgucauggugaccaucaugcucugcugcaugaccagcugcugcuccugccugaaggggugcugcagcugcggcuccugcugcaaguucgacgaggacgacagcgagccggugcugaagggggucaagcuccacuacacgugaggacuaguguccaccugucccuccugggcugcuggauugucucguuuuccugccaaauaaacaggaucagcgcuuuacagaucucaaaggcucuuuucagagccaccaaaaaaaaaaaaaaaaaaaaaaaaaaaaaaaaaaaaaaaaaaaaaaaaaaaaaaaaaaaaaaaaaaaaaaaaaaaaaaaaaaaaaaaaaaaaaaaaaaaaa

SEQ ID NO: 23976 - RNA, 4129 nt, Artificial Sequence
  SARS-CoV-2/Wuhan/WIV05/2019__EPI_ISL_402128 spike protein mRNA gc (1-1273)(K986P_V987P_ D614G)
aggagacccgugacccggaaguuguacggcuacgcgacuuucccucccacaaacccucgcgcccuuccuuuccuacuugggcccggcagaaagcuuaccauguucguguuccugguccuccugccccuggugagcucccagugcgugaaccucaccacccgcacgcagcugccgcccgccuacaccaacagcuucacccggggcgucuacuaccccgacaagguguuccgcuccagcgugcugcacuccacccaggaccucuuccugcccuucuucagcaacgucacgugguuccacgccauccacguguccgggaccaacggcaccaagcgguucgacaacccggugcugcccuucaacgacggggucuacuucgcgagcaccgagaaguccaacaucauccgcggcuggaucuucgggacgacccucgacagcaagacccagucccugcugaucgugaacaacgccaccaacguggucaucaaggugugcgaguuccaguucugcaacgaccccuuccucggcguguacuaccacaagaacaacaagagcuggauggaguccgaguuccgggucuacagcuccgccaacaacugcacguucgaguacgugagccagcccuuccugauggaccuggagggcaagcaggggaacuucaagaaccuccgcgaguucguguucaagaacaucgacggcuacuucaagaucuacuccaagcacaccccgaucaaccugguccgggaccugccccagggguucagcgcccucgagccccugguggaccugcccaucggcaucaacaucacccgcuuccagacccuccuggcccugcaccgguccuaccucacgccgggggacagcagcuccggcuggaccgcgggcgccgccgccuacuacgugggguaccugcagccccgcaccuuccugcucaaguacaacgagaacggcaccaucacggacgcggucgacugcgcccuggacccccugagcgagaccaagugcacccucaaguccuucaccguggagaaggggaucuaccagacgagcaacuuccgggugcagcccaccgaguccaucguccgcuucccgaacaucaccaaccugugccccuucggcgagguguucaacgccacccgguucgccagcgucuacgccuggaaccgcaagcggaucuccaacugcguggcggacuacagcgugcuguacaacuccgccagcuucuccacguucaagugcuacggcgucagccccaccaagcucaacgaccugugcuucaccaacguguacgccgacuccuucgugauccgcggggacgagguccggcagaucgcccccggccagaccgggaagaucgccgacuacaacuacaagcugccggacgacuucacgggcugcgugaucgcguggaacagcaacaaccucgacuccaaggucgggggcaacuacaacuaccuguaccgccuguuccgcaagagcaaccucaagcccuucgagcgggacaucuccaccgagaucuaccaggccggcagcacccccugcaacgggguggagggcuucaacugcuacuucccccugcaguccuacggguuccagccgaccaacggcgugggguaccagcccuaccggguggucgugcugagcuucgagcuccugcacgcccccgccacggugugcggccccaagaaguccaccaaccuggucaagaacaagugcgugaacuucaacuucaacggccucaccgggaccggcgugcugaccgagagcaacaagaaguuccugccguuccagcaguucgggcgcgacaucgccgacacgaccgacgcgguccgcgacccccagacccuggagauccucgacaucacccccugcagcuucggcgggguguccgugaucacgccgggcaccaacaccagcaaccaggucgccgugcuguaccagggcgugaacugcaccgagguccccguggccauccacgccgaccagcugacgcccaccuggcggguguacuccaccgggagcaacgucuuccagacccgcgccggcugccucaucggggcggagcacgugaacaacuccuacgagugcgacauccccaucggcgccggcaucugcgccagcuaccagacgcagaccaacuccccgcggcgcgcccggagcguggcgucccagagcaucaucgccuacaccaugucccugggggccgagaacagcgucgccuacuccaacaacagcaucgccauccccaccaacuucacgaucuccgugaccaccgagauccugcccgugagcaugaccaagacgagcgucgacugcaccauguacaucugcggcgacuccaccgagugcagcaaccuccugcugcaguacggguccuucugcacccagcucaaccgcgcgcugacgggcaucgccguggagcaggacaagaacacccaggagguguucgcccaggucaagcagaucuacaagacgcccccgaucaaggacuucgggggcuucaacuucagccagauccugcccgaccccuccaagcccagcaagcgguccuucaucgaggaccuccuguucaacaaggugacccuggccgacgccggcuucaucaagcaguacggggacugccucggcgacaucgcggcccgcgaccugaucugcgcccagaaguucaacgggcugaccgugcucccgccccugcugaccgacgagaugaucgcccaguacaccagcgcccuccuggcgggcaccaucacguccggguggaccuucggcgccggcgccgcccugcagauccccuucgcgaugcagauggccuaccgguucaacgggaucggcgucacccagaacgugcucuacgagaaccagaagcugaucgccaaccaguucaacagcgccaucgggaagauccaggacucccugagcuccaccgccagcgcgcucggcaagcugcaggacguggucaaccagaacgcccaggcccugaacacgcucgugaagcagcuguccagcaacuucggggccaucuccagcgugcugaacgacauccucucccgccuggacccgcccgaggccgagguccagaucgaccggcugaucaccggccgccuccagagccugcagaccuacgugacccagcagcugauccgggcggccgagauccgcgccagcgccaaccucgccgcgaccaagauguccgagugcgugcugggccagagcaagcgggucgacuucugcgggaagggcuaccaccugauguccuucccccagagcgcgccccacggggugguguuccuccacgucacguacgugcccgcccaggagaagaacuucaccaccgccccggccaucugccacgacggcaaggcccacuucccccgcgagggggucuucguguccaacggcacccacugguucgugacgcagcggaacuucuacgagccccagaucaucaccaccgacaacaccuucgucagcggcaacugcgacguggugaucgggaucgucaacaacacgguguacgacccccugcagccggagcuggacuccuucaaggaggagcucgacaaguacuucaagaaccacaccagccccgacguggaccugggcgacaucuccgggaucaacgccagcgucgugaacauccagaaggagaucgaccgccugaacgagguggccaagaaccucaacgagucccugaucgaccugcaggagcucggcaaguacgagcaguacaucaaguggcccugguacaucuggcugggcuucaucgccgggcugaucgcgaucgucauggugaccaucaugcucugcugcaugaccagcugcugcuccugccugaagggcugcugcagcugcggguccugcugcaaguucgacgaggacgacagcgagccggugcugaagggcgucaagcuccacuacacgugaggacuaguguccaccugucccuccugggcugcuggauugucucguuuuccugccaaauaaacaggaucagcgcuuuacagaucucaaaggcucuuuucagagccaccaaaaaaaaaaaaaaaaaaaaaaaaaaaaaaaaaaaaaaaaaaaaaaaaaaaaaaaaaaaaaaaaaaaaaaaaaaaaaaaaaaaaaaaaaaaaaaaaaaaaa

SEQ ID NO: 23977 - RNA, 4129 nt, Artificial Sequence
  SARS-CoV-2/Wuhan/WIV05/2019__EPI_ISL_402128 spike protein mRNA gc (1-1273)(K986P_V987P_A222V_D614G)
aggagacccgugacccggaaguuguacggcuacgcgacuuucccucccacaaacccucgcgcccuuccuuuccuacuugggcccggcagaaagcuuaccauguucguguuccugguccuccugccccuggugagcucccagugcgugaaccucaccacccgcacgcagcugccgcccgccuacaccaacagcuucacccggggcgucuacuaccccgacaagguguuccgcuccagcgugcugcacuccacccaggaccucuuccugcccuucuucagcaacgucacgugguuccacgccauccacguguccgggaccaacggcaccaagcgguucgacaacccggugcugcccuucaacgacggggucuacuucgcgagcaccgagaaguccaacaucauccgcggcuggaucuucgggacgacccucgacagcaagacccagucccugcugaucgugaacaacgccaccaacguggucaucaaggugugcgaguuccaguucugcaacgaccccuuccucggcguguacuaccacaagaacaacaagagcuggauggaguccgaguuccgggucuacagcuccgccaacaacugcacguucgaguacgugagccagcccuuccugauggaccuggagggcaagcaggggaacuucaagaaccuccgcgaguucguguucaagaacaucgacggcuacuucaagaucuacuccaagcacaccccgaucaaccugguccgggaccugccccagggguucagcgugcucgagccccugguggaccugcccaucggcaucaacaucacccgcuuccagacccuccuggcccugcaccgguccuaccucacgccgggggacagcagcuccggcuggaccgccggcgcggccgccuacuacgucggguaccugcagccccgcaccuuccugcucaaguacaacgagaacggcaccaucacggacgccguggacugcgcgcuggacccccugagcgagaccaagugcacccucaaguccuucaccguggagaaggggaucuaccagacgagcaacuuccggguccagcccaccgaguccaucgugcgcuucccgaacaucaccaaccugugccccuucggcgaggucuucaacgccacccgguucgccagcguguacgccuggaaccgcaagcggaucuccaacugcguggccgacuacagcguccuguacaacuccgcgagcuucuccacguucaagugcuacggcgugagccccaccaagcucaacgaccugugcuucaccaacguguacgccgacuccuucgucauccgcggggacgaggugcggcagaucgcccccggccagaccgggaagaucgccgacuacaacuacaagcugccggacgacuucacgggcugcgugaucgccuggaacagcaacaaccucgacuccaaggucgggggcaacuacaacuaccuguaccgccuguuccgcaagagcaaccucaagcccuucgagcgggacaucuccaccgagaucuaccaggcgggcagcacccccugcaacgggguggagggcuucaacugcuacuucccccugcaguccuacggguuccagccgaccaacggcgugggguaccagcccuaccgggucguggugcugagcuucgagcuccugcacgcccccgccacggucugcggccccaagaaguccaccaaccuggugaagaacaagugcgugaacuucaacuucaacggccucaccgggaccggcguccugaccgagagcaacaagaaguuccugccguuccagcaguucgggcgcgacaucgccgacacgaccgacgccgugcgcgacccccagacccuggagauccucgacaucacccccugcagcuucggcgggguguccgucaucacgccgggcaccaacaccagcaaccagguggcggugcuguaccagggcgucaacugcaccgaggugcccguggccauccacgccgaccagcugacgcccaccuggcgggucuacuccaccgggagcaacguguuccagacccgcgccggcugccucaucggggccgagcacgugaacaacuccuacgagugcgacauccccaucggcgcgggcaucugcgccagcuaccagacgcagaccaacuccccgcggcgcgcccggagcgucgccucccagagcaucaucgcguacaccaugucccugggggccgagaacagcguggccuacuccaacaacagcaucgccauccccaccaacuucacgaucuccgugaccaccgagauccugcccgucagcaugaccaagacgagcguggacugcaccauguacaucugcggcgacuccaccgagugcagcaaccuccugcugcaguacggguccuucugcacccagcucaaccgcgcccugacgggcaucgcgguggagcaggacaagaacacccaggaggucuucgcccaggugaagcagaucuacaagacgcccccgaucaaggacuucgggggcuucaacuucagccagauccugcccgaccccuccaagcccagcaagcgguccuucaucgaggaccuccuguucaacaaggugacccuggccgacgccggcuucaucaagcaguacggggacugccucggcgacaucgccgcgcgcgaccugaucugcgcccagaaguucaacgggcugaccguccucccgccccugcugaccgacgagaugaucgcccaguacaccagcgcccuccuggccggcaccaucacguccggguggaccuucggcgcgggcgccgcccugcagauccccuucgccaugcagauggcguaccgguucaacgggaucggcgugacccagaacgugcucuacgagaaccagaagcugaucgccaaccaguucaacagcgccaucgggaagauccaggacucccugagcuccaccgccagcgcccucggcaagcugcaggacgucgugaaccagaacgcgcaggcccugaacacgcucgugaagcagcuguccagcaacuucggggccaucuccagcguccugaacgacauccucucccgccuggacccgcccgaggccgaggugcagaucgaccggcugaucaccggccgccuccagagccugcagaccuacgugacccagcagcugauccgggccgcggagauccgcgccagcgccaaccucgccgccaccaagauguccgagugcguccugggccagagcaagcggguggacuucugcgggaagggcuaccaccugauguccuucccccagagcgcgccccacgggguggucuuccuccacgugacguacguccccgcccaggagaagaacuucaccaccgccccggccaucugccacgacggcaaggcgcacuucccccgcgaggggguguucguguccaacggcacccacugguucgucacgcagcggaacuucuacgagccccagaucaucaccaccgacaacaccuucgugagcggcaacugcgacguggucaucgggaucgugaacaacacgguguacgacccccugcagccggagcuggacuccuucaaggaggagcucgacaaguacuucaagaaccacaccagccccgacgucgaccugggcgacaucuccgggaucaacgccagcguggugaacauccagaaggagaucgaccgccugaacgaggucgccaagaaccucaacgagucccugaucgaccugcaggagcucggcaaguacgagcaguacaucaaguggcccugguacaucuggcugggcuucaucgccgggcugaucgccaucgugauggugaccaucaugcucugcugcaugaccagcugcugcuccugccugaagggcugcugcagcugcggguccugcugcaaguucgacgaggacgacagcgagccgguccugaagggcgugaagcuccacuacacgugaggacuaguguccaccugucccuccugggcugcuggauugucucguuuuccugccaaauaaacaggaucagcgcuuuacagaucucaaaggcucuuuucagagccaccaaaaaaaaaaaaaaaaaaaaaaaaaaaaaaaaaaaaaaaaaaaaaaaaaaaaaaaaaaaaaaaaaaaaaaaaaaaaaaaaaaaaaaaaaaaaaaaaaaaaa

SEQ ID NO: 23978 - RNA, 4129 nt, Artificial Sequence
  SARS-CoV-2/Wuhan/WIV05/2019__EPI_ISL_402128 spike protein mRNA gc (1-1273)(K986P_V987P_N439K_D614G)
aggagacccgugacccggaaguuguacggcuacgcgacuuucccucccacaaacccucgcgcccuuccuuuccuacuugggcccggcagaaagcuuaccauguucguguuccugguccuccugccccuggugagcucccagugcgugaaccucaccacccgcacgcagcugccgcccgccuacaccaacagcuucacccggggcgucuacuaccccgacaagguguuccgcuccagcgugcugcacuccacccaggaccucuuccugcccuucuucagcaacgucacgugguuccacgccauccacguguccgggaccaacggcaccaagcgguucgacaacccggugcugcccuucaacgacggggucuacuucgcgagcaccgagaaguccaacaucauccgcggcuggaucuucgggacgacccucgacagcaagacccagucccugcugaucgugaacaacgccaccaacguggucaucaaggugugcgaguuccaguucugcaacgaccccuuccucggcguguacuaccacaagaacaacaagagcuggauggaguccgaguuccgggucuacagcuccgccaacaacugcacguucgaguacgugagccagcccuuccugauggaccuggagggcaagcaggggaacuucaagaaccuccgcgaguucguguucaagaacaucgacggcuacuucaagaucuacuccaagcacaccccgaucaaccugguccgggaccugccccagggguucagcgcccucgagccccugguggaccugcccaucggcaucaacaucacccgcuuccagacccuccuggcccugcaccgguccuaccucacgccgggggacagcagcuccggcuggaccgcgggcgccgccgccuacuacgugggguaccugcagccccgcaccuuccugcucaaguacaacgagaacggcaccaucacggacgcggucgacugcgcccuggacccccugagcgagaccaagugcacccucaaguccuucaccguggagaaggggaucuaccagacgagcaacuuccgggugcagcccaccgaguccaucguccgcuucccgaacaucaccaaccugugccccuucggcgagguguucaacgccacccgguucgccagcgucuacgccuggaaccgcaagcggaucuccaacugcguggcggacuacagcgugcuguacaacuccgccagcuucuccacguucaagugcuacggcgucagccccaccaagcucaacgaccugugcuucaccaacguguacgccgacuccuucgugauccgcggggacgagguccggcagaucgcccccggccagaccgggaagaucgccgacuacaacuacaagcugccggacgacuucacgggcugcgugaucgcguggaacagcaagaaccucgacuccaaggucgggggcaacuacaacuaccuguaccgccuguuccgcaagagcaaccucaagcccuucgagcgggacaucuccaccgagaucuaccaggccggcagcacccccugcaacgggguggagggcuucaacugcuacuucccccugcaguccuacggguuccagccgaccaacggcgugggguaccagcccuaccggguggucgugcugagcuucgagcuccugcacgcccccgccacggugugcggccccaagaaguccaccaaccuggucaagaacaagugcgugaacuucaacuucaacggccucaccgggaccggcgugcugaccgagagcaacaagaaguuccugccguuccagcaguucgggcgcgacaucgccgacacgaccgacgcgguccgcgacccccagacccuggagauccucgacaucacccccugcagcuucggcgggguguccgugaucacgccgggcaccaacaccagcaaccaggucgccgugcuguaccagggcgugaacugcaccgagguccccguggccauccacgccgaccagcugacgcccaccuggcggguguacuccaccgggagcaacgucuuccagacccgcgccggcugccucaucggggcggagcacgugaacaacuccuacgagugcgacauccccaucggcgccggcaucugcgccagcuaccagacgcagaccaacuccccgcggcgcgcccggagcguggcgucccagagcaucaucgccuacaccaugucccugggggccgagaacagcgucgccuacuccaacaacagcaucgccauccccaccaacuucacgaucuccgugaccaccgagauccugcccgugagcaugaccaagacgagcgucgacugcaccauguacaucugcggcgacuccaccgagugcagcaaccuccugcugcaguacggguccuucugcacccagcucaaccgcgcgcugacgggcaucgccguggagcaggacaagaacacccaggagguguucgcccaggucaagcagaucuacaagacgcccccgaucaaggacuucgggggcuucaacuucagccagauccugcccgaccccuccaagcccagcaagcgguccuucaucgaggaccuccuguucaacaaggugacccuggccgacgccggcuucaucaagcaguacggggacugccucggcgacaucgcggcccgcgaccugaucugcgcccagaaguucaacgggcugaccgugcucccgccccugcugaccgacgagaugaucgcccaguacaccagcgcccuccuggcgggcaccaucacguccggguggaccuucggcgccggcgccgcccugcagauccccuucgcgaugcagauggccuaccgguucaacgggaucggcgucacccagaacgugcucuacgagaaccagaagcugaucgccaaccaguucaacagcgccaucgggaagauccaggacucccugagcuccaccgccagcgcgcucggcaagcugcaggacguggucaaccagaacgcccaggcccugaacacgcucgugaagcagcuguccagcaacuucggggccaucuccagcgugcugaacgacauccucucccgccuggacccgcccgaggccgagguccagaucgaccggcugaucaccggccgccuccagagccugcagaccuacgugacccagcagcugauccgggcggccgagauccgcgccagcgccaaccucgccgcgaccaagauguccgagugcgugcugggccagagcaagcgggucgacuucugcgggaagggcuaccaccugauguccuucccccagagcgcgccccacggggugguguuccuccacgucacguacgugcccgcccaggagaagaacuucaccaccgccccggccaucugccacgacggcaaggcccacuucccccgcgagggggucuucguguccaacggcacccacugguucgugacgcagcggaacuucuacgagccccagaucaucaccaccgacaacaccuucgucagcggcaacugcgacguggugaucgggaucgucaacaacacgguguacgacccccugcagccggagcuggacuccuucaaggaggagcucgacaaguacuucaagaaccacaccagccccgacguggaccugggcgacaucuccgggaucaacgccagcgucgugaacauccagaaggagaucgaccgccugaacgagguggccaagaaccucaacgagucccugaucgaccugcaggagcucggcaaguacgagcaguacaucaaguggcccugguacaucuggcugggcuucaucgccgggcugaucgcgaucgucauggugaccaucaugcucugcugcaugaccagcugcugcuccugccugaagggcugcugcagcugcggguccugcugcaaguucgacgaggacgacagcgagccggugcugaagggcgucaagcuccacuacacgugaggacuaguguccaccugucccuccugggcugcuggauugucucguuuuccugccaaauaaacaggaucagcgcuuuacagaucucaaaggcucuuuucagagccaccaaaaaaaaaaaaaaaaaaaaaaaaaaaaaaaaaaaaaaaaaaaaaaaaaaaaaaaaaaaaaaaaaaaaaaaaaaaaaaaaaaaaaaaaaaaaaaaaaaaaa

SEQ ID NO: 23979 - RNA, 4129 nt, Artificial Sequence
  SARS-CoV-2/Wuhan/WIV05/2019__EPI_ISL_402128 spike protein mRNA gc (1-1273)(K986P_V987P_S477N_D614G)
aggagacccgugacccggaaguuguacggcuacgcgacuuucccucccacaaacccucgcgcccuuccuuuccuacuugggcccggcagaaagcuuaccauguucguguuccugguccuccugccccuggugagcucccagugcgugaaccucaccacccgcacgcagcugccgcccgccuacaccaacagcuucacccggggcgucuacuaccccgacaagguguuccgcuccagcgugcugcacuccacccaggaccucuuccugcccuucuucagcaacgucacgugguuccacgccauccacguguccgggaccaacggcaccaagcgguucgacaacccggugcugcccuucaacgacggggucuacuucgcgagcaccgagaaguccaacaucauccgcggcuggaucuucgggacgacccucgacagcaagacccagucccugcugaucgugaacaacgccaccaacguggucaucaaggugugcgaguuccaguucugcaacgaccccuuccucggcguguacuaccacaagaacaacaagagcuggauggaguccgaguuccgggucuacagcuccgccaacaacugcacguucgaguacgugagccagcccuuccugauggaccuggagggcaagcaggggaacuucaagaaccuccgcgaguucguguucaagaacaucgacggcuacuucaagaucuacuccaagcacaccccgaucaaccugguccgggaccugccccagggguucagcgcccucgagccccugguggaccugcccaucggcaucaacaucacccgcuuccagacccuccuggcccugcaccgguccuaccucacgccgggggacagcagcuccggcuggaccgcgggcgccgccgccuacuacgugggguaccugcagccccgcaccuuccugcucaaguacaacgagaacggcaccaucacggacgcggucgacugcgcccuggacccccugagcgagaccaagugcacccucaaguccuucaccguggagaaggggaucuaccagacgagcaacuuccgggugcagcccaccgaguccaucguccgcuucccgaacaucaccaaccugugccccuucggcgagguguucaacgccacccgguucgccagcgucuacgccuggaaccgcaagcggaucuccaacugcguggcggacuacagcgugcuguacaacuccgccagcuucuccacguucaagugcuacggcgucagccccaccaagcucaacgaccugugcuucaccaacguguacgccgacuccuucgugauccgcggggacgagguccggcagaucgcccccggccagaccgggaagaucgccgacuacaacuacaagcugccggacgacuucacgggcugcgugaucgcguggaacagcaacaaccucgacuccaaggucgggggcaacuacaacuaccuguaccgccuguuccgcaagagcaaccucaagcccuucgagcgggacaucuccaccgagaucuaccaggccggcaacacccccugcaacgggguggagggcuucaacugcuacuucccccugcagagcuacggguuccagccgaccaacggcgugggguaccagcccuaccggguggucgugcuguccuucgagcuccugcacgcccccgccacggugugcggccccaagaaguccaccaaccuggucaagaacaagugcgugaacuucaacuucaacggccucaccgggaccggcgugcugaccgagagcaacaagaaguuccugccguuccagcaguucgggcgcgacaucgccgacacgaccgacgcgguccgcgacccccagacccuggagauccucgacaucacccccugcagcuucggcggggugagcgugaucacgccgggcaccaacaccuccaaccaggucgccgugcuguaccagggcgugaacugcaccgagguccccguggccauccacgccgaccagcugacgcccaccuggcggguguacagcaccggguccaacgucuuccagacccgcgccggcugccucaucggggcggagcacgugaacaacagcuacgagugcgacauccccaucggcgccggcaucugcgccuccuaccagacgcagaccaacagcccgcggcgcgcccgguccguggcgagccaguccaucaucgccuacaccaugagccugggggccgagaacuccgucgccuacagcaacaacuccaucgccauccccaccaacuucacgaucagcgugaccaccgagauccugcccguguccaugaccaagacgagcgucgacugcaccauguacaucugcggcgacagcaccgagugcuccaaccuccugcugcaguacgggagcuucugcacccagcucaaccgcgcgcugacgggcaucgccguggagcaggacaagaacacccaggagguguucgcccaggucaagcagaucuacaagacgcccccgaucaaggacuucgggggcuucaacuucucccagauccugcccgaccccagcaagcccuccaagcggagcuucaucgaggaccuccuguucaacaaggugacccuggccgacgccggcuucaucaagcaguacggggacugccucggcgacaucgcggcccgcgaccugaucugcgcccagaaguucaacgggcugaccgugcucccgccccugcugaccgacgagaugaucgcccaguacaccuccgcccuccuggcgggcaccaucacgagcggguggaccuucggcgccggcgccgcccugcagauccccuucgcgaugcagauggccuaccgguucaacgggaucggcgucacccagaacgugcucuacgagaaccagaagcugaucgccaaccaguucaacuccgccaucgggaagauccaggacagccuguccagcaccgccuccgcgcucggcaagcugcaggacguggucaaccagaacgcccaggcccugaacacgcucgugaagcagcugagcuccaacuucggggccaucagcuccgugcugaacgacauccucagccgccuggacccgcccgaggccgagguccagaucgaccggcugaucaccggccgccuccagucccugcagaccuacgugacccagcagcugauccgggcggccgagauccgcgccagcgccaaccucgccgcgaccaagaugagcgagugcgugcugggccaguccaagcgggucgacuucugcgggaagggcuaccaccugaugagcuucccccaguccgcgccccacggggugguguuccuccacgucacguacgugcccgcccaggagaagaacuucaccaccgccccggccaucugccacgacggcaaggcccacuucccccgcgagggggucuucgugagcaacggcacccacugguucgugacgcagcggaacuucuacgagccccagaucaucaccaccgacaacaccuucgucuccggcaacugcgacguggugaucgggaucgucaacaacacgguguacgacccccugcagccggagcuggacagcuucaaggaggagcucgacaaguacuucaagaaccacaccucccccgacguggaccugggcgacaucagcgggaucaacgccuccgucgugaacauccagaaggagaucgaccgccugaacgagguggccaagaaccucaacgagagccugaucgaccugcaggagcucggcaaguacgagcaguacaucaaguggcccugguacaucuggcugggcuucaucgccgggcugaucgcgaucgucauggugaccaucaugcucugcugcaugaccuccugcugcagcugccugaagggcugcugcuccugcgggagcugcugcaaguucgacgaggacgacuccgagccggugcugaagggcgucaagcuccacuacacgugaggacuaguguccaccugucccuccugggcugcuggauugucucguuuuccugccaaauaaacaggaucagcgcuuuacagaucucaaaggcucuuuucagagccaccaaaaaaaaaaaaaaaaaaaaaaaaaaaaaaaaaaaaaaaaaaaaaaaaaaaaaaaaaaaaaaaaaaaaaaaaaaaaaaaaaaaaaaaaaaaaaaaaaaaaa

SEQ ID NO: 23980 - RNA, 4129 nt, Artificial Sequence
  SARS-CoV-2/Wuhan/WIV05/2019__EPI_ISL_402128 spike protein mRNA gc (1-1273)(K986P_V987P_N501Y_D614G)
aggagacccgugacccggaaguuguacggcuacgcgacuuucccucccacaaacccucgcgcccuuccuuuccuacuugggcccggcagaaagcuuaccauguucguguuccugguccuccugccccuggugagcucccagugcgugaaccucaccacccgcacgcagcugccgcccgccuacaccaacagcuucacccggggcgucuacuaccccgacaagguguuccgcuccagcgugcugcacuccacccaggaccucuuccugcccuucuucagcaacgucacgugguuccacgccauccacguguccgggaccaacggcaccaagcgguucgacaacccggugcugcccuucaacgacggggucuacuucgcgagcaccgagaaguccaacaucauccgcggcuggaucuucgggacgacccucgacagcaagacccagucccugcugaucgugaacaacgccaccaacguggucaucaaggugugcgaguuccaguucugcaacgaccccuuccucggcguguacuaccacaagaacaacaagagcuggauggaguccgaguuccgggucuacagcuccgccaacaacugcacguucgaguacgugagccagcccuuccugauggaccuggagggcaagcaggggaacuucaagaaccuccgcgaguucguguucaagaacaucgacggcuacuucaagaucuacuccaagcacaccccgaucaaccugguccgggaccugccccagggguucagcgcccucgagccccugguggaccugcccaucggcaucaacaucacccgcuuccagacccuccuggcccugcaccgguccuaccucacgccgggggacagcagcuccggcuggaccgcgggcgccgccgccuacuacgugggguaccugcagccccgcaccuuccugcucaaguacaacgagaacggcaccaucacggacgcggucgacugcgcccuggacccccugagcgagaccaagugcacccucaaguccuucaccguggagaaggggaucuaccagacgagcaacuuccgggugcagcccaccgaguccaucguccgcuucccgaacaucaccaaccugugccccuucggcgagguguucaacgccacccgguucgccagcgucuacgccuggaaccgcaagcggaucuccaacugcguggcggacuacagcgugcuguacaacuccgccagcuucuccacguucaagugcuacggcgucagccccaccaagcucaacgaccugugcuucaccaacguguacgccgacuccuucgugauccgcggggacgagguccggcagaucgcccccggccagaccgggaagaucgccgacuacaacuacaagcugccggacgacuucacgggcugcgugaucgcguggaacagcaacaaccucgacuccaaggucgggggcaacuacaacuaccuguaccgccuguuccgcaagagcaaccucaagcccuucgagcgggacaucuccaccgagaucuaccaggccggcagcacccccugcaacgggguggagggcuucaacugcuacuucccccugcaguccuacggguuccagccgaccuacggcgugggguaccagcccuaccggguggucgugcugagcuucgagcuccugcacgcccccgccacggugugcggccccaagaaguccaccaaccuggucaagaacaagugcgugaacuucaacuucaacggccucaccgggaccggcgugcugaccgagagcaacaagaaguuccugccguuccagcaguucgggcgcgacaucgccgacacgaccgacgcgguccgcgacccccagacccuggagauccucgacaucacccccugcagcuucggcgggguguccgugaucacgccgggcaccaacaccagcaaccaggucgccgugcuguaccagggcgugaacugcaccgagguccccguggccauccacgccgaccagcugacgcccaccuggcggguguacuccaccgggagcaacgucuuccagacccgcgccggcugccucaucggggcggagcacgugaacaacuccuacgagugcgacauccccaucggcgccggcaucugcgccagcuaccagacgcagaccaacuccccgcggcgcgcccggagcguggcgucccagagcaucaucgccuacaccaugucccugggggccgagaacagcgucgccuacuccaacaacagcaucgccauccccaccaacuucacgaucuccgugaccaccgagauccugcccgugagcaugaccaagacgagcgucgacugcaccauguacaucugcggcgacuccaccgagugcagcaaccuccugcugcaguacggguccuucugcacccagcucaaccgcgcgcugacgggcaucgccguggagcaggacaagaacacccaggagguguucgcccaggucaagcagaucuacaagacgcccccgaucaaggacuucgggggcuucaacuucagccagauccugcccgaccccuccaagcccagcaagcgguccuucaucgaggaccuccuguucaacaaggugacccuggccgacgccggcuucaucaagcaguacggggacugccucggcgacaucgcggcccgcgaccugaucugcgcccagaaguucaacgggcugaccgugcucccgccccugcugaccgacgagaugaucgcccaguacaccagcgcccuccuggcgggcaccaucacguccggguggaccuucggcgccggcgccgcccugcagauccccuucgcgaugcagauggccuaccgguucaacgggaucggcgucacccagaacgugcucuacgagaaccagaagcugaucgccaaccaguucaacagcgccaucgggaagauccaggacucccugagcuccaccgccagcgcgcucggcaagcugcaggacguggucaaccagaacgcccaggcccugaacacgcucgugaagcagcuguccagcaacuucggggccaucuccagcgugcugaacgacauccucucccgccuggacccgcccgaggccgagguccagaucgaccggcugaucaccggccgccuccagagccugcagaccuacgugacccagcagcugauccgggcggccgagauccgcgccagcgccaaccucgccgcgaccaagauguccgagugcgugcugggccagagcaagcgggucgacuucugcgggaagggcuaccaccugauguccuucccccagagcgcgccccacggggugguguuccuccacgucacguacgugcccgcccaggagaagaacuucaccaccgccccggccaucugccacgacggcaaggcccacuucccccgcgagggggucuucguguccaacggcacccacugguucgugacgcagcggaacuucuacgagccccagaucaucaccaccgacaacaccuucgucagcggcaacugcgacguggugaucgggaucgucaacaacacgguguacgacccccugcagccggagcuggacuccuucaaggaggagcucgacaaguacuucaagaaccacaccagccccgacguggaccugggcgacaucuccgggaucaacgccagcgucgugaacauccagaaggagaucgaccgccugaacgagguggccaagaaccucaacgagucccugaucgaccugcaggagcucggcaaguacgagcaguacaucaaguggcccugguacaucuggcugggcuucaucgccgggcugaucgcgaucgucauggugaccaucaugcucugcugcaugaccagcugcugcuccugccugaagggcugcugcagcugcggguccugcugcaaguucgacgaggacgacagcgagccggugcugaagggcgucaagcuccacuacacgugaggacuaguguccaccugucccuccugggcugcuggauugucucguuuuccugccaaauaaacaggaucagcgcuuuacagaucucaaaggcucuuuucagagccaccaaaaaaaaaaaaaaaaaaaaaaaaaaaaaaaaaaaaaaaaaaaaaaaaaaaaaaaaaaaaaaaaaaaaaaaaaaaaaaaaaaaaaaaaaaaaaaaaaaaaa

SEQ ID NO: 23981 - RNA, 4123 nt, Artificial Sequence
  SARS-CoV-2/Wuhan/WIV05/2019__EPI_ISL_402128 spike protein mRNA gc (1-1273)(K986P_V987P_H69del_V70del_D614G)
aggagacccgugacccggaaguuguacggcuacgcgacuuucccucccacaaacccucgcgcccuuccuuuccuacuugggcccggcagaaagcuuaccauguucguguuccugguccuccugccccuggugagcucccagugcgugaaccucaccacccgcacgcagcugccgcccgccuacaccaacagcuucacccggggcgucuacuaccccgacaagguguuccgcuccagcgugcugcacuccacccaggaccucuuccugcccuucuucagcaacgucacgugguuccacgccaucuccgggaccaacggcaccaagcgguucgacaacccggugcugcccuucaacgacgggguguacuucgcgagcaccgagaaguccaacaucauccgcggcuggaucuucgggacgacccucgacagcaagacccagucccugcugaucgucaacaacgccaccaacguggugaucaaggucugcgaguuccaguucugcaacgaccccuuccucggcguguacuaccacaagaacaacaagagcuggauggaguccgaguuccggguguacagcuccgccaacaacugcacguucgaguacgucagccagcccuuccugauggaccuggagggcaagcaggggaacuucaagaaccuccgcgaguucguguucaagaacaucgacggcuacuucaagaucuacuccaagcacaccccgaucaaccuggugcgggaccugccccagggguucagcgcccucgagccccuggucgaccugcccaucggcaucaacaucacccgcuuccagacccuccuggcccugcaccgguccuaccucacgccgggggacagcagcuccggcuggaccgcgggcgccgccgccuacuacgugggguaccugcagccccgcaccuuccugcucaaguacaacgagaacggcaccaucacggacgcgguggacugcgcccuggacccccugagcgagaccaagugcacccucaaguccuucaccgucgagaaggggaucuaccagacgagcaacuuccgggugcagcccaccgaguccaucgugcgcuucccgaacaucaccaaccugugccccuucggcgaggucuucaacgccacccgguucgccagcguguacgccuggaaccgcaagcggaucuccaacugcgucgcggacuacagcgugcuguacaacuccgccagcuucuccacguucaagugcuacggcgugagccccaccaagcucaacgaccugugcuucaccaacgucuacgccgacuccuucgugauccgcggggacgaggugcggcagaucgcccccggccagaccgggaagaucgccgacuacaacuacaagcugccggacgacuucacgggcugcgucaucgcguggaacagcaacaaccucgacuccaaggucgggggcaacuacaacuaccuguaccgccuguuccgcaagagcaaccucaagcccuucgagcgggacaucuccaccgagaucuaccaggccggcagcacccccugcaacgggguggagggcuucaacugcuacuucccccugcaguccuacggguuccagccgaccaacggcgugggguaccagcccuaccggguggugguccugagcuucgagcuccugcacgcccccgccacggugugcggccccaagaaguccaccaaccuggugaagaacaagugcgucaacuucaacuucaacggccucaccgggaccggcgugcugaccgagagcaacaagaaguuccugccguuccagcaguucgggcgcgacaucgccgacacgaccgacgcggugcgcgacccccagacccuggagauccucgacaucacccccugcagcuucggcggggucuccgugaucacgccgggcaccaacaccagcaaccagguggccguccuguaccagggcgugaacugcaccgaggugcccgucgccauccacgccgaccagcugacgcccaccuggcggguguacuccaccgggagcaacguguuccagacccgcgccggcugccucaucggggcggagcacgucaacaacuccuacgagugcgacauccccaucggcgccggcaucugcgccagcuaccagacgcagaccaacuccccgcggcgcgcccggagcguggcgucccagagcaucaucgccuacaccaugucccugggggccgagaacagcguggccuacuccaacaacagcaucgccauccccaccaacuucacgaucuccgucaccaccgagauccugcccgugagcaugaccaagacgagcguggacugcaccauguacaucugcggcgacuccaccgagugcagcaaccuccugcugcaguacggguccuucugcacccagcucaaccgcgcgcugacgggcaucgccgucgagcaggacaagaacacccaggagguguucgcccaggugaagcagaucuacaagacgcccccgaucaaggacuucgggggcuucaacuucagccagauccugcccgaccccuccaagcccagcaagcgguccuucaucgaggaccuccuguucaacaaggucacccuggccgacgccggcuucaucaagcaguacggggacugccucggcgacaucgcggcccgcgaccugaucugcgcccagaaguucaacgggcugaccgugcucccgccccugcugaccgacgagaugaucgcccaguacaccagcgcccuccuggcgggcaccaucacguccggguggaccuucggcgccggcgccgcccugcagauccccuucgcgaugcagauggccuaccgguucaacgggaucggcgugacccagaacguccucuacgagaaccagaagcugaucgccaaccaguucaacagcgccaucgggaagauccaggacucccugagcuccaccgccagcgcgcucggcaagcugcaggacguggugaaccagaacgcccaggcccugaacacgcucgucaagcagcuguccagcaacuucggggccaucuccagcgugcugaacgacauccucucccgccuggacccgcccgaggccgaggugcagaucgaccggcugaucaccggccgccuccagagccugcagaccuacgucacccagcagcugauccgggcggccgagauccgcgccagcgccaaccucgccgcgaccaagauguccgagugcgugcugggccagagcaagcggguggacuucugcgggaagggcuaccaccugauguccuucccccagagcgcgccccacggggucguguuccuccacgugacguacguccccgcccaggagaagaacuucaccaccgccccggccaucugccacgacggcaaggcccacuucccccgcgaggggguguucgucuccaacggcacccacugguucgugacgcagcggaacuucuacgagccccagaucaucaccaccgacaacaccuucgugagcggcaacugcgacgucgugaucgggaucgugaacaacacggucuacgacccccugcagccggagcuggacuccuucaaggaggagcucgacaaguacuucaagaaccacaccagccccgacguggaccugggcgacaucuccgggaucaacgccagcguggucaacauccagaaggagaucgaccgccugaacgagguggccaagaaccucaacgagucccugaucgaccugcaggagcucggcaaguacgagcaguacaucaaguggcccugguacaucuggcugggcuucaucgccgggcugaucgcgaucgugauggucaccaucaugcucugcugcaugaccagcugcugcuccugccugaagggcugcugcagcugcggguccugcugcaaguucgacgaggacgacagcgagccggugcugaagggcgugaagcuccacuacacgugaggacuaguguccaccugucccuccugggcugcuggauugucucguuuuccugccaaauaaacaggaucagcgcuuuacagaucucaaaggcucuuuucagagccaccaaaaaaaaaaaaaaaaaaaaaaaaaaaaaaaaaaaaaaaaaaaaaaaaaaaaaaaaaaaaaaaaaaaaaaaaaaaaaaaaaaaaaaaaaaaaaaaaaaaaa

SEQ ID NO: 23982 - RNA, 4129 nt, Artificial Sequence
  SARS-CoV-2/Wuhan/WIV05/2019__EPI_ISL_402128 spike protein mRNA gc (1-1273)(K986P_V987P_Y453F_D614G)
aggagacccgugacccggaaguuguacggcuacgcgacuuucccucccacaaacccucgcgcccuuccuuuccuacuugggcccggcagaaagcuuaccauguucguguuccugguccuccugccccuggugagcucccagugcgugaaccucaccacccgcacgcagcugccgcccgccuacaccaacagcuucacccggggcgucuacuaccccgacaagguguuccgcuccagcgugcugcacuccacccaggaccucuuccugcccuucuucagcaacgucacgugguuccacgccauccacguguccgggaccaacggcaccaagcgguucgacaacccggugcugcccuucaacgacggggucuacuucgcgagcaccgagaaguccaacaucauccgcggcuggaucuucgggacgacccucgacagcaagacccagucccugcugaucgugaacaacgccaccaacguggucaucaaggugugcgaguuccaguucugcaacgaccccuuccucggcguguacuaccacaagaacaacaagagcuggauggaguccgaguuccgggucuacagcuccgccaacaacugcacguucgaguacgugagccagcccuuccugauggaccuggagggcaagcaggggaacuucaagaaccuccgcgaguucguguucaagaacaucgacggcuacuucaagaucuacuccaagcacaccccgaucaaccugguccgggaccugccccagggguucagcgcccucgagccccugguggaccugcccaucggcaucaacaucacccgcuuccagacccuccuggcccugcaccgguccuaccucacgccgggggacagcagcuccggcuggaccgcgggcgccgccgccuacuacgugggguaccugcagccccgcaccuuccugcucaaguacaacgagaacggcaccaucacggacgcggucgacugcgcccuggacccccugagcgagaccaagugcacccucaaguccuucaccguggagaaggggaucuaccagacgagcaacuuccgggugcagcccaccgaguccaucguccgcuucccgaacaucaccaaccugugccccuucggcgagguguucaacgccacccgguucgccagcgucuacgccuggaaccgcaagcggaucuccaacugcguggcggacuacagcgugcuguacaacuccgccagcuucuccacguucaagugcuacggcgucagccccaccaagcucaacgaccugugcuucaccaacguguacgccgacuccuucgugauccgcggggacgagguccggcagaucgcccccggccagaccgggaagaucgccgacuacaacuacaagcugccggacgacuucacgggcugcgugaucgcguggaacagcaacaaccucgacuccaaggucgggggcaacuacaacuaccuguuccgccuguuccgcaagagcaaccucaagcccuucgagcgggacaucuccaccgagaucuaccaggccggcagcacccccugcaacgggguggagggcuucaacugcuacuucccccugcaguccuacggguuccagccgaccaacggcgugggguaccagcccuaccggguggucgugcugagcuucgagcuccugcacgcccccgccacggugugcggccccaagaaguccaccaaccuggucaagaacaagugcgugaacuucaacuucaacggccucaccgggaccggcgugcugaccgagagcaacaagaaguuccugccguuccagcaguucgggcgcgacaucgccgacacgaccgacgcgguccgcgacccccagacccuggagauccucgacaucacccccugcagcuucggcgggguguccgugaucacgccgggcaccaacaccagcaaccaggucgccgugcuguaccagggcgugaacugcaccgagguccccguggccauccacgccgaccagcugacgcccaccuggcggguguacuccaccgggagcaacgucuuccagacccgcgccggcugccucaucggggcggagcacgugaacaacuccuacgagugcgacauccccaucggcgccggcaucugcgccagcuaccagacgcagaccaacuccccgcggcgcgcccggagcguggcgucccagagcaucaucgccuacaccaugucccugggggccgagaacagcgucgccuacuccaacaacagcaucgccauccccaccaacuucacgaucuccgugaccaccgagauccugcccgugagcaugaccaagacgagcgucgacugcaccauguacaucugcggcgacuccaccgagugcagcaaccuccugcugcaguacggguccuucugcacccagcucaaccgcgcgcugacgggcaucgccguggagcaggacaagaacacccaggagguguucgcccaggucaagcagaucuacaagacgcccccgaucaaggacuucgggggcuucaacuucagccagauccugcccgaccccuccaagcccagcaagcgguccuucaucgaggaccuccuguucaacaaggugacccuggccgacgccggcuucaucaagcaguacggggacugccucggcgacaucgcggcccgcgaccugaucugcgcccagaaguucaacgggcugaccgugcucccgccccugcugaccgacgagaugaucgcccaguacaccagcgcccuccuggcgggcaccaucacguccggguggaccuucggcgccggcgccgcccugcagauccccuucgcgaugcagauggccuaccgguucaacgggaucggcgucacccagaacgugcucuacgagaaccagaagcugaucgccaaccaguucaacagcgccaucgggaagauccaggacucccugagcuccaccgccagcgcgcucggcaagcugcaggacguggucaaccagaacgcccaggcccugaacacgcucgugaagcagcuguccagcaacuucggggccaucuccagcgugcugaacgacauccucucccgccuggacccgcccgaggccgagguccagaucgaccggcugaucaccggccgccuccagagccugcagaccuacgugacccagcagcugauccgggcggccgagauccgcgccagcgccaaccucgccgcgaccaagauguccgagugcgugcugggccagagcaagcgggucgacuucugcgggaagggcuaccaccugauguccuucccccagagcgcgccccacggggugguguuccuccacgucacguacgugcccgcccaggagaagaacuucaccaccgccccggccaucugccacgacggcaaggcccacuucccccgcgagggggucuucguguccaacggcacccacugguucgugacgcagcggaacuucuacgagccccagaucaucaccaccgacaacaccuucgucagcggcaacugcgacguggugaucgggaucgucaacaacacgguguacgacccccugcagccggagcuggacuccuucaaggaggagcucgacaaguacuucaagaaccacaccagccccgacguggaccugggcgacaucuccgggaucaacgccagcgucgugaacauccagaaggagaucgaccgccugaacgagguggccaagaaccucaacgagucccugaucgaccugcaggagcucggcaaguacgagcaguacaucaaguggcccugguacaucuggcugggcuucaucgccgggcugaucgcgaucgucauggugaccaucaugcucugcugcaugaccagcugcugcuccugccugaagggcugcugcagcugcggguccugcugcaaguucgacgaggacgacagcgagccggugcugaagggcgucaagcuccacuacacgugaggacuaguguccaccugucccuccugggcugcuggauugucucguuuuccugccaaauaaacaggaucagcgcuuuacagaucucaaaggcucuuuucagagccaccaaaaaaaaaaaaaaaaaaaaaaaaaaaaaaaaaaaaaaaaaaaaaaaaaaaaaaaaaaaaaaaaaaaaaaaaaaaaaaaaaaaaaaaaaaaaaaaaaaaaa

SEQ ID NO: 23983 - RNA, 4129 nt, Artificial Sequence
  SARS-CoV-2/Wuhan/WIV05/2019__EPI_ISL_402128 spike protein mRNA gc (1-1273)(K986P_V987P_D614G_I692V)
aggagacccgugacccggaaguuguacggcuacgcgacuuucccucccacaaacccucgcgcccuuccuuuccuacuugggcccggcagaaagcuuaccauguucguguuccugguccuccugccccuggugagcucccagugcgugaaccucaccacccgcacgcagcugccgcccgccuacaccaacagcuucacccggggcgucuacuaccccgacaagguguuccgcuccagcgugcugcacuccacccaggaccucuuccugcccuucuucagcaacgucacgugguuccacgccauccacguguccgggaccaacggcaccaagcgguucgacaacccggugcugcccuucaacgacggggucuacuucgcgagcaccgagaaguccaacaucauccgcggcuggaucuucgggacgacccucgacagcaagacccagucccugcugaucgugaacaacgccaccaacguggucaucaaggugugcgaguuccaguucugcaacgaccccuuccucggcguguacuaccacaagaacaacaagagcuggauggaguccgaguuccgggucuacagcuccgccaacaacugcacguucgaguacgugagccagcccuuccugauggaccuggagggcaagcaggggaacuucaagaaccuccgcgaguucguguucaagaacaucgacggcuacuucaagaucuacuccaagcacaccccgaucaaccugguccgggaccugccccagggguucagcgcccucgagccccugguggaccugcccaucggcaucaacaucacccgcuuccagacccuccuggcccugcaccgguccuaccucacgccgggggacagcagcuccggcuggaccgcgggcgccgccgccuacuacgugggguaccugcagccccgcaccuuccugcucaaguacaacgagaacggcaccaucacggacgcggucgacugcgcccuggacccccugagcgagaccaagugcacccucaaguccuucaccguggagaaggggaucuaccagacgagcaacuuccgggugcagcccaccgaguccaucguccgcuucccgaacaucaccaaccugugccccuucggcgagguguucaacgccacccgguucgccagcgucuacgccuggaaccgcaagcggaucuccaacugcguggcggacuacagcgugcuguacaacuccgccagcuucuccacguucaagugcuacggcgucagccccaccaagcucaacgaccugugcuucaccaacguguacgccgacuccuucgugauccgcggggacgagguccggcagaucgcccccggccagaccgggaagaucgccgacuacaacuacaagcugccggacgacuucacgggcugcgugaucgcguggaacagcaacaaccucgacuccaaggucgggggcaacuacaacuaccuguaccgccuguuccgcaagagcaaccucaagcccuucgagcgggacaucuccaccgagaucuaccaggccggcagcacccccugcaacgggguggagggcuucaacugcuacuucccccugcaguccuacggguuccagccgaccaacggcgugggguaccagcccuaccggguggucgugcugagcuucgagcuccugcacgcccccgccacggugugcggccccaagaaguccaccaaccuggucaagaacaagugcgugaacuucaacuucaacggccucaccgggaccggcgugcugaccgagagcaacaagaaguuccugccguuccagcaguucgggcgcgacaucgccgacacgaccgacgcgguccgcgacccccagacccuggagauccucgacaucacccccugcagcuucggcgggguguccgugaucacgccgggcaccaacaccagcaaccaggucgccgugcuguaccagggcgugaacugcaccgagguccccguggccauccacgccgaccagcugacgcccaccuggcggguguacuccaccgggagcaacgucuuccagacccgcgccggcugccucaucggggcggagcacgugaacaacuccuacgagugcgacauccccaucggcgccggcaucugcgccagcuaccagacgcagaccaacuccccgcggcgcgcccggagcguggcgucccagagcgucaucgccuacaccaugucccugggggccgagaacagcguggccuacuccaacaacagcaucgccauccccaccaacuucacgaucuccgugaccaccgagauccugcccgucagcaugaccaagacgagcguggacugcaccauguacaucugcggcgacuccaccgagugcagcaaccuccugcugcaguacggguccuucugcacccagcucaaccgcgcgcugacgggcaucgccguggagcaggacaagaacacccaggaggucuucgcccaggugaagcagaucuacaagacgcccccgaucaaggacuucgggggcuucaacuucagccagauccugcccgaccccuccaagcccagcaagcgguccuucaucgaggaccuccuguucaacaaggugacccuggccgacgccggcuucaucaagcaguacggggacugccucggcgacaucgcggcccgcgaccugaucugcgcccagaaguucaacgggcugaccguccucccgccccugcugaccgacgagaugaucgcccaguacaccagcgcccuccuggcgggcaccaucacguccggguggaccuucggcgccggcgccgcccugcagauccccuucgcgaugcagauggccuaccgguucaacgggaucggcgugacccagaacgugcucuacgagaaccagaagcugaucgccaaccaguucaacagcgccaucgggaagauccaggacucccugagcuccaccgccagcgcgcucggcaagcugcaggacgucgugaaccagaacgcccaggcccugaacacgcucgugaagcagcuguccagcaacuucggggccaucuccagcguccugaacgacauccucucccgccuggacccgcccgaggccgaggugcagaucgaccggcugaucaccggccgccuccagagccugcagaccuacgugacccagcagcugauccgggcggccgagauccgcgccagcgccaaccucgccgcgaccaagauguccgagugcguccugggccagagcaagcggguggacuucugcgggaagggcuaccaccugauguccuucccccagagcgcgccccacgggguggucuuccuccacgugacguacguccccgcccaggagaagaacuucaccaccgccccggccaucugccacgacggcaaggcccacuucccccgcgaggggguguucguguccaacggcacccacugguucgucacgcagcggaacuucuacgagccccagaucaucaccaccgacaacaccuucgugagcggcaacugcgacguggucaucgggaucgugaacaacacgguguacgacccccugcagccggagcuggacuccuucaaggaggagcucgacaaguacuucaagaaccacaccagccccgacgucgaccugggcgacaucuccgggaucaacgccagcguggugaacauccagaaggagaucgaccgccugaacgaggucgccaagaaccucaacgagucccugaucgaccugcaggagcucggcaaguacgagcaguacaucaaguggcccugguacaucuggcugggcuucaucgccgggcugaucgcgaucgugauggugaccaucaugcucugcugcaugaccagcugcugcuccugccugaagggcugcugcagcugcggguccugcugcaaguucgacgaggacgacagcgagccgguccugaagggcgugaagcuccacuacacgugaggacuaguguccaccugucccuccugggcugcuggauugucucguuuuccugccaaauaaacaggaucagcgcuuuacagaucucaaaggcucuuuucagagccaccaaaaaaaaaaaaaaaaaaaaaaaaaaaaaaaaaaaaaaaaaaaaaaaaaaaaaaaaaaaaaaaaaaaaaaaaaaaaaaaaaaaaaaaaaaaaaaaaaaaaa

SEQ ID NO: 23984 - RNA, 4129 nt, Artificial Sequence
  SARS-CoV-2/Wuhan/WIV05/2019__EPI_ISL_402128 spike protein mRNA gc (1-1273)(K986P_V987P_D614G_M1229I)
aggagacccgugacccggaaguuguacggcuacgcgacuuucccucccacaaacccucgcgcccuuccuuuccuacuugggcccggcagaaagcuuaccauguucguguuccugguccuccugccccuggugagcucccagugcgugaaccucaccacccgcacgcagcugccgcccgccuacaccaacagcuucacccggggcgucuacuaccccgacaagguguuccgcuccagcgugcugcacuccacccaggaccucuuccugcccuucuucagcaacgucacgugguuccacgccauccacguguccgggaccaacggcaccaagcgguucgacaacccggugcugcccuucaacgacggggucuacuucgcgagcaccgagaaguccaacaucauccgcggcuggaucuucgggacgacccucgacagcaagacccagucccugcugaucgugaacaacgccaccaacguggucaucaaggugugcgaguuccaguucugcaacgaccccuuccucggcguguacuaccacaagaacaacaagagcuggauggaguccgaguuccgggucuacagcuccgccaacaacugcacguucgaguacgugagccagcccuuccugauggaccuggagggcaagcaggggaacuucaagaaccuccgcgaguucguguucaagaacaucgacggcuacuucaagaucuacuccaagcacaccccgaucaaccugguccgggaccugccccagggguucagcgcccucgagccccugguggaccugcccaucggcaucaacaucacccgcuuccagacccuccuggcccugcaccgguccuaccucacgccgggggacagcagcuccggcuggaccgcgggcgccgccgccuacuacgugggguaccugcagccccgcaccuuccugcucaaguacaacgagaacggcaccaucacggacgcggucgacugcgcccuggacccccugagcgagaccaagugcacccucaaguccuucaccguggagaaggggaucuaccagacgagcaacuuccgggugcagcccaccgaguccaucguccgcuucccgaacaucaccaaccugugccccuucggcgagguguucaacgccacccgguucgccagcgucuacgccuggaaccgcaagcggaucuccaacugcguggcggacuacagcgugcuguacaacuccgccagcuucuccacguucaagugcuacggcgucagccccaccaagcucaacgaccugugcuucaccaacguguacgccgacuccuucgugauccgcggggacgagguccggcagaucgcccccggccagaccgggaagaucgccgacuacaacuacaagcugccggacgacuucacgggcugcgugaucgcguggaacagcaacaaccucgacuccaaggucgggggcaacuacaacuaccuguaccgccuguuccgcaagagcaaccucaagcccuucgagcgggacaucuccaccgagaucuaccaggccggcagcacccccugcaacgggguggagggcuucaacugcuacuucccccugcaguccuacggguuccagccgaccaacggcgugggguaccagcccuaccggguggucgugcugagcuucgagcuccugcacgcccccgccacggugugcggccccaagaaguccaccaaccuggucaagaacaagugcgugaacuucaacuucaacggccucaccgggaccggcgugcugaccgagagcaacaagaaguuccugccguuccagcaguucgggcgcgacaucgccgacacgaccgacgcgguccgcgacccccagacccuggagauccucgacaucacccccugcagcuucggcgggguguccgugaucacgccgggcaccaacaccagcaaccaggucgccgugcuguaccagggcgugaacugcaccgagguccccguggccauccacgccgaccagcugacgcccaccuggcggguguacuccaccgggagcaacgucuuccagacccgcgccggcugccucaucggggcggagcacgugaacaacuccuacgagugcgacauccccaucggcgccggcaucugcgccagcuaccagacgcagaccaacuccccgcggcgcgcccggagcguggcgucccagagcaucaucgccuacaccaugucccugggggccgagaacagcgucgccuacuccaacaacagcaucgccauccccaccaacuucacgaucuccgugaccaccgagauccugcccgugagcaugaccaagacgagcgucgacugcaccauguacaucugcggcgacuccaccgagugcagcaaccuccugcugcaguacggguccuucugcacccagcucaaccgcgcgcugacgggcaucgccguggagcaggacaagaacacccaggagguguucgcccaggucaagcagaucuacaagacgcccccgaucaaggacuucgggggcuucaacuucagccagauccugcccgaccccuccaagcccagcaagcgguccuucaucgaggaccuccuguucaacaaggugacccuggccgacgccggcuucaucaagcaguacggggacugccucggcgacaucgcggcccgcgaccugaucugcgcccagaaguucaacgggcugaccgugcucccgccccugcugaccgacgagaugaucgcccaguacaccagcgcccuccuggcgggcaccaucacguccggguggaccuucggcgccggcgccgcccugcagauccccuucgcgaugcagauggccuaccgguucaacgggaucggcgucacccagaacgugcucuacgagaaccagaagcugaucgccaaccaguucaacagcgccaucgggaagauccaggacucccugagcuccaccgccagcgcgcucggcaagcugcaggacguggucaaccagaacgcccaggcccugaacacgcucgugaagcagcuguccagcaacuucggggccaucuccagcgugcugaacgacauccucucccgccuggacccgcccgaggccgagguccagaucgaccggcugaucaccggccgccuccagagccugcagaccuacgugacccagcagcugauccgggcggccgagauccgcgccagcgccaaccucgccgcgaccaagauguccgagugcgugcugggccagagcaagcgggucgacuucugcgggaagggcuaccaccugauguccuucccccagagcgcgccccacggggugguguuccuccacgucacguacgugcccgcccaggagaagaacuucaccaccgccccggccaucugccacgacggcaaggcccacuucccccgcgagggggucuucguguccaacggcacccacugguucgugacgcagcggaacuucuacgagccccagaucaucaccaccgacaacaccuucgucagcggcaacugcgacguggugaucgggaucgucaacaacacgguguacgacccccugcagccggagcuggacuccuucaaggaggagcucgacaaguacuucaagaaccacaccagccccgacguggaccugggcgacaucuccgggaucaacgccagcgucgugaacauccagaaggagaucgaccgccugaacgagguggccaagaaccucaacgagucccugaucgaccugcaggagcucggcaaguacgagcaguacaucaaguggcccugguacaucuggcugggcuucaucgccgggcugaucgcgaucgucaucgugaccaucaugcucugcugcaugaccagcugcugcuccugccugaagggcugcugcagcugcggguccugcugcaaguucgacgaggacgacagcgagccggugcugaagggcgucaagcuccacuacacgugaggacuaguguccaccugucccuccugggcugcuggauugucucguuuuccugccaaauaaacaggaucagcgcuuuacagaucucaaaggcucuuuucagagccaccaaaaaaaaaaaaaaaaaaaaaaaaaaaaaaaaaaaaaaaaaaaaaaaaaaaaaaaaaaaaaaaaaaaaaaaaaaaaaaaaaaaaaaaaaaaaaaaaaaaaa

SEQ ID NO: 23985 - RNA, 4123 nt, Artificial Sequence
  SARS-CoV-2/Wuhan/WIV05/2019__EPI_ISL_402128 spike protein mRNA gc (1-1273)(K986P_V987P_H69del_V70del_A222V_Y453F_S477N_D614G_I692V)
aggagacccgugacccggaaguuguacggcuacgcgacuuucccucccacaaacccucgcgcccuuccuuuccuacuugggcccggcagaaagcuuaccauguucguguuccugguccuccugccccuggugagcucccagugcgugaaccucaccacccgcacgcagcugccgcccgccuacaccaacagcuucacccggggcgucuacuaccccgacaagguguuccgcuccagcgugcugcacuccacccaggaccucuuccugcccuucuucagcaacgucacgugguuccacgccaucuccgggaccaacggcaccaagcgguucgacaacccggugcugcccuucaacgacgggguguacuucgcgagcaccgagaaguccaacaucauccgcggcuggaucuucgggacgacccucgacagcaagacccagucccugcugaucgucaacaacgccaccaacguggugaucaaggucugcgaguuccaguucugcaacgaccccuuccucggcguguacuaccacaagaacaacaagagcuggauggaguccgaguuccggguguacagcuccgccaacaacugcacguucgaguacgucagccagcccuuccugauggaccuggagggcaagcaggggaacuucaagaaccuccgcgaguucguguucaagaacaucgacggcuacuucaagaucuacuccaagcacaccccgaucaaccuggugcgggaccugccccagggguucagcguccucgagccccugguggaccugcccaucggcaucaacaucacccgcuuccagacccuccuggcccugcaccgguccuaccucacgccgggggacagcagcuccggcuggaccgccggcgcggccgccuacuacgugggguaccugcagccccgcaccuuccugcucaaguacaacgagaacggcaccaucacggacgccgucgacugcgcgcuggacccccugagcgagaccaagugcacccucaaguccuucaccguggagaaggggaucuaccagacgagcaacuuccgggugcagcccaccgaguccaucguccgcuucccgaacaucaccaaccugugccccuucggcgagguguucaacgccacccgguucgccagcgucuacgccuggaaccgcaagcggaucuccaacugcguggccgacuacagcgugcuguacaacuccgcgagcuucuccacguucaagugcuacggcgucagccccaccaagcucaacgaccugugcuucaccaacguguacgccgacuccuucgugauccgcggggacgagguccggcagaucgcccccggccagaccgggaagaucgccgacuacaacuacaagcugccggacgacuucacgggcugcgugaucgccuggaacagcaacaaccucgacuccaaggucgggggcaacuacaacuaccuguuccgccuguuccgcaagagcaaccucaagcccuucgagcgggacaucuccaccgagaucuaccaggcgggcaacacccccugcaacgggguggagggcuucaacugcuacuucccccugcagagcuacggguuccagccgaccaacggcgugggguaccagcccuaccggguggucgugcuguccuucgagcuccugcacgcccccgccacggugugcggccccaagaaguccaccaaccuggucaagaacaagugcgugaacuucaacuucaacggccucaccgggaccggcgugcugaccgagagcaacaagaaguuccugccguuccagcaguucgggcgcgacaucgccgacacgaccgacgccguccgcgacccccagacccuggagauccucgacaucacccccugcagcuucggcggggugagcgugaucacgccgggcaccaacaccuccaaccaggucgcggugcuguaccagggcgugaacugcaccgagguccccguggccauccacgccgaccagcugacgcccaccuggcggguguacagcaccggguccaacgucuuccagacccgcgccggcugccucaucggggccgagcacgugaacaacagcuacgagugcgacauccccaucggcgcgggcaucugcgccuccuaccagacgcagaccaacagcccgcggcgcgcccgguccguggccagccaguccgucaucgcguacaccaugagccugggggccgagaacuccguggccuacagcaacaacuccaucgccauccccaccaacuucacgaucagcgugaccaccgagauccugcccgucuccaugaccaagacgagcguggacugcaccauguacaucugcggcgacagcaccgagugcuccaaccuccugcugcaguacgggagcuucugcacccagcucaaccgcgcccugacgggcaucgcgguggagcaggacaagaacacccaggaggucuucgcccaggugaagcagaucuacaagacgcccccgaucaaggacuucgggggcuucaacuucucccagauccugcccgaccccagcaagcccuccaagcggagcuucaucgaggaccuccuguucaacaaggugacccuggccgacgccggcuucaucaagcaguacggggacugccucggcgacaucgccgcgcgcgaccugaucugcgcccagaaguucaacgggcugaccguccucccgccccugcugaccgacgagaugaucgcccaguacaccuccgcccuccuggccggcaccaucacgagcggguggaccuucggcgcgggcgccgcccugcagauccccuucgccaugcagauggcguaccgguucaacgggaucggcgugacccagaacgugcucuacgagaaccagaagcugaucgccaaccaguucaacuccgccaucgggaagauccaggacagccuguccagcaccgccuccgcccucggcaagcugcaggacgucgugaaccagaacgcgcaggcccugaacacgcucgugaagcagcugagcuccaacuucggggccaucagcuccguccugaacgacauccucagccgccuggacccgcccgaggccgaggugcagaucgaccggcugaucaccggccgccuccagucccugcagaccuacgugacccagcagcugauccgggccgcggagauccgcgccagcgccaaccucgccgccaccaagaugagcgagugcguccugggccaguccaagcggguggacuucugcgggaagggcuaccaccugaugagcuucccccaguccgcgccccacgggguggucuuccuccacgugacguacguccccgcccaggagaagaacuucaccaccgccccggccaucugccacgacggcaaggcgcacuucccccgcgaggggguguucgugagcaacggcacccacugguucgucacgcagcggaacuucuacgagccccagaucaucaccaccgacaacaccuucguguccggcaacugcgacguggucaucgggaucgugaacaacacgguguacgacccccugcagccggagcuggacagcuucaaggaggagcucgacaaguacuucaagaaccacaccucccccgacgucgaccugggcgacaucagcgggaucaacgccuccguggugaacauccagaaggagaucgaccgccugaacgaggucgccaagaaccucaacgagagccugaucgaccugcaggagcucggcaaguacgagcaguacaucaaguggcccugguacaucuggcugggcuucaucgccgggcugaucgccaucgugauggugaccaucaugcucugcugcaugaccuccugcugcagcugccugaagggcugcugcuccugcgggagcugcugcaaguucgacgaggacgacuccgagccgguccugaagggcgugaagcuccacuacacgugaggacuaguguccaccugucccuccugggcugcuggauugucucguuuuccugccaaauaaacaggaucagcgcuuuacagaucucaaaggcucuuuucagagccaccaaaaaaaaaaaaaaaaaaaaaaaaaaaaaaaaaaaaaaaaaaaaaaaaaaaaaaaaaaaaaaaaaaaaaaaaaaaaaaaaaaaaaaaaaaaaaaaaaaaaa

SEQ ID NO: 23986 - RNA, 4123 nt, Artificial Sequence
  SARS-CoV-2/Wuhan/WIV05/2019__EPI_ISL_402128 spike protein mRNA gc (1-1273)(K986P_V987P_H69del_V70del_Y453F_D614G_I692V_M1229I)
aggagacccgugacccggaaguuguacggcuacgcgacuuucccucccacaaacccucgcgcccuuccuuuccuacuugggcccggcagaaagcuuaccauguucguguuccugguccuccugccccuggugagcucccagugcgugaaccucaccacccgcacgcagcugccgcccgccuacaccaacagcuucacccggggcgucuacuaccccgacaagguguuccgcuccagcgugcugcacuccacccaggaccucuuccugcccuucuucagcaacgucacgugguuccacgccaucuccgggaccaacggcaccaagcgguucgacaacccggugcugcccuucaacgacgggguguacuucgcgagcaccgagaaguccaacaucauccgcggcuggaucuucgggacgacccucgacagcaagacccagucccugcugaucgucaacaacgccaccaacguggugaucaaggucugcgaguuccaguucugcaacgaccccuuccucggcguguacuaccacaagaacaacaagagcuggauggaguccgaguuccggguguacagcuccgccaacaacugcacguucgaguacgucagccagcccuuccugauggaccuggagggcaagcaggggaacuucaagaaccuccgcgaguucguguucaagaacaucgacggcuacuucaagaucuacuccaagcacaccccgaucaaccuggugcgggaccugccccagggguucagcgcccucgagccccuggucgaccugcccaucggcaucaacaucacccgcuuccagacccuccuggcccugcaccgguccuaccucacgccgggggacagcagcuccggcuggaccgcgggcgccgccgccuacuacgugggguaccugcagccccgcaccuuccugcucaaguacaacgagaacggcaccaucacggacgcgguggacugcgcccuggacccccugagcgagaccaagugcacccucaaguccuucaccgucgagaaggggaucuaccagacgagcaacuuccgggugcagcccaccgaguccaucgugcgcuucccgaacaucaccaaccugugccccuucggcgaggucuucaacgccacccgguucgccagcguguacgccuggaaccgcaagcggaucuccaacugcgucgcggacuacagcgugcuguacaacuccgccagcuucuccacguucaagugcuacggcgugagccccaccaagcucaacgaccugugcuucaccaacgucuacgccgacuccuucgugauccgcggggacgaggugcggcagaucgcccccggccagaccgggaagaucgccgacuacaacuacaagcugccggacgacuucacgggcugcgucaucgcguggaacagcaacaaccucgacuccaaggucgggggcaacuacaacuaccuguuccgccuguuccgcaagagcaaccucaagcccuucgagcgggacaucuccaccgagaucuaccaggccggcagcacccccugcaacgggguggagggcuucaacugcuacuucccccugcaguccuacggguuccagccgaccaacggcgugggguaccagcccuaccggguggugguccugagcuucgagcuccugcacgcccccgccacggugugcggccccaagaaguccaccaaccuggugaagaacaagugcgucaacuucaacuucaacggccucaccgggaccggcgugcugaccgagagcaacaagaaguuccugccguuccagcaguucgggcgcgacaucgccgacacgaccgacgcggugcgcgacccccagacccuggagauccucgacaucacccccugcagcuucggcggggucuccgugaucacgccgggcaccaacaccagcaaccagguggccguccuguaccagggcgugaacugcaccgaggugcccgucgccauccacgccgaccagcugacgcccaccuggcggguguacuccaccgggagcaacguguuccagacccgcgccggcugccucaucggggcggagcacgucaacaacuccuacgagugcgacauccccaucggcgccggcaucugcgccagcuaccagacgcagaccaacuccccgcggcgcgcccggagcguggcgucccagagcgugaucgccuacaccaugucccugggggccgagaacagcgucgccuacuccaacaacagcaucgccauccccaccaacuucacgaucuccgugaccaccgagauccugcccgugagcaugaccaagacgagcgucgacugcaccauguacaucugcggcgacuccaccgagugcagcaaccuccugcugcaguacggguccuucugcacccagcucaaccgcgcgcugacgggcaucgccguggagcaggacaagaacacccaggagguguucgcccaggucaagcagaucuacaagacgcccccgaucaaggacuucgggggcuucaacuucagccagauccugcccgaccccuccaagcccagcaagcgguccuucaucgaggaccuccuguucaacaaggugacccuggccgacgccggcuucaucaagcaguacggggacugccucggcgacaucgcggcccgcgaccugaucugcgcccagaaguucaacgggcugaccgugcucccgccccugcugaccgacgagaugaucgcccaguacaccagcgcccuccuggcgggcaccaucacguccggguggaccuucggcgccggcgccgcccugcagauccccuucgcgaugcagauggccuaccgguucaacgggaucggcgucacccagaacgugcucuacgagaaccagaagcugaucgccaaccaguucaacagcgccaucgggaagauccaggacucccugagcuccaccgccagcgcgcucggcaagcugcaggacguggucaaccagaacgcccaggcccugaacacgcucgugaagcagcuguccagcaacuucggggccaucuccagcgugcugaacgacauccucucccgccuggacccgcccgaggccgagguccagaucgaccggcugaucaccggccgccuccagagccugcagaccuacgugacccagcagcugauccgggcggccgagauccgcgccagcgccaaccucgccgcgaccaagauguccgagugcgugcugggccagagcaagcgggucgacuucugcgggaagggcuaccaccugauguccuucccccagagcgcgccccacggggugguguuccuccacgucacguacgugcccgcccaggagaagaacuucaccaccgccccggccaucugccacgacggcaaggcccacuucccccgcgagggggucuucguguccaacggcacccacugguucgugacgcagcggaacuucuacgagccccagaucaucaccaccgacaacaccuucgucagcggcaacugcgacguggugaucgggaucgucaacaacacgguguacgacccccugcagccggagcuggacuccuucaaggaggagcucgacaaguacuucaagaaccacaccagccccgacguggaccugggcgacaucuccgggaucaacgccagcgucgugaacauccagaaggagaucgaccgccugaacgagguggccaagaaccucaacgagucccugaucgaccugcaggagcucggcaaguacgagcaguacaucaaguggcccugguacaucuggcugggcuucaucgccgggcugaucgcgaucgucaucgugaccaucaugcucugcugcaugaccagcugcugcuccugccugaagggcugcugcagcugcggguccugcugcaaguucgacgaggacgacagcgagccggugcugaagggcgucaagcuccacuacacgugaggacuaguguccaccugucccuccugggcugcuggauugucucguuuuccugccaaauaaacaggaucagcgcuuuacagaucucaaaggcucuuuucagagccaccaaaaaaaaaaaaaaaaaaaaaaaaaaaaaaaaaaaaaaaaaaaaaaaaaaaaaaaaaaaaaaaaaaaaaaaaaaaaaaaaaaaaaaaaaaaaaaaaaaaaa

SEQ ID NO: 23987 - RNA, 4120 nt, Artificial Sequence
  SARS-CoV-2/Wuhan/WIV05/2019__EPI_ISL_402128 spike protein mRNA gc (1-1273)(K986P_V987P_K986P_V987P_H69del_V70del_Y144del_N501Y_A570 D_D614G_P681H_T716I_S982A_D1118H)
aggagacccgugacccggaaguuguacggcuacgcgacuuucccucccacaaacccucgcgcccuuccuuuccuacuugggcccggcagaaagcuuaccauguucguguuccugguccuccugccccuggugagcucccagugcgugaaccucaccacccgcacgcagcugccgcccgccuacaccaacagcuucacccggggcgucuacuaccccgacaagguguuccgcuccagcgugcugcacuccacccaggaccucuuccugcccuucuucagcaacgucacgugguuccacgccaucuccgggaccaacggcaccaagcgguucgacaacccggugcugcccuucaacgacgggguguacuucgcgagcaccgagaaguccaacaucauccgcggcuggaucuucgggacgacccucgacagcaagacccagucccugcugaucgucaacaacgccaccaacguggugaucaaggucugcgaguuccaguucugcaacgaccccuuccucggcguguaccacaagaacaacaagagcuggauggaguccgaguuccggguguacagcuccgccaacaacugcacguucgaguacgucagccagcccuuccugauggaccuggagggcaagcaggggaacuucaagaaccuccgcgaguucguguucaagaacaucgacggcuacuucaagaucuacuccaagcacaccccgaucaaccuggugcgggaccugccccagggguucagcgcccucgagccccuggucgaccugcccaucggcaucaacaucacccgcuuccagacccuccuggcccugcaccgguccuaccucacgccgggggacagcagcuccggcuggaccgcgggcgccgccgccuacuacgugggguaccugcagccccgcaccuuccugcucaaguacaacgagaacggcaccaucacggacgcgguggacugcgcccuggacccccugagcgagaccaagugcacccucaaguccuucaccgucgagaaggggaucuaccagacgagcaacuuccgggugcagcccaccgaguccaucgugcgcuucccgaacaucaccaaccugugccccuucggcgaggucuucaacgccacccgguucgccagcguguacgccuggaaccgcaagcggaucuccaacugcgucgcggacuacagcgugcuguacaacuccgccagcuucuccacguucaagugcuacggcgugagccccaccaagcucaacgaccugugcuucaccaacgucuacgccgacuccuucgugauccgcggggacgaggugcggcagaucgcccccggccagaccgggaagaucgccgacuacaacuacaagcugccggacgacuucacgggcugcgucaucgcguggaacagcaacaaccucgacuccaaggucgggggcaacuacaacuaccuguaccgccuguuccgcaagagcaaccucaagcccuucgagcgggacaucuccaccgagaucuaccaggccggcagcacccccugcaacgggguggagggcuucaacugcuacuucccccugcaguccuacggguuccagccgaccuacggcgugggguaccagcccuaccggguggugguccugagcuucgagcuccugcacgcccccgccacggugugcggccccaagaaguccaccaaccuggugaagaacaagugcgucaacuucaacuucaacggccucaccgggaccggcgugcugaccgagagcaacaagaaguuccugccguuccagcaguucgggcgcgacaucgacgacacgaccgacgccgugcgcgacccccagacccuggagauccucgacaucacccccugcagcuucggcggggucuccgugaucacgccgggcaccaacaccagcaaccagguggcgguccuguaccagggcgugaacugcaccgaggugcccgucgccauccacgccgaccagcugacgcccaccuggcggguguacuccaccgggagcaacguguuccagacccgcgccggcugccucaucggggccgagcacgucaacaacuccuacgagugcgacauccccaucggcgcgggcaucugcgccagcuaccagacgcagaccaacucccaccggcgcgcccggagcguggccucccagagcaucaucgcguacaccaugucccugggggccgagaacagcguggccuacuccaacaacagcaucgccaucccgaucaacuucaccaucuccgucacgaccgagauccugcccgugagcaugaccaagaccagcguggacugcacgauguacaucugcggcgacuccaccgagugcagcaaccuccugcugcaguacggguccuucugcacccagcucaaccgcgcccugaccggcaucgcggucgagcaggacaagaacacgcaggagguguucgcccaggugaagcagaucuacaagaccccgcccaucaaggacuucgggggcuucaacuucagccagauccugcccgaccccuccaagcccagcaagcgguccuucaucgaggaccuccuguucaacaaggucacccuggccgacgccggcuucaucaagcaguacggggacugccucggcgacaucgccgcgcgcgaccugaucugcgcccagaaguucaacgggcugaccgugcugcccccgcuccugacggacgagaugaucgcccaguacaccagcgcccuccuggccggcaccaucaccuccggguggacguucggcgcgggcgccgcccugcagauccccuucgccaugcagauggcguaccgguucaacgggaucggcgugacccagaacguccucuacgagaaccagaagcugaucgccaaccaguucaacagcgccaucgggaagauccaggacucccugagcuccaccgccagcgcccucggcaagcugcaggacguggugaaccagaacgcgcaggcccugaacacccucgucaagcagcuguccagcaacuucggggccaucuccagcgugcugaacgacauccucgcccgccuggacccgcccgaggccgaggugcagaucgaccggcugaucacgggccgccuccagucccugcagaccuacgucacccagcagcugauccgggcggccgagauccgcgccagcgccaaccucgccgcgaccaagaugagcgagugcgugcugggccaguccaagcggguggacuucugcgggaagggcuaccaccugaugagcuucccccaguccgcgccccacggggucguguuccuccacgugaccuacguccccgcccaggagaagaacuucacgaccgcccccgccaucugccacgacggcaaggcccacuucccgcgcgaggggguguucgucagcaacggcacccacugguucgugacccagcggaacuucuacgagccccagaucaucacgacccacaacaccuucguguccggcaacugcgacgucgugaucgggaucgugaacaacaccgucuacgacccccugcagcccgagcuggacagcuucaaggaggagcucgacaaguacuucaagaaccacacguccccggacguggaccugggcgacaucagcgggaucaacgccuccguggucaacauccagaaggagaucgaccgccugaacgagguggccaagaaccucaacgagagccugaucgaccugcaggagcucggcaaguacgagcaguacaucaaguggcccugguacaucuggcugggcuucaucgccgggcugaucgcgaucgugauggucaccaucaugcucugcugcaugaccuccugcugcagcugccugaagggcugcugcuccugcgggagcugcugcaaguucgacgaggacgacuccgagcccgugcugaagggcgugaagcuccacuacaccugaggacuaguguccaccugucccuccugggcugcuggauugucucguuuuccugccaaauaaacaggaucagcgcuuuacagaucucaaaggcucuuuucagagccaccaaaaaaaaaaaaaaaaaaaaaaaaaaaaaaaaaaaaaaaaaaaaaaaaaaaaaaaaaaaaaaaaaaaaaaaaaaaaaaaaaaaaaaaaaaaaaaaaaaaaa

SEQ ID NO: 23988 - RNA, 4129 nt, Artificial Sequence
  SARS-CoV-2/Wuhan/WIV05/2019__EPI_ISL_402128 spike protein mRNA gc (1-1273)(K986P_V987P_K986P_V987P_K417N_E484K_N501Y_D614G)
aggagacccgugacccggaaguuguacggcuacgcgacuuucccucccacaaacccucgcgcccuuccuuuccuacuugggcccggcagaaagcuuaccauguucguguuccugguccuccugccccuggugagcucccagugcgugaaccucaccacccgcacgcagcugccgcccgccuacaccaacagcuucacccggggcgucuacuaccccgacaagguguuccgcuccagcgugcugcacuccacccaggaccucuuccugcccuucuucagcaacgucacgugguuccacgccauccacguguccgggaccaacggcaccaagcgguucgacaacccggugcugcccuucaacgacggggucuacuucgcgagcaccgagaaguccaacaucauccgcggcuggaucuucgggacgacccucgacagcaagacccagucccugcugaucgugaacaacgccaccaacguggucaucaaggugugcgaguuccaguucugcaacgaccccuuccucggcguguacuaccacaagaacaacaagagcuggauggaguccgaguuccgggucuacagcuccgccaacaacugcacguucgaguacgugagccagcccuuccugauggaccuggagggcaagcaggggaacuucaagaaccuccgcgaguucguguucaagaacaucgacggcuacuucaagaucuacuccaagcacaccccgaucaaccugguccgggaccugccccagggguucagcgcccucgagccccugguggaccugcccaucggcaucaacaucacccgcuuccagacccuccuggcccugcaccgguccuaccucacgccgggggacagcagcuccggcuggaccgcgggcgccgccgccuacuacgugggguaccugcagccccgcaccuuccugcucaaguacaacgagaacggcaccaucacggacgcggucgacugcgcccuggacccccugagcgagaccaagugcacccucaaguccuucaccguggagaaggggaucuaccagacgagcaacuuccgggugcagcccaccgaguccaucguccgcuucccgaacaucaccaaccugugccccuucggcgagguguucaacgccacccgguucgccagcgucuacgccuggaaccgcaagcggaucuccaacugcguggcggacuacagcgugcuguacaacuccgccagcuucuccacguucaagugcuacggcgucagccccaccaagcucaacgaccugugcuucaccaacguguacgccgacuccuucgugauccgcggggacgagguccggcagaucgcccccggccagaccgggaacaucgccgacuacaacuacaagcugccggacgacuucacgggcugcgugaucgcguggaacagcaacaaccucgacuccaaggucgggggcaacuacaacuaccuguaccgccuguuccgcaagagcaaccucaagcccuucgagcgggacaucuccaccgagaucuaccaggccggcagcacccccugcaacggggugaagggcuucaacugcuacuucccccugcaguccuacggguuccagccgaccuacggcgugggguaccagcccuaccggguggucgugcugagcuucgagcuccugcacgcccccgccacggugugcggccccaagaaguccaccaaccuggucaagaacaagugcgugaacuucaacuucaacggccucaccgggaccggcgugcugaccgagagcaacaagaaguuccugccguuccagcaguucgggcgcgacaucgccgacacgaccgacgcgguccgcgacccccagacccuggagauccucgacaucacccccugcagcuucggcgggguguccgugaucacgccgggcaccaacaccagcaaccaggucgccgugcuguaccagggcgugaacugcaccgagguccccguggccauccacgccgaccagcugacgcccaccuggcggguguacuccaccgggagcaacgucuuccagacccgcgccggcugccucaucggggcggagcacgugaacaacuccuacgagugcgacauccccaucggcgccggcaucugcgccagcuaccagacgcagaccaacuccccgcggcgcgcccggagcguggcgucccagagcaucaucgccuacaccaugucccugggggccgagaacagcgucgccuacuccaacaacagcaucgccauccccaccaacuucacgaucuccgugaccaccgagauccugcccgugagcaugaccaagacgagcgucgacugcaccauguacaucugcggcgacuccaccgagugcagcaaccuccugcugcaguacggguccuucugcacccagcucaaccgcgcgcugacgggcaucgccguggagcaggacaagaacacccaggagguguucgcccaggucaagcagaucuacaagacgcccccgaucaaggacuucgggggcuucaacuucagccagauccugcccgaccccuccaagcccagcaagcgguccuucaucgaggaccuccuguucaacaaggugacccuggccgacgccggcuucaucaagcaguacggggacugccucggcgacaucgcggcccgcgaccugaucugcgcccagaaguucaacgggcugaccgugcucccgccccugcugaccgacgagaugaucgcccaguacaccagcgcccuccuggcgggcaccaucacguccggguggaccuucggcgccggcgccgcccugcagauccccuucgcgaugcagauggccuaccgguucaacgggaucggcgucacccagaacgugcucuacgagaaccagaagcugaucgccaaccaguucaacagcgccaucgggaagauccaggacucccugagcuccaccgccagcgcgcucggcaagcugcaggacguggucaaccagaacgcccaggcccugaacacgcucgugaagcagcuguccagcaacuucggggccaucuccagcgugcugaacgacauccucucccgccuggacccgcccgaggccgagguccagaucgaccggcugaucaccggccgccuccagagccugcagaccuacgugacccagcagcugauccgggcggccgagauccgcgccagcgccaaccucgccgcgaccaagauguccgagugcgugcugggccagagcaagcgggucgacuucugcgggaagggcuaccaccugauguccuucccccagagcgcgccccacggggugguguuccuccacgucacguacgugcccgcccaggagaagaacuucaccaccgccccggccaucugccacgacggcaaggcccacuucccccgcgagggggucuucguguccaacggcacccacugguucgugacgcagcggaacuucuacgagccccagaucaucaccaccgacaacaccuucgucagcggcaacugcgacguggugaucgggaucgucaacaacacgguguacgacccccugcagccggagcuggacuccuucaaggaggagcucgacaaguacuucaagaaccacaccagccccgacguggaccugggcgacaucuccgggaucaacgccagcgucgugaacauccagaaggagaucgaccgccugaacgagguggccaagaaccucaacgagucccugaucgaccugcaggagcucggcaaguacgagcaguacaucaaguggcccugguacaucuggcugggcuucaucgccgggcugaucgcgaucgucauggugaccaucaugcucugcugcaugaccagcugcugcuccugccugaagggcugcugcagcugcggguccugcugcaaguucgacgaggacgacagcgagccggugcugaagggcgucaagcuccacuacacgugaggacuaguguccaccugucccuccugggcugcuggauugucucguuuuccugccaaauaaacaggaucagcgcuuuacagaucucaaaggcucuuuucagagccaccaaaaaaaaaaaaaaaaaaaaaaaaaaaaaaaaaaaaaaaaaaaaaaaaaaaaaaaaaaaaaaaaaaaaaaaaaaaaaaaaaaaaaaaaaaaaaaaaaaaaa

SEQ ID NO: 23989 - RNA, 4120 nt, Artificial Sequence
  SARS-CoV-2/Wuhan/WIV05/2019__EPI_ISL_402128 spike protein mRNA gc (1-1273)(K986P_V987P_K986P_V987P_L18F_D80A_D215G_L242del_A243del_ L244del_R246I_K417N_E484K_N501Y_D614G_A701V)
aggagacccgugacccggaaguuguacggcuacgcgacuuucccucccacaaacccucgcgcccuuccuuuccuacuugggcccggcagaaagcuuaccauguucguguuccugguccuccugccccuggugagcucccagugcgugaacuucaccacccgcacgcagcucccgcccgccuacaccaacagcuucacccggggcgucuacuaccccgacaagguguuccgcuccagcgugcugcacuccacccaggaccuguuccuccccuucuucagcaacgucacgugguuccacgccauccacguguccgggaccaacggcaccaagcgguucgcgaacccggugcugcccuucaacgacggggucuacuucgccagcaccgagaaguccaacaucauccgcggcuggaucuucgggacgacccuggacagcaagacccagucccuccugaucgugaacaacgccaccaacguggucaucaaggugugcgaguuccaguucugcaacgaccccuuccugggcguguacuaccacaagaacaacaagagcuggauggaguccgaguuccgggucuacagcuccgccaacaacugcacguucgaguacgugagccagcccuuccucauggaccuggagggcaagcaggggaacuucaagaaccugcgcgaguucguguucaagaacaucgacggcuacuucaagaucuacuccaagcacaccccgaucaaccucguccgggggcugccccagggcuucagcgcccuggagccccucguggaccugcccaucgggaucaacaucacccgcuuccagacccugcacaucuccuaccucacgccgggcgacagcagcuccggcuggaccgcgggggccgccgccuacuacgugggcuaccugcagccccggaccuuccugcucaaguacaacgagaacgggaccaucacggacgcggucgacugcgcccuggacccccugagcgagaccaagugcacccucaaguccuucaccguggagaagggcaucuaccagacgagcaacuuccgcgugcagcccaccgaguccaucguccgguucccgaacaucaccaaccugugccccuucggcgagguguucaacgccacccgcuucgccagcgucuacgccuggaaccggaagcgcaucuccaacugcguggcggacuacagcgugcuguacaacuccgccagcuucuccacguucaagugcuacggggucagccccaccaagcucaacgaccugugcuucaccaacguguacgccgacuccuucgugauccggggcgacgagguccgccagaucgcccccgggcagaccggcaacaucgccgacuacaacuacaagcugccggacgacuucacggggugcgugaucgcguggaacagcaacaaccucgacuccaaggugggcggcaacuacaacuaccuguaccggcuguuccgcaagagcaaccucaagcccuucgagcgggacaucuccaccgagaucuaccaggccgggagcacccccugcaacggcgucaagggguucaacugcuacuucccccugcaguccuacggcuuccagccgaccuacggggugggcuaccagcccuaccgcguggucgugcugagcuucgagcuccugcacgcccccgccacggugugcggccccaagaaguccaccaaccuggucaagaacaagugcgugaacuucaacuucaacgggcucaccggcaccggggugcugaccgagagcaacaagaaguuccugccguuccagcaguucggccgggacaucgccgacacgaccgacgcgguccgcgacccccagacccucgagauccuggacaucacccccugcagcuucgggggcguguccgugaucacgccgggcaccaacaccagcaaccaggucgccgugcuguaccagggggugaacugcaccgagguccccguggccauccacgccgaccagcugacgcccaccuggcgcguguacuccaccggcagcaacgucuuccagacccgggccgggugccucaucggcgcggagcacgugaacaacuccuacgagugcgacauccccaucggcgccgggaucugcgccagcuaccagacgcagaccaacuccccgcgccgggcccgcagcguggcgucccagagcaucaucgccuacaccaugucccugggcgucgagaacagcguggccuacuccaacaacagcaucgccauccccaccaacuucacgaucuccgugaccaccgagauccugcccgucagcaugaccaagacgagcguggacugcaccauguacaucugcggggacuccaccgagugcagcaaccuccugcugcaguacggcuccuucugcacccagcucaaccgggcccugacggggaucgcgguggagcaggacaagaacacccaggaggucuucgcccaggugaagcagaucuacaagacgcccccgaucaaggacuucggcggcuucaacuucagccagauccugcccgaccccuccaagcccagcaagcgcuccuucaucgaggaccuccuguucaacaaggugacccuggccgacgccggguucaucaagcaguacggcgacugccucggggacaucgccgcgcgggaccugaucugcgcccagaaguucaacggccugaccguccucccgccccugcugaccgacgagaugaucgcccaguacaccagcgcccuccuggccgggaccaucacguccggcuggaccuucggcgcgggggccgcccugcagauccccuucgccaugcagauggcguaccgcuucaacggcaucggggugacccagaacgugcucuacgagaaccagaagcugaucgccaaccaguucaacagcgccaucggcaagauccaggacucccugagcuccaccgccagcgcccucgggaagcugcaggacgucgugaaccagaacgcgcaggcccugaacacgcucgugaagcagcuguccagcaacuucggcgccaucuccagcguccugaacgacauccucucccggcuggacccgcccgaggccgaggugcagaucgaccgccugaucaccggccggcuccagagccugcagaccuacgugacccagcagcugauccgcgccgcggagauccgggccagcgccaaccucgccgccaccaagauguccgagugcguccuggggcagagcaagcgcguggacuucugcggcaagggguaccaccugauguccuucccccagagcgcgccccacggcguggucuuccuccacgugacguacguccccgcccaggagaagaacuucaccaccgccccggccaucugccacgacgggaaggcgcacuucccccgggagggcguguucguguccaacggcacccacugguucgucacgcagcgcaacuucuacgagccccagaucaucaccaccgacaacaccuucgugagcgggaacugcgacguggucaucggcaucgugaacaacacgguguacgacccccugcagccggagcuggacuccuucaaggaggagcucgacaaguacuucaagaaccacaccagccccgacgucgaccugggggacaucuccggcaucaacgccagcguggugaacauccagaaggagaucgaccggcugaacgaggucgccaagaaccucaacgagucccugaucgaccugcaggagcucggcaaguacgagcaguacaucaaguggcccugguacaucuggcugggguucaucgccggccugaucgccaucgugauggugaccaucaugcucugcugcaugaccagcugcugcuccugccugaaggggugcugcagcugcggcuccugcugcaaguucgacgaggacgacagcgagccgguccugaagggggugaagcuccacuacacgugaggacuaguguccaccugucccuccugggcugcuggauugucucguuuuccugccaaauaaacaggaucagcgcuuuacagaucucaaaggcucuuuucagagccaccaaaaaaaaaaaaaaaaaaaaaaaaaaaaaaaaaaaaaaaaaaaaaaaaaaaaaaaaaaaaaaaaaaaaaaaaaaaaaaaaaaaaaaaaaaaaaaaaaaaaa

SEQ ID NO: 23990 - RNA, 4129 nt, Artificial Sequence
  SARS-CoV-2/Wuhan/WIV05/2019__EPI_ISL_402128 spike protein mRNA gc (1-1273)(K986P_V987P_K986P_V987P_E484K_D614G)
aggagacccgugacccggaaguuguacggcuacgcgacuuucccucccacaaacccucgcgcccuuccuuuccuacuugggcccggcagaaagcuuaccauguucguguuccugguccuccugccccuggugagcucccagugcgugaaccucaccacccgcacgcagcugccgcccgccuacaccaacagcuucacccggggcgucuacuaccccgacaagguguuccgcuccagcgugcugcacuccacccaggaccucuuccugcccuucuucagcaacgucacgugguuccacgccauccacguguccgggaccaacggcaccaagcgguucgacaacccggugcugcccuucaacgacggggucuacuucgcgagcaccgagaaguccaacaucauccgcggcuggaucuucgggacgacccucgacagcaagacccagucccugcugaucgugaacaacgccaccaacguggucaucaaggugugcgaguuccaguucugcaacgaccccuuccucggcguguacuaccacaagaacaacaagagcuggauggaguccgaguuccgggucuacagcuccgccaacaacugcacguucgaguacgugagccagcccuuccugauggaccuggagggcaagcaggggaacuucaagaaccuccgcgaguucguguucaagaacaucgacggcuacuucaagaucuacuccaagcacaccccgaucaaccugguccgggaccugccccagggguucagcgcccucgagccccugguggaccugcccaucggcaucaacaucacccgcuuccagacccuccuggcccugcaccgguccuaccucacgccgggggacagcagcuccggcuggaccgcgggcgccgccgccuacuacgugggguaccugcagccccgcaccuuccugcucaaguacaacgagaacggcaccaucacggacgcggucgacugcgcccuggacccccugagcgagaccaagugcacccucaaguccuucaccguggagaaggggaucuaccagacgagcaacuuccgggugcagcccaccgaguccaucguccgcuucccgaacaucaccaaccugugccccuucggcgagguguucaacgccacccgguucgccagcgucuacgccuggaaccgcaagcggaucuccaacugcguggcggacuacagcgugcuguacaacuccgccagcuucuccacguucaagugcuacggcgucagccccaccaagcucaacgaccugugcuucaccaacguguacgccgacuccuucgugauccgcggggacgagguccggcagaucgcccccggccagaccgggaagaucgccgacuacaacuacaagcugccggacgacuucacgggcugcgugaucgcguggaacagcaacaaccucgacuccaaggucgggggcaacuacaacuaccuguaccgccuguuccgcaagagcaaccucaagcccuucgagcgggacaucuccaccgagaucuaccaggccggcagcacccccugcaacggggugaagggcuucaacugcuacuucccccugcaguccuacggguuccagccgaccaacggcgugggguaccagcccuaccggguggucgugcugagcuucgagcuccugcacgcccccgccacggugugcggccccaagaaguccaccaaccuggucaagaacaagugcgugaacuucaacuucaacggccucaccgggaccggcgugcugaccgagagcaacaagaaguuccugccguuccagcaguucgggcgcgacaucgccgacacgaccgacgcgguccgcgacccccagacccuggagauccucgacaucacccccugcagcuucggcgggguguccgugaucacgccgggcaccaacaccagcaaccaggucgccgugcuguaccagggcgugaacugcaccgagguccccguggccauccacgccgaccagcugacgcccaccuggcggguguacuccaccgggagcaacgucuuccagacccgcgccggcugccucaucggggcggagcacgugaacaacuccuacgagugcgacauccccaucggcgccggcaucugcgccagcuaccagacgcagaccaacuccccgcggcgcgcccggagcguggcgucccagagcaucaucgccuacaccaugucccugggggccgagaacagcgucgccuacuccaacaacagcaucgccauccccaccaacuucacgaucuccgugaccaccgagauccugcccgugagcaugaccaagacgagcgucgacugcaccauguacaucugcggcgacuccaccgagugcagcaaccuccugcugcaguacggguccuucugcacccagcucaaccgcgcgcugacgggcaucgccguggagcaggacaagaacacccaggagguguucgcccaggucaagcagaucuacaagacgcccccgaucaaggacuucgggggcuucaacuucagccagauccugcccgaccccuccaagcccagcaagcgguccuucaucgaggaccuccuguucaacaaggugacccuggccgacgccggcuucaucaagcaguacggggacugccucggcgacaucgcggcccgcgaccugaucugcgcccagaaguucaacgggcugaccgugcucccgccccugcugaccgacgagaugaucgcccaguacaccagcgcccuccuggcgggcaccaucacguccggguggaccuucggcgccggcgccgcccugcagauccccuucgcgaugcagauggccuaccgguucaacgggaucggcgucacccagaacgugcucuacgagaaccagaagcugaucgccaaccaguucaacagcgccaucgggaagauccaggacucccugagcuccaccgccagcgcgcucggcaagcugcaggacguggucaaccagaacgcccaggcccugaacacgcucgugaagcagcuguccagcaacuucggggccaucuccagcgugcugaacgacauccucucccgccuggacccgcccgaggccgagguccagaucgaccggcugaucaccggccgccuccagagccugcagaccuacgugacccagcagcugauccgggcggccgagauccgcgccagcgccaaccucgccgcgaccaagauguccgagugcgugcugggccagagcaagcgggucgacuucugcgggaagggcuaccaccugauguccuucccccagagcgcgccccacggggugguguuccuccacgucacguacgugcccgcccaggagaagaacuucaccaccgccccggccaucugccacgacggcaaggcccacuucccccgcgagggggucuucguguccaacggcacccacugguucgugacgcagcggaacuucuacgagccccagaucaucaccaccgacaacaccuucgucagcggcaacugcgacguggugaucgggaucgucaacaacacgguguacgacccccugcagccggagcuggacuccuucaaggaggagcucgacaaguacuucaagaaccacaccagccccgacguggaccugggcgacaucuccgggaucaacgccagcgucgugaacauccagaaggagaucgaccgccugaacgagguggccaagaaccucaacgagucccugaucgaccugcaggagcucggcaaguacgagcaguacaucaaguggcccugguacaucuggcugggcuucaucgccgggcugaucgcgaucgucauggugaccaucaugcucugcugcaugaccagcugcugcuccugccugaagggcugcugcagcugcggguccugcugcaaguucgacgaggacgacagcgagccggugcugaagggcgucaagcuccacuacacgugaggacuaguguccaccugucccuccugggcugcuggauugucucguuuuccugccaaauaaacaggaucagcgcuuuacagaucucaaaggcucuuuucagagccaccaaaaaaaaaaaaaaaaaaaaaaaaaaaaaaaaaaaaaaaaaaaaaaaaaaaaaaaaaaaaaaaaaaaaaaaaaaaaaaaaaaaaaaaaaaaaaaaaaaaaa

SEQ ID NO: 23991 - RNA, 4129 nt, Artificial Sequence
  SARS-CoV-2/Wuhan/WIV05/2019__EPI_ISL_402128 spike protein mRNA gc (1-1273)(K986P_V987P_K986P_V987P_L18F_T20N_P26S_D138Y_R190S_K417T _E484K_N501Y_D614G_H655Y_T1027I)
aggagacccgugacccggaaguuguacggcuacgcgacuuucccucccacaaacccucgcgcccuuccuuuccuacuugggcccggcagaaagcuuaccauguucguguuccugguccuccugccccuggugagcucccagugcgugaacuucaccaaccgcacccagcucccgagcgccuacacgaacuccuucacccggggcgucuacuaccccgacaagguguuccgcagcuccgugcugcacagcacccaggaccuguuccuccccuucuucuccaacgucaccugguuccacgccauccacgugagcgggacgaacggcaccaagcgguucgacaaccccgugcugccguucaacgacggggucuacuucgcguccaccgagaaguccaacaucauccgcggcuggaucuucgggaccacgcuggacuccaagacccagagccuccugaucgugaacaacgccaccaacguggucaucaaggugugcgaguuccaguucugcaacuaccccuuccugggcguguacuaccacaagaacaacaaguccuggauggagagcgaguuccgggucuacuccagcgccaacaacugcaccuucgaguacgugucccagcccuuccucauggaccuggagggcaagcaggggaacuucaagaaccugagcgaguucguguucaagaacaucgacggcuacuucaagaucuacuccaagcacacgcccaucaaccucguccgcgaccugccgcagggguucagcgcccuggagccccucguggaccugcccaucggcaucaacaucacccgguuccagacccugcucgcccugcaccgcagcuaccugacccccggggacuccagcuccggcuggacggcgggcgccgccgccuacuacgugggguaccuccagccgcggaccuuccugcugaaguacaacgagaacggcaccaucaccgacgcggucgacugcgcccucgacccccugagcgagacgaagugcacccugaaguccuucaccguggagaaggggaucuaccagaccagcaacuuccgcgugcagcccacggaguccaucguccgguuccccaacaucaccaaccucugcccguucggcgagguguucaacgccacccgcuucgccagcgucuacgccuggaaccggaagcgcaucuccaacugcguggcggacuacagcgugcuguacaacuccgccagcuucuccaccuucaagugcuacggcgucagccccacgaagcugaacgaccucugcuucaccaacguguacgccgacuccuucgugauccgcggggacgagguccggcagaucgcccccggccagaccgggaccaucgccgacuacaacuacaagcugcccgacgacuucacgggcugcgugaucgcguggaacagcaacaaccuggacuccaaggucgggggcaacuacaacuaccucuaccggcuguuccgcaagagcaaccugaagccguucgagcgggacaucuccaccgagaucuaccaggccggcagcacccccugcaacggggugaagggcuucaacugcuacuucccccuccagagcuacggguuccagcccaccuacggcgugggguaccagccguaccgcguggucgugcuguccuucgagcugcuccacgcccccgccacggugugcggccccaagaaguccaccaaccuggucaagaacaagugcgugaacuucaacuucaacggccugaccgggaccggcgugcucaccgagagcaacaagaaguuccugcccuuccagcaguucgggcgggacaucgccgacacgaccgacgcgguccgcgacccgcagacccuggagauccuggacaucacccccugcagcuucggcgggguguccgugaucacgcccggcaccaacaccagcaaccaggucgccgugcucuaccagggcgugaacugcaccgaggucccgguggccauccacgccgaccagcugacgcccaccuggcgcguguacuccaccgggagcaacgucuuccagacccgggccggcugccugaucggggcggaguacgugaacaacuccuacgagugcgacauccccaucggcgccggcaucugcgccagcuaccagacgcagaccaacagcccccgccgggcccgcagcguggcgucccagagcaucaucgccuacaccaugucccucggggccgagaacagcgucgccuacuccaacaacagcaucgccaucccgaccaacuucacgaucagcgugaccaccgagauccugcccguguccaugaccaagacgagcgucgacugcaccauguacaucugcggcgacuccaccgagugcagcaaccugcuccugcaguacggguccuucugcacccagcugaaccgggcgcucacgggcaucgccguggagcaggacaagaacacccaggagguguucgcccaggucaagcagaucuacaagaccccgcccaucaaggacuucgggggcuucaacuucagccagauccugcccgaccccuccaagcccagcaagcgcuccuucaucgaggaccuccuguucaacaaggugacccuggccgacgccggcuucaucaagcaguacggggacugccugggcgacaucgcggcccgggaccucaucugcgcccagaaguucaacgggcugacggugcugcccccgcuccugaccgacgagaugaucgcccaguacaccagcgcccugcucgcgggcaccaucacguccggguggaccuucggcgccggcgccgcccugcagauccccuucgcgaugcagauggccuaccgcuucaacgggaucggcgucacccagaacgugcuguacgagaaccagaagcucaucgccaaccaguucaacagcgccaucgggaagauccaggacucccugagcuccaccgccagcgcgcugggcaagcuccaggacguggucaaccagaacgcccaggcccugaacacgcuggugaagcagcucuccagcaacuucggggccaucuccagcgugcugaacgacauccugagccggcucgacccgcccgaggccgagguccagaucgaccgccugaucaccggccggcugcagucccuccagaccuacgugacccagcagcugauccgcgcggccgagauccgggccagcgccaaccuggccgcgaucaagauguccgagugcgugcucggccagagcaagcgcgucgacuucugcgggaagggcuaccaccugauguccuucccccagagcgcgccccacggggugguguuccugcacgucaccuacgugcccgcccaggagaagaacuucacgaccgcccccgccaucugccacgacggcaaggcccacuucccgcgggagggggucuucguguccaacggcacccacugguucgugacccagcgcaacuucuacgagccccagaucaucacgaccgacaacaccuucgucagcggcaacugcgacguggugaucgggaucgucaacaacaccguguacgacccccuccagcccgagcuggacuccuucaaggaggagcuggacaaguacuucaagaaccacacgagcccggacguggaccucggcgacaucuccgggaucaacgccagcgucgugaacauccagaaggagaucgaccggcugaacgagguggccaagaaccugaacgagucccucaucgaccugcaggagcugggcaaguacgagcaguacaucaaguggcccugguacaucuggcucggcuucaucgccgggcugaucgcgaucgucauggugaccaucaugcugugcugcaugaccagcugcugcuccugccucaagggcugcugcagcugcggguccugcugcaaguucgacgaggacgacagcgagcccgugcugaagggcgucaagcugcacuacaccugaggacuaguguccaccugucccuccugggcugcuggauugucucguuuuccugccaaauaaacaggaucagcgcuuuacagaucucaaaggcucuuuucagagccaccaaaaaaaaaaaaaaaaaaaaaaaaaaaaaaaaaaaaaaaaaaaaaaaaaaaaaaaaaaaaaaaaaaaaaaaaaaaaaaaaaaaaaaaaaaaaaaaaaaaaa

SEQ ID NO: 23992 - RNA, 4129 nt, Artificial Sequence
  SARS-CoV-2/Wuhan/WIV05/2019__EPI_ISL_402128 spike protein mRNA gc (1-1273)(K986P_V987P_K986P_V987P_S13I_W152C_L452R_D614G)
aggagacccgugacccggaaguuguacggcuacgcgacuuucccucccacaaacccucgcgcccuuccuuuccuacuugggcccggcagaaagcuuaccauguucguguuccugguccuccugccccuggugagcauccagugcgugaaccucaccacccgcacgcagcugccgcccgccuacaccaacuccuucacccggggcgucuacuaccccgacaagguguuccgcagcuccgugcugcacagcacccaggaccucuuccugcccuucuucuccaacgucacgugguuccacgccauccacgugagcgggaccaacggcaccaagcgguucgacaacccggugcugcccuucaacgacggggucuacuucgcguccaccgagaaguccaacaucauccgcggcuggaucuucgggacgacccucgacagcaagacccagagccugcugaucgugaacaacgccaccaacguggucaucaaggugugcgaguuccaguucugcaacgaccccuuccucggcguguacuaccacaagaacaacaaguccugcauggagagcgaguuccgggucuacuccagcgccaacaacugcacguucgaguacgugucccagcccuuccugauggaccuggagggcaagcaggggaacuucaagaaccuccgcgaguucguguucaagaacaucgacggcuacuucaagaucuacagcaagcacaccccgaucaaccugguccgggaccugccccagggguucuccgcccucgagccccugguggaccugcccaucggcaucaacaucacccgcuuccagacccuccuggcccugcaccggagcuaccucacgccgggggacuccagcagcggcuggaccgcgggcgccgccgccuacuacgugggguaccugcagccccgcaccuuccugcucaaguacaacgagaacggcaccaucacggacgcggucgacugcgcccuggacccccuguccgagaccaagugcacccucaagagcuucaccguggagaaggggaucuaccagacguccaacuuccgggugcagcccaccgagagcaucguccgcuucccgaacaucaccaaccugugccccuucggcgagguguucaacgccacccgguucgccuccgucuacgccuggaaccgcaagcggaucagcaacugcguggcggacuacuccgugcuguacaacagcgccuccuucagcacguucaagugcuacggcgucucccccaccaagcucaacgaccugugcuucaccaacguguacgccgacagcuucgugauccgcggggacgagguccggcagaucgcccccggccagaccgggaagaucgccgacuacaacuacaagcugccggacgacuucacgggcugcgugaucgcguggaacuccaacaaccucgacagcaaggucgggggcaacuacaacuaccgcuaccggcuguuccgcaaguccaaccugaagcccuucgagcgggacaucagcaccgagaucuaccaggccggcuccacccccugcaacgggguggagggcuucaacugcuacuucccccuccagagcuacggguuccagccgaccaacggcgugggguaccagcccuaccgcguggucgugcuguccuucgagcugcuccacgcccccgccacggugugcggccccaagaaguccaccaaccuggucaagaacaagugcgugaacuucaacuucaacggccugaccgggaccggcgugcucaccgagagcaacaagaaguuccugccguuccagcaguucgggcgcgacaucgccgacacgaccgacgcgguccgggacccccagacccuggagauccuggacaucacccccugcagcuucggcggggugagcgugaucacgccgggcaccaacaccuccaaccaggucgccgugcucuaccagggcgugaacugcaccgagguccccguggccauccacgccgaccagcugacgcccaccuggcgcguguacagcaccggguccaacgucuuccagacccgggccggcugccugaucggggcggagcacgugaacaacagcuacgagugcgacauccccaucggcgccggcaucugcgccuccuaccagacgcagaccaacagcccgcgccgggcccgcuccguggcgagccaguccaucaucgccuacaccaugagccucggggccgagaacuccgucgccuacagcaacaacuccaucgccauccccaccaacuucacgaucagcgugaccaccgagauccugcccguguccaugaccaagacgagcgucgacugcaccauguacaucugcggcgacagcaccgagugcuccaaccugcuccugcaguacgggagcuucugcacccagcugaaccgggcgcucacgggcaucgccguggagcaggacaagaacacccaggagguguucgcccaggucaagcagaucuacaagacgcccccgaucaaggacuucgggggcuucaacuucucccagauccugcccgaccccagcaagcccuccaagcgcagcuucaucgaggaccuccuguucaacaaggugacccuggccgacgccggcuucaucaagcaguacggggacugccugggcgacaucgcggcccgggaccucaucugcgcccagaaguucaacgggcugaccgugcugccgccccuccugaccgacgagaugaucgcccaguacaccuccgcccugcucgcgggcaccaucacgagcggguggaccuucggcgccggcgccgcccugcagauccccuucgcgaugcagauggccuaccgcuucaacgggaucggcgucacccagaacgugcuguacgagaaccagaagcucaucgccaaccaguucaacuccgccaucgggaagauccaggacagccuguccagcaccgccuccgcgcugggcaagcuccaggacguggucaaccagaacgcccaggcccugaacacgcuggugaagcagcucagcuccaacuucggggccaucagcuccgugcugaacgacauccugagccggcucgacccgcccgaggccgagguccagaucgaccgccugaucaccggccggcugcagucccuccagaccuacgugacccagcagcugauccgcgcggccgagauccgggccagcgccaaccuggccgcgaccaagaugagcgagugcgugcucggccaguccaagcgcgucgacuucugcgggaagggcuaccaccugaugagcuucccccaguccgcgccccacggggugguguuccugcacgucacguacgugcccgcccaggagaagaacuucaccaccgccccggccaucugccacgacggcaaggcccacuucccccgggagggggucuucgugagcaacggcacccacugguucgugacgcagcgcaacuucuacgagccccagaucaucaccaccgacaacaccuucgucuccggcaacugcgacguggugaucgggaucgucaacaacacgguguacgacccccuccagccggagcuggacagcuucaaggaggagcuggacaaguacuucaagaaccacaccucccccgacguggaccucggcgacaucagcgggaucaacgccuccgucgugaacauccagaaggagaucgaccggcugaacgagguggccaagaaccugaacgagagccucaucgaccugcaggagcugggcaaguacgagcaguacaucaaguggcccugguacaucuggcucggcuucaucgccgggcugaucgcgaucgucauggugaccaucaugcugugcugcaugaccuccugcugcagcugccucaagggcugcugcuccugcgggagcugcugcaaguucgacgaggacgacuccgagccggugcugaagggcgucaagcugcacuacacgugaggacuaguguccaccugucccuccugggcugcuggauugucucguuuuccugccaaauaaacaggaucagcgcuuuacagaucucaaaggcucuuuucagagccaccaaaaaaaaaaaaaaaaaaaaaaaaaaaaaaaaaaaaaaaaaaaaaaaaaaaaaaaaaaaaaaaaaaaaaaaaaaaaaaaaaaaaaaaaaaaaaaaaaaaaa

SEQ ID NO: 23993 - RNA, 4129 nt, Artificial Sequence
  SARS-CoV-2/Wuhan/WIV05/2019__EPI_ISL_402128 spike protein mRNA gc (1-1273)(K986P_V987P)
aggagacccgugacccggaaguuguacggcuacgcgacuuucccucccacaaacccucgcgcccuuccuuuccuacuugggcccggcagaaagcuuaccauguucguguuccuggugcugcugccccuggugagcagccagugcgugaaccugaccacccggacccagcugccaccagccuacaccaacagcuucacccggggcgucuacuaccccgacaagguguuccggagcagcguccugcacagcacccaggaccuguuccugcccuucuucagcaacgugaccugguuccacgccauccacgugagcggcaccaacggcaccaagcgguucgacaaccccgugcugcccuucaacgacggcguguacuucgccagcaccgagaagagcaacaucauccggggcuggaucuucggcaccacccuggacagcaagacccagagccugcugaucgugaauaacgccaccaacguggugaucaaggugugcgaguuccaguucugcaacgaccccuuccugggcguguacuaccacaagaacaacaagagcuggauggagagcgaguuccggguguacagcagcgccaacaacugcaccuucgaguacgugagccagcccuuccugauggaccuggagggcaagcagggcaacuucaagaaccugcgggaguucguguucaagaacaucgacggcuacuucaagaucuacagcaagcacaccccaaucaaccuggugcgggaucugccccagggcuucucagcccuggagccccugguggaccugcccaucggcaucaacaucacccgguuccagacccugcuggcccugcaccggagcuaccugaccccaggcgacagcagcagcggguggacagcaggcgcggcugcuuacuacgugggcuaccugcagccccggaccuuccugcugaaguacaacgagaacggcaccaucaccgacgccguggacugcgcccuggacccucugagcgagaccaagugcacccugaagagcuucaccguggagaagggcaucuaccagaccagcaacuuccgggugcagcccaccgagagcaucgugcgguuccccaacaucaccaaccugugccccuucggcgagguguucaacgccacccgguucgccagcguguacgccuggaaccggaagcggaucagcaacugcguggccgacuacagcgugcuguacaacagcgccagcuucagcaccuucaagugcuacggcgugagccccaccaagcugaacgaccugugcuucaccaacguguacgccgacagcuucgugauccguggcgacgaggugcggcagaucgcacccggccagacaggcaagaucgccgacuacaacuacaagcugcccgacgacuucaccggcugcgugaucgccuggaacagcaacaaccucgacagcaaggugggcggcaacuacaacuaccuguaccggcuguuccggaagagcaaccugaagcccuucgagcgggacaucagcaccgagaucuaccaagccggcuccaccccuugcaacggcguggagggcuucaacugcuacuucccucugcagagcuacggcuuccagcccaccaacggcgugggcuaccagcccuaccgggugguggugcugagcuucgagcugcugcacgccccagccaccguguguggccccaagaagagcaccaaccuggugaagaacaagugcgugaacuucaacuucaacggccuuaccggcaccggcgugcugaccgagagcaacaagaaauuccugcccuuucagcaguucggccgggacaucgccgacaccaccgacgcugugcgggauccccagacccuggagauccuggacaucaccccuugcagcuucggcggcgugagcgugaucaccccaggcaccaacaccagcaaccagguggccgugcuguaccaggacgugaacugcaccgaggugcccguggccauccacgccgaccagcugacacccaccuggcgggucuacagcaccggcagcaacguguuccagacccgggccgguugccugaucggcgccgagcacgugaacaacagcuacgagugcgacauccccaucggcgccggcaucugugccagcuaccagacccagaccaauucaccccggagggcaaggagcguggccagccagagcaucaucgccuacaccaugagccugggcgccgagaacagcguggccuacagcaacaacagcaucgccauccccaccaacuucaccaucagcgugaccaccgagauucugcccgugagcaugaccaagaccagcguggacugcaccauguacaucugcggcgacagcaccgagugcagcaaccugcugcugcaguacggcagcuucugcacccagcugaaccgggcccugaccggcaucgccguggagcaggacaagaacacccaggagguguucgcccaggugaagcagaucuacaagaccccucccaucaaggacuucggcggcuucaacuucagccagauccugcccgaccccagcaagcccagcaagcggagcuucaucgaggaccugcuguucaacaaggugacccuagccgacgccggcuucaucaagcaguacggcgacugccucggcgacauagccgcccgggaccugaucugcgcccagaaguucaacggccugaccgugcugccuccccugcugaccgacgagaugaucgcccaguacaccagcgcccuguuagccggaaccaucaccagcggcuggacuuucggcgcuggagccgcucugcagauccccuucgccaugcagauggccuaccgguucaacggcaucggcgugacccagaacgugcuguacgagaaccagaagcugaucgccaaccaguucaacagcgccaucggcaagauccaggacagccugagcagcaccgcuagcgcccugggcaagcugcaggacguggugaaccagaacgcccaggcccugaacacccuggugaagcagcugagcagcaacuucggcgccaucagcagcgugcugaacgacauccugagccggcuggacccucccgaggccgaggugcagaucgaccggcugaucacuggccggcugcagagccugcagaccuacgugacccagcagcugauccgggccgccgagauucgggccagcgccaaccuggccgccaccaagaugagcgagugcgugcugggccagagcaagcggguggacuucugcggcaagggcuaccaccugaugagcuuuccccagagcgcaccccacggagugguguuccugcacgugaccuacgugcccgcccaggagaagaacuucaccaccgccccagccaucugccacgacggcaaggcccacuuuccccgggagggcguguucgugagcaacggcacccacugguucgugacccagcggaacuucuacgagccccagaucaucaccaccgacaacaccuucgugagcggcaacugcgacguggugaucggcaucgugaacaacaccguguacgauccccugcagcccgagcuggacagcuucaaggaggagcuggacaaguacuucaagaaucacaccagccccgacguggaccugggcgacaucagcggcaucaacgccagcguggugaacauccagaaggagaucgaucggcugaacgagguggccaagaaccugaacgagagccugaucgaccugcaggagcugggcaaguacgagcaguacaucaaguggcccugguacaucuggcugggcuucaucgccggccugaucgccaucgugauggugaccaucaugcugugcugcaugaccagcugcugcagcugccugaagggcuguugcagcugcggcagcugcugcaaguucgacgaggacgacagcgagcccgugcugaagggcgugaagcugcacuacaccugaggacuaguguccaccugucccuccugggcugcuggauugucucguuuuccugccaaauaaacaggaucagcgcuuuacagaucucaaaggcucuuuucagagccaccaaaaaaaaaaaaaaaaaaaaaaaaaaaaaaaaaaaaaaaaaaaaaaaaaaaaaaaaaaaaaaaaaaaaaaaaaaaaaaaaaaaaaaaaaaaaaaaaaaaaa

SEQ ID NO: 23994 - RNA, 4129 nt, Artificial Sequence
  SARS-CoV-2/Wuhan/WIV05/2019__EPI_ISL_402128 spike protein mRNA gc (1-1273)(K986P_V987P_ D614G)
aggagacccgugacccggaaguuguacggcuacgcgacuuucccucccacaaacccucgcgcccuuccuuuccuacuugggcccggcagaaagcuuaccauguucguguuccuggugcugcugccccuggugagcagccagugcgugaaccugaccacccggacccagcugccaccagccuacaccaacagcuucacccggggcgucuacuaccccgacaagguguuccggagcagcguccugcacagcacccaggaccuguuccugcccuucuucagcaacgugaccugguuccacgccauccacgugagcggcaccaacggcaccaagcgguucgacaaccccgugcugcccuucaacgacggcguguacuucgccagcaccgagaagagcaacaucauccggggcuggaucuucggcaccacccuggacagcaagacccagagccugcugaucgugaauaacgccaccaacguggugaucaaggugugcgaguuccaguucugcaacgaccccuuccugggcguguacuaccacaagaacaacaagagcuggauggagagcgaguuccggguguacagcagcgccaacaacugcaccuucgaguacgugagccagcccuuccugauggaccuggagggcaagcagggcaacuucaagaaccugcgggaguucguguucaagaacaucgacggcuacuucaagaucuacagcaagcacaccccaaucaaccuggugcgggaucugccccagggcuucucagcccuggagccccugguggaccugcccaucggcaucaacaucacccgguuccagacccugcuggcccugcaccggagcuaccugaccccaggcgacagcagcagcggguggacagcaggcgcggcugcuuacuacgugggcuaccugcagccccggaccuuccugcugaaguacaacgagaacggcaccaucaccgacgccguggacugcgcccuggacccucugagcgagaccaagugcacccugaagagcuucaccguggagaagggcaucuaccagaccagcaacuuccgggugcagcccaccgagagcaucgugcgguuccccaacaucaccaaccugugccccuucggcgagguguucaacgccacccgguucgccagcguguacgccuggaaccggaagcggaucagcaacugcguggccgacuacagcgugcuguacaacagcgccagcuucagcaccuucaagugcuacggcgugagccccaccaagcugaacgaccugugcuucaccaacguguacgccgacagcuucgugauccguggcgacgaggugcggcagaucgcacccggccagacaggcaagaucgccgacuacaacuacaagcugcccgacgacuucaccggcugcgugaucgccuggaacagcaacaaccucgacagcaaggugggcggcaacuacaacuaccuguaccggcuguuccggaagagcaaccugaagcccuucgagcgggacaucagcaccgagaucuaccaagccggcuccaccccuugcaacggcguggagggcuucaacugcuacuucccucugcagagcuacggcuuccagcccaccaacggcgugggcuaccagcccuaccgggugguggugcugagcuucgagcugcugcacgccccagccaccguguguggccccaagaagagcaccaaccuggugaagaacaagugcgugaacuucaacuucaacggccuuaccggcaccggcgugcugaccgagagcaacaagaaauuccugcccuuucagcaguucggccgggacaucgccgacaccaccgacgcugugcgggauccccagacccuggagauccuggacaucaccccuugcagcuucggcggcgugagcgugaucaccccaggcaccaacaccagcaaccagguggccgugcuguaccagggcgugaacugcaccgaggugcccguggccauccacgccgaccagcugacacccaccuggcgggucuacagcaccggcagcaacguguuccagacccgggccgguugccugaucggcgccgagcacgugaacaacagcuacgagugcgacauccccaucggcgccggcaucugugccagcuaccagacccagaccaauucaccccggagggcaaggagcguggccagccagagcaucaucgccuacaccaugagccugggcgccgagaacagcguggccuacagcaacaacagcaucgccauccccaccaacuucaccaucagcgugaccaccgagauucugcccgugagcaugaccaagaccagcguggacugcaccauguacaucugcggcgacagcaccgagugcagcaaccugcugcugcaguacggcagcuucugcacccagcugaaccgggcccugaccggcaucgccguggagcaggacaagaacacccaggagguguucgcccaggugaagcagaucuacaagaccccucccaucaaggacuucggcggcuucaacuucagccagauccugcccgaccccagcaagcccagcaagcggagcuucaucgaggaccugcuguucaacaaggugacccuagccgacgccggcuucaucaagcaguacggcgacugccucggcgacauagccgcccgggaccugaucugcgcccagaaguucaacggccugaccgugcugccuccccugcugaccgacgagaugaucgcccaguacaccagcgcccuguuagccggaaccaucaccagcggcuggacuuucggcgcuggagccgcucugcagauccccuucgccaugcagauggccuaccgguucaacggcaucggcgugacccagaacgugcuguacgagaaccagaagcugaucgccaaccaguucaacagcgccaucggcaagauccaggacagccugagcagcaccgcuagcgcccugggcaagcugcaggacguggugaaccagaacgcccaggcccugaacacccuggugaagcagcugagcagcaacuucggcgccaucagcagcgugcugaacgacauccugagccggcuggacccucccgaggccgaggugcagaucgaccggcugaucacuggccggcugcagagccugcagaccuacgugacccagcagcugauccgggccgccgagauucgggccagcgccaaccuggccgccaccaagaugagcgagugcgugcugggccagagcaagcggguggacuucugcggcaagggcuaccaccugaugagcuuuccccagagcgcaccccacggagugguguuccugcacgugaccuacgugcccgcccaggagaagaacuucaccaccgccccagccaucugccacgacggcaaggcccacuuuccccgggagggcguguucgugagcaacggcacccacugguucgugacccagcggaacuucuacgagccccagaucaucaccaccgacaacaccuucgugagcggcaacugcgacguggugaucggcaucgugaacaacaccguguacgauccccugcagcccgagcuggacagcuucaaggaggagcuggacaaguacuucaagaaucacaccagccccgacguggaccugggcgacaucagcggcaucaacgccagcguggugaacauccagaaggagaucgaucggcugaacgagguggccaagaaccugaacgagagccugaucgaccugcaggagcugggcaaguacgagcaguacaucaaguggcccugguacaucuggcugggcuucaucgccggccugaucgccaucgugauggugaccaucaugcugugcugcaugaccagcugcugcagcugccugaagggcuguugcagcugcggcagcugcugcaaguucgacgaggacgacagcgagcccgugcugaagggcgugaagcugcacuacaccugaggacuaguguccaccugucccuccugggcugcuggauugucucguuuuccugccaaauaaacaggaucagcgcuuuacagaucucaaaggcucuuuucagagccaccaaaaaaaaaaaaaaaaaaaaaaaaaaaaaaaaaaaaaaaaaaaaaaaaaaaaaaaaaaaaaaaaaaaaaaaaaaaaaaaaaaaaaaaaaaaaaaaaaaaaa

SEQ ID NO: 23995 - RNA, 4129 nt, Artificial Sequence
  SARS-CoV-2/Wuhan/WIV05/2019__EPI_ISL_402128 spike protein mRNA gc (1-1273)(K986P_V987P_A222V_D614G)
aggagacccgugacccggaaguuguacggcuacgcgacuuucccucccacaaacccucgcgcccuuccuuuccuacuugggcccggcagaaagcuuaccauguucguguuccuggugcugcugccccuggugagcagccagugcgugaaccugaccacccggacccagcugccaccagccuacaccaacagcuucacccggggcgucuacuaccccgacaagguguuccggagcagcguccugcacagcacccaggaccuguuccugcccuucuucagcaacgugaccugguuccacgccauccacgugagcggcaccaacggcaccaagcgguucgacaaccccgugcugcccuucaacgacggcguguacuucgccagcaccgagaagagcaacaucauccggggcuggaucuucggcaccacccuggacagcaagacccagagccugcugaucgugaauaacgccaccaacguggugaucaaggugugcgaguuccaguucugcaacgaccccuuccugggcguguacuaccacaagaacaacaagagcuggauggagagcgaguuccggguguacagcagcgccaacaacugcaccuucgaguacgugagccagcccuuccugauggaccuggagggcaagcagggcaacuucaagaaccugcgggaguucguguucaagaacaucgacggcuacuucaagaucuacagcaagcacaccccaaucaaccuggugcgggaucugccccagggcuucucagugcuggagccccugguggaccugcccaucggcaucaacaucacccgguuccagacccugcuggcccugcaccggagcuaccugaccccaggcgacagcagcagcggguggacagcaggcgcggcugcuuacuacgugggcuaccugcagccccggaccuuccugcugaaguacaacgagaacggcaccaucaccgacgccguggacugcgcccuggacccucugagcgagaccaagugcacccugaagagcuucaccguggagaagggcaucuaccagaccagcaacuuccgggugcagcccaccgagagcaucgugcgguuccccaacaucaccaaccugugccccuucggcgagguguucaacgccacccgguucgccagcguguacgccuggaaccggaagcggaucagcaacugcguggccgacuacagcgugcuguacaacagcgccagcuucagcaccuucaagugcuacggcgugagccccaccaagcugaacgaccugugcuucaccaacguguacgccgacagcuucgugauccguggcgacgaggugcggcagaucgcacccggccagacaggcaagaucgccgacuacaacuacaagcugcccgacgacuucaccggcugcgugaucgccuggaacagcaacaaccucgacagcaaggugggcggcaacuacaacuaccuguaccggcuguuccggaagagcaaccugaagcccuucgagcgggacaucagcaccgagaucuaccaagccggcuccaccccuugcaacggcguggagggcuucaacugcuacuucccucugcagagcuacggcuuccagcccaccaacggcgugggcuaccagcccuaccgggugguggugcugagcuucgagcugcugcacgccccagccaccguguguggccccaagaagagcaccaaccuggugaagaacaagugcgugaacuucaacuucaacggccuuaccggcaccggcgugcugaccgagagcaacaagaaauuccugcccuuucagcaguucggccgggacaucgccgacaccaccgacgcugugcgggauccccagacccuggagauccuggacaucaccccuugcagcuucggcggcgugagcgugaucaccccaggcaccaacaccagcaaccagguggccgugcuguaccagggcgugaacugcaccgaggugcccguggccauccacgccgaccagcugacacccaccuggcgggucuacagcaccggcagcaacguguuccagacccgggccgguugccugaucggcgccgagcacgugaacaacagcuacgagugcgacauccccaucggcgccggcaucugugccagcuaccagacccagaccaauucaccccggagggcaaggagcguggccagccagagcaucaucgccuacaccaugagccugggcgccgagaacagcguggccuacagcaacaacagcaucgccauccccaccaacuucaccaucagcgugaccaccgagauucugcccgugagcaugaccaagaccagcguggacugcaccauguacaucugcggcgacagcaccgagugcagcaaccugcugcugcaguacggcagcuucugcacccagcugaaccgggcccugaccggcaucgccguggagcaggacaagaacacccaggagguguucgcccaggugaagcagaucuacaagaccccucccaucaaggacuucggcggcuucaacuucagccagauccugcccgaccccagcaagcccagcaagcggagcuucaucgaggaccugcuguucaacaaggugacccuagccgacgccggcuucaucaagcaguacggcgacugccucggcgacauagccgcccgggaccugaucugcgcccagaaguucaacggccugaccgugcugccuccccugcugaccgacgagaugaucgcccaguacaccagcgcccuguuagccggaaccaucaccagcggcuggacuuucggcgcuggagccgcucugcagauccccuucgccaugcagauggccuaccgguucaacggcaucggcgugacccagaacgugcuguacgagaaccagaagcugaucgccaaccaguucaacagcgccaucggcaagauccaggacagccugagcagcaccgcuagcgcccugggcaagcugcaggacguggugaaccagaacgcccaggcccugaacacccuggugaagcagcugagcagcaacuucggcgccaucagcagcgugcugaacgacauccugagccggcuggacccucccgaggccgaggugcagaucgaccggcugaucacuggccggcugcagagccugcagaccuacgugacccagcagcugauccgggccgccgagauucgggccagcgccaaccuggccgccaccaagaugagcgagugcgugcugggccagagcaagcggguggacuucugcggcaagggcuaccaccugaugagcuuuccccagagcgcaccccacggagugguguuccugcacgugaccuacgugcccgcccaggagaagaacuucaccaccgccccagccaucugccacgacggcaaggcccacuuuccccgggagggcguguucgugagcaacggcacccacugguucgugacccagcggaacuucuacgagccccagaucaucaccaccgacaacaccuucgugagcggcaacugcgacguggugaucggcaucgugaacaacaccguguacgauccccugcagcccgagcuggacagcuucaaggaggagcuggacaaguacuucaagaaucacaccagccccgacguggaccugggcgacaucagcggcaucaacgccagcguggugaacauccagaaggagaucgaucggcugaacgagguggccaagaaccugaacgagagccugaucgaccugcaggagcugggcaaguacgagcaguacaucaaguggcccugguacaucuggcugggcuucaucgccggccugaucgccaucgugauggugaccaucaugcugugcugcaugaccagcugcugcagcugccugaagggcuguugcagcugcggcagcugcugcaaguucgacgaggacgacagcgagcccgugcugaagggcgugaagcugcacuacaccugaggacuaguguccaccugucccuccugggcugcuggauugucucguuuuccugccaaauaaacaggaucagcgcuuuacagaucucaaaggcucuuuucagagccaccaaaaaaaaaaaaaaaaaaaaaaaaaaaaaaaaaaaaaaaaaaaaaaaaaaaaaaaaaaaaaaaaaaaaaaaaaaaaaaaaaaaaaaaaaaaaaaaaaaaaa

SEQ ID NO: 23996 - RNA, 4129 nt, Artificial Sequence
  SARS-CoV-2/Wuhan/WIV05/2019__EPI_ISL_402128 spike protein mRNA gc (1-1273)(K986P_V987P_N439K_D614G)
aggagacccgugacccggaaguuguacggcuacgcgacuuucccucccacaaacccucgcgcccuuccuuuccuacuugggcccggcagaaagcuuaccauguucguguuccuggugcugcugccccuggugagcagccagugcgugaaccugaccacccggacccagcugccaccagccuacaccaacagcuucacccggggcgucuacuaccccgacaagguguuccggagcagcguccugcacagcacccaggaccuguuccugcccuucuucagcaacgugaccugguuccacgccauccacgugagcggcaccaacggcaccaagcgguucgacaaccccgugcugcccuucaacgacggcguguacuucgccagcaccgagaagagcaacaucauccggggcuggaucuucggcaccacccuggacagcaagacccagagccugcugaucgugaauaacgccaccaacguggugaucaaggugugcgaguuccaguucugcaacgaccccuuccugggcguguacuaccacaagaacaacaagagcuggauggagagcgaguuccggguguacagcagcgccaacaacugcaccuucgaguacgugagccagcccuuccugauggaccuggagggcaagcagggcaacuucaagaaccugcgggaguucguguucaagaacaucgacggcuacuucaagaucuacagcaagcacaccccaaucaaccuggugcgggaucugccccagggcuucucagcccuggagccccugguggaccugcccaucggcaucaacaucacccgguuccagacccugcuggcccugcaccggagcuaccugaccccaggcgacagcagcagcggguggacagcaggcgcggcugcuuacuacgugggcuaccugcagccccggaccuuccugcugaaguacaacgagaacggcaccaucaccgacgccguggacugcgcccuggacccucugagcgagaccaagugcacccugaagagcuucaccguggagaagggcaucuaccagaccagcaacuuccgggugcagcccaccgagagcaucgugcgguuccccaacaucaccaaccugugccccuucggcgagguguucaacgccacccgguucgccagcguguacgccuggaaccggaagcggaucagcaacugcguggccgacuacagcgugcuguacaacagcgccagcuucagcaccuucaagugcuacggcgugagccccaccaagcugaacgaccugugcuucaccaacguguacgccgacagcuucgugauccguggcgacgaggugcggcagaucgcacccggccagacaggcaagaucgccgacuacaacuacaagcugcccgacgacuucaccggcugcgugaucgccuggaacagcaagaaccucgacagcaaggugggcggcaacuacaacuaccuguaccggcuguuccggaagagcaaccugaagcccuucgagcgggacaucagcaccgagaucuaccaagccggcuccaccccuugcaacggcguggagggcuucaacugcuacuucccucugcagagcuacggcuuccagcccaccaacggcgugggcuaccagcccuaccgggugguggugcugagcuucgagcugcugcacgccccagccaccguguguggccccaagaagagcaccaaccuggugaagaacaagugcgugaacuucaacuucaacggccuuaccggcaccggcgugcugaccgagagcaacaagaaauuccugcccuuucagcaguucggccgggacaucgccgacaccaccgacgcugugcgggauccccagacccuggagauccuggacaucaccccuugcagcuucggcggcgugagcgugaucaccccaggcaccaacaccagcaaccagguggccgugcuguaccagggcgugaacugcaccgaggugcccguggccauccacgccgaccagcugacacccaccuggcgggucuacagcaccggcagcaacguguuccagacccgggccgguugccugaucggcgccgagcacgugaacaacagcuacgagugcgacauccccaucggcgccggcaucugugccagcuaccagacccagaccaauucaccccggagggcaaggagcguggccagccagagcaucaucgccuacaccaugagccugggcgccgagaacagcguggccuacagcaacaacagcaucgccauccccaccaacuucaccaucagcgugaccaccgagauucugcccgugagcaugaccaagaccagcguggacugcaccauguacaucugcggcgacagcaccgagugcagcaaccugcugcugcaguacggcagcuucugcacccagcugaaccgggcccugaccggcaucgccguggagcaggacaagaacacccaggagguguucgcccaggugaagcagaucuacaagaccccucccaucaaggacuucggcggcuucaacuucagccagauccugcccgaccccagcaagcccagcaagcggagcuucaucgaggaccugcuguucaacaaggugacccuagccgacgccggcuucaucaagcaguacggcgacugccucggcgacauagccgcccgggaccugaucugcgcccagaaguucaacggccugaccgugcugccuccccugcugaccgacgagaugaucgcccaguacaccagcgcccuguuagccggaaccaucaccagcggcuggacuuucggcgcuggagccgcucugcagauccccuucgccaugcagauggccuaccgguucaacggcaucggcgugacccagaacgugcuguacgagaaccagaagcugaucgccaaccaguucaacagcgccaucggcaagauccaggacagccugagcagcaccgcuagcgcccugggcaagcugcaggacguggugaaccagaacgcccaggcccugaacacccuggugaagcagcugagcagcaacuucggcgccaucagcagcgugcugaacgacauccugagccggcuggacccucccgaggccgaggugcagaucgaccggcugaucacuggccggcugcagagccugcagaccuacgugacccagcagcugauccgggccgccgagauucgggccagcgccaaccuggccgccaccaagaugagcgagugcgugcugggccagagcaagcggguggacuucugcggcaagggcuaccaccugaugagcuuuccccagagcgcaccccacggagugguguuccugcacgugaccuacgugcccgcccaggagaagaacuucaccaccgccccagccaucugccacgacggcaaggcccacuuuccccgggagggcguguucgugagcaacggcacccacugguucgugacccagcggaacuucuacgagccccagaucaucaccaccgacaacaccuucgugagcggcaacugcgacguggugaucggcaucgugaacaacaccguguacgauccccugcagcccgagcuggacagcuucaaggaggagcuggacaaguacuucaagaaucacaccagccccgacguggaccugggcgacaucagcggcaucaacgccagcguggugaacauccagaaggagaucgaucggcugaacgagguggccaagaaccugaacgagagccugaucgaccugcaggagcugggcaaguacgagcaguacaucaaguggcccugguacaucuggcugggcuucaucgccggccugaucgccaucgugauggugaccaucaugcugugcugcaugaccagcugcugcagcugccugaagggcuguugcagcugcggcagcugcugcaaguucgacgaggacgacagcgagcccgugcugaagggcgugaagcugcacuacaccugaggacuaguguccaccugucccuccugggcugcuggauugucucguuuuccugccaaauaaacaggaucagcgcuuuacagaucucaaaggcucuuuucagagccaccaaaaaaaaaaaaaaaaaaaaaaaaaaaaaaaaaaaaaaaaaaaaaaaaaaaaaaaaaaaaaaaaaaaaaaaaaaaaaaaaaaaaaaaaaaaaaaaaaaaaa

SEQ ID NO: 23997 - RNA, 4129 nt, Artificial Sequence
  SARS-CoV-2/Wuhan/WIV05/2019__EPI_ISL_402128 spike protein mRNA gc (1-1273)(K986P_V987P_S477N_D614G)
aggagacccgugacccggaaguuguacggcuacgcgacuuucccucccacaaacccucgcgcccuuccuuuccuacuugggcccggcagaaagcuuaccauguucguguuccuggugcugcugccccuggugagcagccagugcgugaaccugaccacccggacccagcugccaccagccuacaccaacagcuucacccggggcgucuacuaccccgacaagguguuccggagcagcguccugcacagcacccaggaccuguuccugcccuucuucagcaacgugaccugguuccacgccauccacgugagcggcaccaacggcaccaagcgguucgacaaccccgugcugcccuucaacgacggcguguacuucgccagcaccgagaagagcaacaucauccggggcuggaucuucggcaccacccuggacagcaagacccagagccugcugaucgugaauaacgccaccaacguggugaucaaggugugcgaguuccaguucugcaacgaccccuuccugggcguguacuaccacaagaacaacaagagcuggauggagagcgaguuccggguguacagcagcgccaacaacugcaccuucgaguacgugagccagcccuuccugauggaccuggagggcaagcagggcaacuucaagaaccugcgggaguucguguucaagaacaucgacggcuacuucaagaucuacagcaagcacaccccaaucaaccuggugcgggaucugccccagggcuucucagcccuggagccccugguggaccugcccaucggcaucaacaucacccgguuccagacccugcuggcccugcaccggagcuaccugaccccaggcgacagcagcagcggguggacagcaggcgcggcugcuuacuacgugggcuaccugcagccccggaccuuccugcugaaguacaacgagaacggcaccaucaccgacgccguggacugcgcccuggacccucugagcgagaccaagugcacccugaagagcuucaccguggagaagggcaucuaccagaccagcaacuuccgggugcagcccaccgagagcaucgugcgguuccccaacaucaccaaccugugccccuucggcgagguguucaacgccacccgguucgccagcguguacgccuggaaccggaagcggaucagcaacugcguggccgacuacagcgugcuguacaacagcgccagcuucagcaccuucaagugcuacggcgugagccccaccaagcugaacgaccugugcuucaccaacguguacgccgacagcuucgugauccguggcgacgaggugcggcagaucgcacccggccagacaggcaagaucgccgacuacaacuacaagcugcccgacgacuucaccggcugcgugaucgccuggaacagcaacaaccucgacagcaaggugggcggcaacuacaacuaccuguaccggcuguuccggaagagcaaccugaagcccuucgagcgggacaucagcaccgagaucuaccaagccggcaacaccccuugcaacggcguggagggcuucaacugcuacuucccucugcagagcuacggcuuccagcccaccaacggcgugggcuaccagcccuaccgggugguggugcugagcuucgagcugcugcacgccccagccaccguguguggccccaagaagagcaccaaccuggugaagaacaagugcgugaacuucaacuucaacggccuuaccggcaccggcgugcugaccgagagcaacaagaaauuccugcccuuucagcaguucggccgggacaucgccgacaccaccgacgcugugcgggauccccagacccuggagauccuggacaucaccccuugcagcuucggcggcgugagcgugaucaccccaggcaccaacaccagcaaccagguggccgugcuguaccagggcgugaacugcaccgaggugcccguggccauccacgccgaccagcugacacccaccuggcgggucuacagcaccggcagcaacguguuccagacccgggccgguugccugaucggcgccgagcacgugaacaacagcuacgagugcgacauccccaucggcgccggcaucugugccagcuaccagacccagaccaauucaccccggagggcaaggagcguggccagccagagcaucaucgccuacaccaugagccugggcgccgagaacagcguggccuacagcaacaacagcaucgccauccccaccaacuucaccaucagcgugaccaccgagauucugcccgugagcaugaccaagaccagcguggacugcaccauguacaucugcggcgacagcaccgagugcagcaaccugcugcugcaguacggcagcuucugcacccagcugaaccgggcccugaccggcaucgccguggagcaggacaagaacacccaggagguguucgcccaggugaagcagaucuacaagaccccucccaucaaggacuucggcggcuucaacuucagccagauccugcccgaccccagcaagcccagcaagcggagcuucaucgaggaccugcuguucaacaaggugacccuagccgacgccggcuucaucaagcaguacggcgacugccucggcgacauagccgcccgggaccugaucugcgcccagaaguucaacggccugaccgugcugccuccccugcugaccgacgagaugaucgcccaguacaccagcgcccuguuagccggaaccaucaccagcggcuggacuuucggcgcuggagccgcucugcagauccccuucgccaugcagauggccuaccgguucaacggcaucggcgugacccagaacgugcuguacgagaaccagaagcugaucgccaaccaguucaacagcgccaucggcaagauccaggacagccugagcagcaccgcuagcgcccugggcaagcugcaggacguggugaaccagaacgcccaggcccugaacacccuggugaagcagcugagcagcaacuucggcgccaucagcagcgugcugaacgacauccugagccggcuggacccucccgaggccgaggugcagaucgaccggcugaucacuggccggcugcagagccugcagaccuacgugacccagcagcugauccgggccgccgagauucgggccagcgccaaccuggccgccaccaagaugagcgagugcgugcugggccagagcaagcggguggacuucugcggcaagggcuaccaccugaugagcuuuccccagagcgcaccccacggagugguguuccugcacgugaccuacgugcccgcccaggagaagaacuucaccaccgccccagccaucugccacgacggcaaggcccacuuuccccgggagggcguguucgugagcaacggcacccacugguucgugacccagcggaacuucuacgagccccagaucaucaccaccgacaacaccuucgugagcggcaacugcgacguggugaucggcaucgugaacaacaccguguacgauccccugcagcccgagcuggacagcuucaaggaggagcuggacaaguacuucaagaaucacaccagccccgacguggaccugggcgacaucagcggcaucaacgccagcguggugaacauccagaaggagaucgaucggcugaacgagguggccaagaaccugaacgagagccugaucgaccugcaggagcugggcaaguacgagcaguacaucaaguggcccugguacaucuggcugggcuucaucgccggccugaucgccaucgugauggugaccaucaugcugugcugcaugaccagcugcugcagcugccugaagggcuguugcagcugcggcagcugcugcaaguucgacgaggacgacagcgagcccgugcugaagggcgugaagcugcacuacaccugaggacuaguguccaccugucccuccugggcugcuggauugucucguuuuccugccaaauaaacaggaucagcgcuuuacagaucucaaaggcucuuuucagagccaccaaaaaaaaaaaaaaaaaaaaaaaaaaaaaaaaaaaaaaaaaaaaaaaaaaaaaaaaaaaaaaaaaaaaaaaaaaaaaaaaaaaaaaaaaaaaaaaaaaaaa

SEQ ID NO: 23998 - RNA, 4129 nt, Artificial Sequence
  SARS-CoV-2/Wuhan/WIV05/2019__EPI_ISL_402128 spike protein mRNA gc (1-1273)(K986P_V987P_N501Y_D614G)
aggagacccgugacccggaaguuguacggcuacgcgacuuucccucccacaaacccucgcgcccuuccuuuccuacuugggcccggcagaaagcuuaccauguucguguuccuggugcugcugccccuggugagcagccagugcgugaaccugaccacccggacccagcugccaccagccuacaccaacagcuucacccggggcgucuacuaccccgacaagguguuccggagcagcguccugcacagcacccaggaccuguuccugcccuucuucagcaacgugaccugguuccacgccauccacgugagcggcaccaacggcaccaagcgguucgacaaccccgugcugcccuucaacgacggcguguacuucgccagcaccgagaagagcaacaucauccggggcuggaucuucggcaccacccuggacagcaagacccagagccugcugaucgugaauaacgccaccaacguggugaucaaggugugcgaguuccaguucugcaacgaccccuuccugggcguguacuaccacaagaacaacaagagcuggauggagagcgaguuccggguguacagcagcgccaacaacugcaccuucgaguacgugagccagcccuuccugauggaccuggagggcaagcagggcaacuucaagaaccugcgggaguucguguucaagaacaucgacggcuacuucaagaucuacagcaagcacaccccaaucaaccuggugcgggaucugccccagggcuucucagcccuggagccccugguggaccugcccaucggcaucaacaucacccgguuccagacccugcuggcccugcaccggagcuaccugaccccaggcgacagcagcagcggguggacagcaggcgcggcugcuuacuacgugggcuaccugcagccccggaccuuccugcugaaguacaacgagaacggcaccaucaccgacgccguggacugcgcccuggacccucugagcgagaccaagugcacccugaagagcuucaccguggagaagggcaucuaccagaccagcaacuuccgggugcagcccaccgagagcaucgugcgguuccccaacaucaccaaccugugccccuucggcgagguguucaacgccacccgguucgccagcguguacgccuggaaccggaagcggaucagcaacugcguggccgacuacagcgugcuguacaacagcgccagcuucagcaccuucaagugcuacggcgugagccccaccaagcugaacgaccugugcuucaccaacguguacgccgacagcuucgugauccguggcgacgaggugcggcagaucgcacccggccagacaggcaagaucgccgacuacaacuacaagcugcccgacgacuucaccggcugcgugaucgccuggaacagcaacaaccucgacagcaaggugggcggcaacuacaacuaccuguaccggcuguuccggaagagcaaccugaagcccuucgagcgggacaucagcaccgagaucuaccaagccggcuccaccccuugcaacggcguggagggcuucaacugcuacuucccucugcagagcuacggcuuccagcccaccuacggcgugggcuaccagcccuaccgggugguggugcugagcuucgagcugcugcacgccccagccaccguguguggccccaagaagagcaccaaccuggugaagaacaagugcgugaacuucaacuucaacggccuuaccggcaccggcgugcugaccgagagcaacaagaaauuccugcccuuucagcaguucggccgggacaucgccgacaccaccgacgcugugcgggauccccagacccuggagauccuggacaucaccccuugcagcuucggcggcgugagcgugaucaccccaggcaccaacaccagcaaccagguggccgugcuguaccagggcgugaacugcaccgaggugcccguggccauccacgccgaccagcugacacccaccuggcgggucuacagcaccggcagcaacguguuccagacccgggccgguugccugaucggcgccgagcacgugaacaacagcuacgagugcgacauccccaucggcgccggcaucugugccagcuaccagacccagaccaauucaccccggagggcaaggagcguggccagccagagcaucaucgccuacaccaugagccugggcgccgagaacagcguggccuacagcaacaacagcaucgccauccccaccaacuucaccaucagcgugaccaccgagauucugcccgugagcaugaccaagaccagcguggacugcaccauguacaucugcggcgacagcaccgagugcagcaaccugcugcugcaguacggcagcuucugcacccagcugaaccgggcccugaccggcaucgccguggagcaggacaagaacacccaggagguguucgcccaggugaagcagaucuacaagaccccucccaucaaggacuucggcggcuucaacuucagccagauccugcccgaccccagcaagcccagcaagcggagcuucaucgaggaccugcuguucaacaaggugacccuagccgacgccggcuucaucaagcaguacggcgacugccucggcgacauagccgcccgggaccugaucugcgcccagaaguucaacggccugaccgugcugccuccccugcugaccgacgagaugaucgcccaguacaccagcgcccuguuagccggaaccaucaccagcggcuggacuuucggcgcuggagccgcucugcagauccccuucgccaugcagauggccuaccgguucaacggcaucggcgugacccagaacgugcuguacgagaaccagaagcugaucgccaaccaguucaacagcgccaucggcaagauccaggacagccugagcagcaccgcuagcgcccugggcaagcugcaggacguggugaaccagaacgcccaggcccugaacacccuggugaagcagcugagcagcaacuucggcgccaucagcagcgugcugaacgacauccugagccggcuggacccucccgaggccgaggugcagaucgaccggcugaucacuggccggcugcagagccugcagaccuacgugacccagcagcugauccgggccgccgagauucgggccagcgccaaccuggccgccaccaagaugagcgagugcgugcugggccagagcaagcggguggacuucugcggcaagggcuaccaccugaugagcuuuccccagagcgcaccccacggagugguguuccugcacgugaccuacgugcccgcccaggagaagaacuucaccaccgccccagccaucugccacgacggcaaggcccacuuuccccgggagggcguguucgugagcaacggcacccacugguucgugacccagcggaacuucuacgagccccagaucaucaccaccgacaacaccuucgugagcggcaacugcgacguggugaucggcaucgugaacaacaccguguacgauccccugcagcccgagcuggacagcuucaaggaggagcuggacaaguacuucaagaaucacaccagccccgacguggaccugggcgacaucagcggcaucaacgccagcguggugaacauccagaaggagaucgaucggcugaacgagguggccaagaaccugaacgagagccugaucgaccugcaggagcugggcaaguacgagcaguacaucaaguggcccugguacaucuggcugggcuucaucgccggccugaucgccaucgugauggugaccaucaugcugugcugcaugaccagcugcugcagcugccugaagggcuguugcagcugcggcagcugcugcaaguucgacgaggacgacagcgagcccgugcugaagggcgugaagcugcacuacaccugaggacuaguguccaccugucccuccugggcugcuggauugucucguuuuccugccaaauaaacaggaucagcgcuuuacagaucucaaaggcucuuuucagagccaccaaaaaaaaaaaaaaaaaaaaaaaaaaaaaaaaaaaaaaaaaaaaaaaaaaaaaaaaaaaaaaaaaaaaaaaaaaaaaaaaaaaaaaaaaaaaaaaaaaaaa

SEQ ID NO: 23999 - RNA, 4123 nt, Artificial Sequence
  SARS-CoV-2/Wuhan/WIV05/2019__EPI_ISL_402128 spike protein mRNA gc (1-1273)(K986P_V987P_H69del_V70del_D614G)
aggagacccgugacccggaaguuguacggcuacgcgacuuucccucccacaaacccucgcgcccuuccuuuccuacuugggcccggcagaaagcuuaccauguucguguuccuggugcugcugccccuggugagcagccagugcgugaaccugaccacccggacccagcugccaccagccuacaccaacagcuucacccggggcgucuacuaccccgacaagguguuccggagcagcguccugcacagcacccaggaccuguuccugcccuucuucagcaacgugaccugguuccacgccaucagcggcaccaacggcaccaagcgguucgacaaccccgugcugcccuucaacgacggcguguacuucgccagcaccgagaagagcaacaucauccggggcuggaucuucggcaccacccuggacagcaagacccagagccugcugaucgugaauaacgccaccaacguggugaucaaggugugcgaguuccaguucugcaacgaccccuuccugggcguguacuaccacaagaacaacaagagcuggauggagagcgaguuccggguguacagcagcgccaacaacugcaccuucgaguacgugagccagcccuuccugauggaccuggagggcaagcagggcaacuucaagaaccugcgggaguucguguucaagaacaucgacggcuacuucaagaucuacagcaagcacaccccaaucaaccuggugcgggaucugccccagggcuucucagcccuggagccccugguggaccugcccaucggcaucaacaucacccgguuccagacccugcuggcccugcaccggagcuaccugaccccaggcgacagcagcagcggguggacagcaggcgcggcugcuuacuacgugggcuaccugcagccccggaccuuccugcugaaguacaacgagaacggcaccaucaccgacgccguggacugcgcccuggacccucugagcgagaccaagugcacccugaagagcuucaccguggagaagggcaucuaccagaccagcaacuuccgggugcagcccaccgagagcaucgugcgguuccccaacaucaccaaccugugccccuucggcgagguguucaacgccacccgguucgccagcguguacgccuggaaccggaagcggaucagcaacugcguggccgacuacagcgugcuguacaacagcgccagcuucagcaccuucaagugcuacggcgugagccccaccaagcugaacgaccugugcuucaccaacguguacgccgacagcuucgugauccguggcgacgaggugcggcagaucgcacccggccagacaggcaagaucgccgacuacaacuacaagcugcccgacgacuucaccggcugcgugaucgccuggaacagcaacaaccucgacagcaaggugggcggcaacuacaacuaccuguaccggcuguuccggaagagcaaccugaagcccuucgagcgggacaucagcaccgagaucuaccaagccggcuccaccccuugcaacggcguggagggcuucaacugcuacuucccucugcagagcuacggcuuccagcccaccaacggcgugggcuaccagcccuaccgggugguggugcugagcuucgagcugcugcacgccccagccaccguguguggccccaagaagagcaccaaccuggugaagaacaagugcgugaacuucaacuucaacggccuuaccggcaccggcgugcugaccgagagcaacaagaaauuccugcccuuucagcaguucggccgggacaucgccgacaccaccgacgcugugcgggauccccagacccuggagauccuggacaucaccccuugcagcuucggcggcgugagcgugaucaccccaggcaccaacaccagcaaccagguggccgugcuguaccagggcgugaacugcaccgaggugcccguggccauccacgccgaccagcugacacccaccuggcgggucuacagcaccggcagcaacguguuccagacccgggccgguugccugaucggcgccgagcacgugaacaacagcuacgagugcgacauccccaucggcgccggcaucugugccagcuaccagacccagaccaauucaccccggagggcaaggagcguggccagccagagcaucaucgccuacaccaugagccugggcgccgagaacagcguggccuacagcaacaacagcaucgccauccccaccaacuucaccaucagcgugaccaccgagauucugcccgugagcaugaccaagaccagcguggacugcaccauguacaucugcggcgacagcaccgagugcagcaaccugcugcugcaguacggcagcuucugcacccagcugaaccgggcccugaccggcaucgccguggagcaggacaagaacacccaggagguguucgcccaggugaagcagaucuacaagaccccucccaucaaggacuucggcggcuucaacuucagccagauccugcccgaccccagcaagcccagcaagcggagcuucaucgaggaccugcuguucaacaaggugacccuagccgacgccggcuucaucaagcaguacggcgacugccucggcgacauagccgcccgggaccugaucugcgcccagaaguucaacggccugaccgugcugccuccccugcugaccgacgagaugaucgcccaguacaccagcgcccuguuagccggaaccaucaccagcggcuggacuuucggcgcuggagccgcucugcagauccccuucgccaugcagauggccuaccgguucaacggcaucggcgugacccagaacgugcuguacgagaaccagaagcugaucgccaaccaguucaacagcgccaucggcaagauccaggacagccugagcagcaccgcuagcgcccugggcaagcugcaggacguggugaaccagaacgcccaggcccugaacacccuggugaagcagcugagcagcaacuucggcgccaucagcagcgugcugaacgacauccugagccggcuggacccucccgaggccgaggugcagaucgaccggcugaucacuggccggcugcagagccugcagaccuacgugacccagcagcugauccgggccgccgagauucgggccagcgccaaccuggccgccaccaagaugagcgagugcgugcugggccagagcaagcggguggacuucugcggcaagggcuaccaccugaugagcuuuccccagagcgcaccccacggagugguguuccugcacgugaccuacgugcccgcccaggagaagaacuucaccaccgccccagccaucugccacgacggcaaggcccacuuuccccgggagggcguguucgugagcaacggcacccacugguucgugacccagcggaacuucuacgagccccagaucaucaccaccgacaacaccuucgugagcggcaacugcgacguggugaucggcaucgugaacaacaccguguacgauccccugcagcccgagcuggacagcuucaaggaggagcuggacaaguacuucaagaaucacaccagccccgacguggaccugggcgacaucagcggcaucaacgccagcguggugaacauccagaaggagaucgaucggcugaacgagguggccaagaaccugaacgagagccugaucgaccugcaggagcugggcaaguacgagcaguacaucaaguggcccugguacaucuggcugggcuucaucgccggccugaucgccaucgugauggugaccaucaugcugugcugcaugaccagcugcugcagcugccugaagggcuguugcagcugcggcagcugcugcaaguucgacgaggacgacagcgagcccgugcugaagggcgugaagcugcacuacaccugaggacuaguguccaccugucccuccugggcugcuggauugucucguuuuccugccaaauaaacaggaucagcgcuuuacagaucucaaaggcucuuuucagagccaccaaaaaaaaaaaaaaaaaaaaaaaaaaaaaaaaaaaaaaaaaaaaaaaaaaaaaaaaaaaaaaaaaaaaaaaaaaaaaaaaaaaaaaaaaaaaaaaaaaaaa

SEQ ID NO: 24000 - RNA, 4129 nt, Artificial Sequence
  SARS-CoV-2/Wuhan/WIV05/2019__EPI_ISL_402128 spike protein mRNA gc (1-1273)(K986P_V987P_Y453F_D614G)
aggagacccgugacccggaaguuguacggcuacgcgacuuucccucccacaaacccucgcgcccuuccuuuccuacuugggcccggcagaaagcuuaccauguucguguuccuggugcugcugccccuggugagcagccagugcgugaaccugaccacccggacccagcugccaccagccuacaccaacagcuucacccggggcgucuacuaccccgacaagguguuccggagcagcguccugcacagcacccaggaccuguuccugcccuucuucagcaacgugaccugguuccacgccauccacgugagcggcaccaacggcaccaagcgguucgacaaccccgugcugcccuucaacgacggcguguacuucgccagcaccgagaagagcaacaucauccggggcuggaucuucggcaccacccuggacagcaagacccagagccugcugaucgugaauaacgccaccaacguggugaucaaggugugcgaguuccaguucugcaacgaccccuuccugggcguguacuaccacaagaacaacaagagcuggauggagagcgaguuccggguguacagcagcgccaacaacugcaccuucgaguacgugagccagcccuuccugauggaccuggagggcaagcagggcaacuucaagaaccugcgggaguucguguucaagaacaucgacggcuacuucaagaucuacagcaagcacaccccaaucaaccuggugcgggaucugccccagggcuucucagcccuggagccccugguggaccugcccaucggcaucaacaucacccgguuccagacccugcuggcccugcaccggagcuaccugaccccaggcgacagcagcagcggguggacagcaggcgcggcugcuuacuacgugggcuaccugcagccccggaccuuccugcugaaguacaacgagaacggcaccaucaccgacgccguggacugcgcccuggacccucugagcgagaccaagugcacccugaagagcuucaccguggagaagggcaucuaccagaccagcaacuuccgggugcagcccaccgagagcaucgugcgguuccccaacaucaccaaccugugccccuucggcgagguguucaacgccacccgguucgccagcguguacgccuggaaccggaagcggaucagcaacugcguggccgacuacagcgugcuguacaacagcgccagcuucagcaccuucaagugcuacggcgugagccccaccaagcugaacgaccugugcuucaccaacguguacgccgacagcuucgugauccguggcgacgaggugcggcagaucgcacccggccagacaggcaagaucgccgacuacaacuacaagcugcccgacgacuucaccggcugcgugaucgccuggaacagcaacaaccucgacagcaaggugggcggcaacuacaacuaccuguuccggcuguuccggaagagcaaccugaagcccuucgagcgggacaucagcaccgagaucuaccaagccggcuccaccccuugcaacggcguggagggcuucaacugcuacuucccucugcagagcuacggcuuccagcccaccaacggcgugggcuaccagcccuaccgggugguggugcugagcuucgagcugcugcacgccccagccaccguguguggccccaagaagagcaccaaccuggugaagaacaagugcgugaacuucaacuucaacggccuuaccggcaccggcgugcugaccgagagcaacaagaaauuccugcccuuucagcaguucggccgggacaucgccgacaccaccgacgcugugcgggauccccagacccuggagauccuggacaucaccccuugcagcuucggcggcgugagcgugaucaccccaggcaccaacaccagcaaccagguggccgugcuguaccagggcgugaacugcaccgaggugcccguggccauccacgccgaccagcugacacccaccuggcgggucuacagcaccggcagcaacguguuccagacccgggccgguugccugaucggcgccgagcacgugaacaacagcuacgagugcgacauccccaucggcgccggcaucugugccagcuaccagacccagaccaauucaccccggagggcaaggagcguggccagccagagcaucaucgccuacaccaugagccugggcgccgagaacagcguggccuacagcaacaacagcaucgccauccccaccaacuucaccaucagcgugaccaccgagauucugcccgugagcaugaccaagaccagcguggacugcaccauguacaucugcggcgacagcaccgagugcagcaaccugcugcugcaguacggcagcuucugcacccagcugaaccgggcccugaccggcaucgccguggagcaggacaagaacacccaggagguguucgcccaggugaagcagaucuacaagaccccucccaucaaggacuucggcggcuucaacuucagccagauccugcccgaccccagcaagcccagcaagcggagcuucaucgaggaccugcuguucaacaaggugacccuagccgacgccggcuucaucaagcaguacggcgacugccucggcgacauagccgcccgggaccugaucugcgcccagaaguucaacggccugaccgugcugccuccccugcugaccgacgagaugaucgcccaguacaccagcgcccuguuagccggaaccaucaccagcggcuggacuuucggcgcuggagccgcucugcagauccccuucgccaugcagauggccuaccgguucaacggcaucggcgugacccagaacgugcuguacgagaaccagaagcugaucgccaaccaguucaacagcgccaucggcaagauccaggacagccugagcagcaccgcuagcgcccugggcaagcugcaggacguggugaaccagaacgcccaggcccugaacacccuggugaagcagcugagcagcaacuucggcgccaucagcagcgugcugaacgacauccugagccggcuggacccucccgaggccgaggugcagaucgaccggcugaucacuggccggcugcagagccugcagaccuacgugacccagcagcugauccgggccgccgagauucgggccagcgccaaccuggccgccaccaagaugagcgagugcgugcugggccagagcaagcggguggacuucugcggcaagggcuaccaccugaugagcuuuccccagagcgcaccccacggagugguguuccugcacgugaccuacgugcccgcccaggagaagaacuucaccaccgccccagccaucugccacgacggcaaggcccacuuuccccgggagggcguguucgugagcaacggcacccacugguucgugacccagcggaacuucuacgagccccagaucaucaccaccgacaacaccuucgugagcggcaacugcgacguggugaucggcaucgugaacaacaccguguacgauccccugcagcccgagcuggacagcuucaaggaggagcuggacaaguacuucaagaaucacaccagccccgacguggaccugggcgacaucagcggcaucaacgccagcguggugaacauccagaaggagaucgaucggcugaacgagguggccaagaaccugaacgagagccugaucgaccugcaggagcugggcaaguacgagcaguacaucaaguggcccugguacaucuggcugggcuucaucgccggccugaucgccaucgugauggugaccaucaugcugugcugcaugaccagcugcugcagcugccugaagggcuguugcagcugcggcagcugcugcaaguucgacgaggacgacagcgagcccgugcugaagggcgugaagcugcacuacaccugaggacuaguguccaccugucccuccugggcugcuggauugucucguuuuccugccaaauaaacaggaucagcgcuuuacagaucucaaaggcucuuuucagagccaccaaaaaaaaaaaaaaaaaaaaaaaaaaaaaaaaaaaaaaaaaaaaaaaaaaaaaaaaaaaaaaaaaaaaaaaaaaaaaaaaaaaaaaaaaaaaaaaaaaaaa

SEQ ID NO: 24001 - RNA, 4129 nt, Artificial Sequence
  SARS-CoV-2/Wuhan/WIV05/2019__EPI_ISL_402128 spike protein mRNA gc (1-1273)(K986P_V987P_D614G_I692V)
aggagacccgugacccggaaguuguacggcuacgcgacuuucccucccacaaacccucgcgcccuuccuuuccuacuugggcccggcagaaagcuuaccauguucguguuccuggugcugcugccccuggugagcagccagugcgugaaccugaccacccggacccagcugccaccagccuacaccaacagcuucacccggggcgucuacuaccccgacaagguguuccggagcagcguccugcacagcacccaggaccuguuccugcccuucuucagcaacgugaccugguuccacgccauccacgugagcggcaccaacggcaccaagcgguucgacaaccccgugcugcccuucaacgacggcguguacuucgccagcaccgagaagagcaacaucauccggggcuggaucuucggcaccacccuggacagcaagacccagagccugcugaucgugaauaacgccaccaacguggugaucaaggugugcgaguuccaguucugcaacgaccccuuccugggcguguacuaccacaagaacaacaagagcuggauggagagcgaguuccggguguacagcagcgccaacaacugcaccuucgaguacgugagccagcccuuccugauggaccuggagggcaagcagggcaacuucaagaaccugcgggaguucguguucaagaacaucgacggcuacuucaagaucuacagcaagcacaccccaaucaaccuggugcgggaucugccccagggcuucucagcccuggagccccugguggaccugcccaucggcaucaacaucacccgguuccagacccugcuggcccugcaccggagcuaccugaccccaggcgacagcagcagcggguggacagcaggcgcggcugcuuacuacgugggcuaccugcagccccggaccuuccugcugaaguacaacgagaacggcaccaucaccgacgccguggacugcgcccuggacccucugagcgagaccaagugcacccugaagagcuucaccguggagaagggcaucuaccagaccagcaacuuccgggugcagcccaccgagagcaucgugcgguuccccaacaucaccaaccugugccccuucggcgagguguucaacgccacccgguucgccagcguguacgccuggaaccggaagcggaucagcaacugcguggccgacuacagcgugcuguacaacagcgccagcuucagcaccuucaagugcuacggcgugagccccaccaagcugaacgaccugugcuucaccaacguguacgccgacagcuucgugauccguggcgacgaggugcggcagaucgcacccggccagacaggcaagaucgccgacuacaacuacaagcugcccgacgacuucaccggcugcgugaucgccuggaacagcaacaaccucgacagcaaggugggcggcaacuacaacuaccuguaccggcuguuccggaagagcaaccugaagcccuucgagcgggacaucagcaccgagaucuaccaagccggcuccaccccuugcaacggcguggagggcuucaacugcuacuucccucugcagagcuacggcuuccagcccaccaacggcgugggcuaccagcccuaccgggugguggugcugagcuucgagcugcugcacgccccagccaccguguguggccccaagaagagcaccaaccuggugaagaacaagugcgugaacuucaacuucaacggccuuaccggcaccggcgugcugaccgagagcaacaagaaauuccugcccuuucagcaguucggccgggacaucgccgacaccaccgacgcugugcgggauccccagacccuggagauccuggacaucaccccuugcagcuucggcggcgugagcgugaucaccccaggcaccaacaccagcaaccagguggccgugcuguaccagggcgugaacugcaccgaggugcccguggccauccacgccgaccagcugacacccaccuggcgggucuacagcaccggcagcaacguguuccagacccgggccgguugccugaucggcgccgagcacgugaacaacagcuacgagugcgacauccccaucggcgccggcaucugugccagcuaccagacccagaccaauucaccccggagggcaaggagcguggccagccagagcgugaucgccuacaccaugagccugggcgccgagaacagcguggccuacagcaacaacagcaucgccauccccaccaacuucaccaucagcgugaccaccgagauucugcccgugagcaugaccaagaccagcguggacugcaccauguacaucugcggcgacagcaccgagugcagcaaccugcugcugcaguacggcagcuucugcacccagcugaaccgggcccugaccggcaucgccguggagcaggacaagaacacccaggagguguucgcccaggugaagcagaucuacaagaccccucccaucaaggacuucggcggcuucaacuucagccagauccugcccgaccccagcaagcccagcaagcggagcuucaucgaggaccugcuguucaacaaggugacccuagccgacgccggcuucaucaagcaguacggcgacugccucggcgacauagccgcccgggaccugaucugcgcccagaaguucaacggccugaccgugcugccuccccugcugaccgacgagaugaucgcccaguacaccagcgcccuguuagccggaaccaucaccagcggcuggacuuucggcgcuggagccgcucugcagauccccuucgccaugcagauggccuaccgguucaacggcaucggcgugacccagaacgugcuguacgagaaccagaagcugaucgccaaccaguucaacagcgccaucggcaagauccaggacagccugagcagcaccgcuagcgcccugggcaagcugcaggacguggugaaccagaacgcccaggcccugaacacccuggugaagcagcugagcagcaacuucggcgccaucagcagcgugcugaacgacauccugagccggcuggacccucccgaggccgaggugcagaucgaccggcugaucacuggccggcugcagagccugcagaccuacgugacccagcagcugauccgggccgccgagauucgggccagcgccaaccuggccgccaccaagaugagcgagugcgugcugggccagagcaagcggguggacuucugcggcaagggcuaccaccugaugagcuuuccccagagcgcaccccacggagugguguuccugcacgugaccuacgugcccgcccaggagaagaacuucaccaccgccccagccaucugccacgacggcaaggcccacuuuccccgggagggcguguucgugagcaacggcacccacugguucgugacccagcggaacuucuacgagccccagaucaucaccaccgacaacaccuucgugagcggcaacugcgacguggugaucggcaucgugaacaacaccguguacgauccccugcagcccgagcuggacagcuucaaggaggagcuggacaaguacuucaagaaucacaccagccccgacguggaccugggcgacaucagcggcaucaacgccagcguggugaacauccagaaggagaucgaucggcugaacgagguggccaagaaccugaacgagagccugaucgaccugcaggagcugggcaaguacgagcaguacaucaaguggcccugguacaucuggcugggcuucaucgccggccugaucgccaucgugauggugaccaucaugcugugcugcaugaccagcugcugcagcugccugaagggcuguugcagcugcggcagcugcugcaaguucgacgaggacgacagcgagcccgugcugaagggcgugaagcugcacuacaccugaggacuaguguccaccugucccuccugggcugcuggauugucucguuuuccugccaaauaaacaggaucagcgcuuuacagaucucaaaggcucuuuucagagccaccaaaaaaaaaaaaaaaaaaaaaaaaaaaaaaaaaaaaaaaaaaaaaaaaaaaaaaaaaaaaaaaaaaaaaaaaaaaaaaaaaaaaaaaaaaaaaaaaaaaaa

SEQ ID NO: 24002 - RNA, 4129 nt, Artificial Sequence
  SARS-CoV-2/Wuhan/WIV05/2019__EPI_ISL_402128 spike protein mRNA gc (1-1273)(K986P_V987P_D614G_M1229I)
aggagacccgugacccggaaguuguacggcuacgcgacuuucccucccacaaacccucgcgcccuuccuuuccuacuugggcccggcagaaagcuuaccauguucguguuccuggugcugcugccccuggugagcagccagugcgugaaccugaccacccggacccagcugccaccagccuacaccaacagcuucacccggggcgucuacuaccccgacaagguguuccggagcagcguccugcacagcacccaggaccuguuccugcccuucuucagcaacgugaccugguuccacgccauccacgugagcggcaccaacggcaccaagcgguucgacaaccccgugcugcccuucaacgacggcguguacuucgccagcaccgagaagagcaacaucauccggggcuggaucuucggcaccacccuggacagcaagacccagagccugcugaucgugaauaacgccaccaacguggugaucaaggugugcgaguuccaguucugcaacgaccccuuccugggcguguacuaccacaagaacaacaagagcuggauggagagcgaguuccggguguacagcagcgccaacaacugcaccuucgaguacgugagccagcccuuccugauggaccuggagggcaagcagggcaacuucaagaaccugcgggaguucguguucaagaacaucgacggcuacuucaagaucuacagcaagcacaccccaaucaaccuggugcgggaucugccccagggcuucucagcccuggagccccugguggaccugcccaucggcaucaacaucacccgguuccagacccugcuggcccugcaccggagcuaccugaccccaggcgacagcagcagcggguggacagcaggcgcggcugcuuacuacgugggcuaccugcagccccggaccuuccugcugaaguacaacgagaacggcaccaucaccgacgccguggacugcgcccuggacccucugagcgagaccaagugcacccugaagagcuucaccguggagaagggcaucuaccagaccagcaacuuccgggugcagcccaccgagagcaucgugcgguuccccaacaucaccaaccugugccccuucggcgagguguucaacgccacccgguucgccagcguguacgccuggaaccggaagcggaucagcaacugcguggccgacuacagcgugcuguacaacagcgccagcuucagcaccuucaagugcuacggcgugagccccaccaagcugaacgaccugugcuucaccaacguguacgccgacagcuucgugauccguggcgacgaggugcggcagaucgcacccggccagacaggcaagaucgccgacuacaacuacaagcugcccgacgacuucaccggcugcgugaucgccuggaacagcaacaaccucgacagcaaggugggcggcaacuacaacuaccuguaccggcuguuccggaagagcaaccugaagcccuucgagcgggacaucagcaccgagaucuaccaagccggcuccaccccuugcaacggcguggagggcuucaacugcuacuucccucugcagagcuacggcuuccagcccaccaacggcgugggcuaccagcccuaccgggugguggugcugagcuucgagcugcugcacgccccagccaccguguguggccccaagaagagcaccaaccuggugaagaacaagugcgugaacuucaacuucaacggccuuaccggcaccggcgugcugaccgagagcaacaagaaauuccugcccuuucagcaguucggccgggacaucgccgacaccaccgacgcugugcgggauccccagacccuggagauccuggacaucaccccuugcagcuucggcggcgugagcgugaucaccccaggcaccaacaccagcaaccagguggccgugcuguaccagggcgugaacugcaccgaggugcccguggccauccacgccgaccagcugacacccaccuggcgggucuacagcaccggcagcaacguguuccagacccgggccgguugccugaucggcgccgagcacgugaacaacagcuacgagugcgacauccccaucggcgccggcaucugugccagcuaccagacccagaccaauucaccccggagggcaaggagcguggccagccagagcaucaucgccuacaccaugagccugggcgccgagaacagcguggccuacagcaacaacagcaucgccauccccaccaacuucaccaucagcgugaccaccgagauucugcccgugagcaugaccaagaccagcguggacugcaccauguacaucugcggcgacagcaccgagugcagcaaccugcugcugcaguacggcagcuucugcacccagcugaaccgggcccugaccggcaucgccguggagcaggacaagaacacccaggagguguucgcccaggugaagcagaucuacaagaccccucccaucaaggacuucggcggcuucaacuucagccagauccugcccgaccccagcaagcccagcaagcggagcuucaucgaggaccugcuguucaacaaggugacccuagccgacgccggcuucaucaagcaguacggcgacugccucggcgacauagccgcccgggaccugaucugcgcccagaaguucaacggccugaccgugcugccuccccugcugaccgacgagaugaucgcccaguacaccagcgcccuguuagccggaaccaucaccagcggcuggacuuucggcgcuggagccgcucugcagauccccuucgccaugcagauggccuaccgguucaacggcaucggcgugacccagaacgugcuguacgagaaccagaagcugaucgccaaccaguucaacagcgccaucggcaagauccaggacagccugagcagcaccgcuagcgcccugggcaagcugcaggacguggugaaccagaacgcccaggcccugaacacccuggugaagcagcugagcagcaacuucggcgccaucagcagcgugcugaacgacauccugagccggcuggacccucccgaggccgaggugcagaucgaccggcugaucacuggccggcugcagagccugcagaccuacgugacccagcagcugauccgggccgccgagauucgggccagcgccaaccuggccgccaccaagaugagcgagugcgugcugggccagagcaagcggguggacuucugcggcaagggcuaccaccugaugagcuuuccccagagcgcaccccacggagugguguuccugcacgugaccuacgugcccgcccaggagaagaacuucaccaccgccccagccaucugccacgacggcaaggcccacuuuccccgggagggcguguucgugagcaacggcacccacugguucgugacccagcggaacuucuacgagccccagaucaucaccaccgacaacaccuucgugagcggcaacugcgacguggugaucggcaucgugaacaacaccguguacgauccccugcagcccgagcuggacagcuucaaggaggagcuggacaaguacuucaagaaucacaccagccccgacguggaccugggcgacaucagcggcaucaacgccagcguggugaacauccagaaggagaucgaucggcugaacgagguggccaagaaccugaacgagagccugaucgaccugcaggagcugggcaaguacgagcaguacaucaaguggcccugguacaucuggcugggcuucaucgccggccugaucgccaucgugaucgugaccaucaugcugugcugcaugaccagcugcugcagcugccugaagggcuguugcagcugcggcagcugcugcaaguucgacgaggacgacagcgagcccgugcugaagggcgugaagcugcacuacaccugaggacuaguguccaccugucccuccugggcugcuggauugucucguuuuccugccaaauaaacaggaucagcgcuuuacagaucucaaaggcucuuuucagagccaccaaaaaaaaaaaaaaaaaaaaaaaaaaaaaaaaaaaaaaaaaaaaaaaaaaaaaaaaaaaaaaaaaaaaaaaaaaaaaaaaaaaaaaaaaaaaaaaaaaaaa

SEQ ID NO: 24003 - RNA, 4123 nt, Artificial Sequence
  SARS-CoV-2/Wuhan/WIV05/2019__EPI_ISL_402128 spike protein mRNA gc (1-1273)(K986P_V987P_H69del_V70del_A222V_Y453F_S477N_D614G_I692V)
aggagacccgugacccggaaguuguacggcuacgcgacuuucccucccacaaacccucgcgcccuuccuuuccuacuugggcccggcagaaagcuuaccauguucguguuccuggugcugcugccccuggugagcagccagugcgugaaccugaccacccggacccagcugccaccagccuacaccaacagcuucacccggggcgucuacuaccccgacaagguguuccggagcagcguccugcacagcacccaggaccuguuccugcccuucuucagcaacgugaccugguuccacgccaucagcggcaccaacggcaccaagcgguucgacaaccccgugcugcccuucaacgacggcguguacuucgccagcaccgagaagagcaacaucauccggggcuggaucuucggcaccacccuggacagcaagacccagagccugcugaucgugaauaacgccaccaacguggugaucaaggugugcgaguuccaguucugcaacgaccccuuccugggcguguacuaccacaagaacaacaagagcuggauggagagcgaguuccggguguacagcagcgccaacaacugcaccuucgaguacgugagccagcccuuccugauggaccuggagggcaagcagggcaacuucaagaaccugcgggaguucguguucaagaacaucgacggcuacuucaagaucuacagcaagcacaccccaaucaaccuggugcgggaucugccccagggcuucucagugcuggagccccugguggaccugcccaucggcaucaacaucacccgguuccagacccugcuggcccugcaccggagcuaccugaccccaggcgacagcagcagcggguggacagcaggcgcggcugcuuacuacgugggcuaccugcagccccggaccuuccugcugaaguacaacgagaacggcaccaucaccgacgccguggacugcgcccuggacccucugagcgagaccaagugcacccugaagagcuucaccguggagaagggcaucuaccagaccagcaacuuccgggugcagcccaccgagagcaucgugcgguuccccaacaucaccaaccugugccccuucggcgagguguucaacgccacccgguucgccagcguguacgccuggaaccggaagcggaucagcaacugcguggccgacuacagcgugcuguacaacagcgccagcuucagcaccuucaagugcuacggcgugagccccaccaagcugaacgaccugugcuucaccaacguguacgccgacagcuucgugauccguggcgacgaggugcggcagaucgcacccggccagacaggcaagaucgccgacuacaacuacaagcugcccgacgacuucaccggcugcgugaucgccuggaacagcaacaaccucgacagcaaggugggcggcaacuacaacuaccuguuccggcuguuccggaagagcaaccugaagcccuucgagcgggacaucagcaccgagaucuaccaagccggcaacaccccuugcaacggcguggagggcuucaacugcuacuucccucugcagagcuacggcuuccagcccaccaacggcgugggcuaccagcccuaccgggugguggugcugagcuucgagcugcugcacgccccagccaccguguguggccccaagaagagcaccaaccuggugaagaacaagugcgugaacuucaacuucaacggccuuaccggcaccggcgugcugaccgagagcaacaagaaauuccugcccuuucagcaguucggccgggacaucgccgacaccaccgacgcugugcgggauccccagacccuggagauccuggacaucaccccuugcagcuucggcggcgugagcgugaucaccccaggcaccaacaccagcaaccagguggccgugcuguaccagggcgugaacugcaccgaggugcccguggccauccacgccgaccagcugacacccaccuggcgggucuacagcaccggcagcaacguguuccagacccgggccgguugccugaucggcgccgagcacgugaacaacagcuacgagugcgacauccccaucggcgccggcaucugugccagcuaccagacccagaccaauucaccccggagggcaaggagcguggccagccagagcgugaucgccuacaccaugagccugggcgccgagaacagcguggccuacagcaacaacagcaucgccauccccaccaacuucaccaucagcgugaccaccgagauucugcccgugagcaugaccaagaccagcguggacugcaccauguacaucugcggcgacagcaccgagugcagcaaccugcugcugcaguacggcagcuucugcacccagcugaaccgggcccugaccggcaucgccguggagcaggacaagaacacccaggagguguucgcccaggugaagcagaucuacaagaccccucccaucaaggacuucggcggcuucaacuucagccagauccugcccgaccccagcaagcccagcaagcggagcuucaucgaggaccugcuguucaacaaggugacccuagccgacgccggcuucaucaagcaguacggcgacugccucggcgacauagccgcccgggaccugaucugcgcccagaaguucaacggccugaccgugcugccuccccugcugaccgacgagaugaucgcccaguacaccagcgcccuguuagccggaaccaucaccagcggcuggacuuucggcgcuggagccgcucugcagauccccuucgccaugcagauggccuaccgguucaacggcaucggcgugacccagaacgugcuguacgagaaccagaagcugaucgccaaccaguucaacagcgccaucggcaagauccaggacagccugagcagcaccgcuagcgcccugggcaagcugcaggacguggugaaccagaacgcccaggcccugaacacccuggugaagcagcugagcagcaacuucggcgccaucagcagcgugcugaacgacauccugagccggcuggacccucccgaggccgaggugcagaucgaccggcugaucacuggccggcugcagagccugcagaccuacgugacccagcagcugauccgggccgccgagauucgggccagcgccaaccuggccgccaccaagaugagcgagugcgugcugggccagagcaagcggguggacuucugcggcaagggcuaccaccugaugagcuuuccccagagcgcaccccacggagugguguuccugcacgugaccuacgugcccgcccaggagaagaacuucaccaccgccccagccaucugccacgacggcaaggcccacuuuccccgggagggcguguucgugagcaacggcacccacugguucgugacccagcggaacuucuacgagccccagaucaucaccaccgacaacaccuucgugagcggcaacugcgacguggugaucggcaucgugaacaacaccguguacgauccccugcagcccgagcuggacagcuucaaggaggagcuggacaaguacuucaagaaucacaccagccccgacguggaccugggcgacaucagcggcaucaacgccagcguggugaacauccagaaggagaucgaucggcugaacgagguggccaagaaccugaacgagagccugaucgaccugcaggagcugggcaaguacgagcaguacaucaaguggcccugguacaucuggcugggcuucaucgccggccugaucgccaucgugauggugaccaucaugcugugcugcaugaccagcugcugcagcugccugaagggcuguugcagcugcggcagcugcugcaaguucgacgaggacgacagcgagcccgugcugaagggcgugaagcugcacuacaccugaggacuaguguccaccugucccuccugggcugcuggauugucucguuuuccugccaaauaaacaggaucagcgcuuuacagaucucaaaggcucuuuucagagccaccaaaaaaaaaaaaaaaaaaaaaaaaaaaaaaaaaaaaaaaaaaaaaaaaaaaaaaaaaaaaaaaaaaaaaaaaaaaaaaaaaaaaaaaaaaaaaaaaaaaaa

SEQ ID NO: 24004 - RNA, 4123 nt, Artificial Sequence
  SARS-CoV-2/Wuhan/WIV05/2019__EPI_ISL_402128 spike protein mRNA gc (1-1273)(K986P_V987P_H69del_V70del_Y453F_D614G_I692V_M1229I)
aggagacccgugacccggaaguuguacggcuacgcgacuuucccucccacaaacccucgcgcccuuccuuuccuacuugggcccggcagaaagcuuaccauguucguguuccuggugcugcugccccuggugagcagccagugcgugaaccugaccacccggacccagcugccaccagccuacaccaacagcuucacccggggcgucuacuaccccgacaagguguuccggagcagcguccugcacagcacccaggaccuguuccugcccuucuucagcaacgugaccugguuccacgccaucagcggcaccaacggcaccaagcgguucgacaaccccgugcugcccuucaacgacggcguguacuucgccagcaccgagaagagcaacaucauccggggcuggaucuucggcaccacccuggacagcaagacccagagccugcugaucgugaauaacgccaccaacguggugaucaaggugugcgaguuccaguucugcaacgaccccuuccugggcguguacuaccacaagaacaacaagagcuggauggagagcgaguuccggguguacagcagcgccaacaacugcaccuucgaguacgugagccagcccuuccugauggaccuggagggcaagcagggcaacuucaagaaccugcgggaguucguguucaagaacaucgacggcuacuucaagaucuacagcaagcacaccccaaucaaccuggugcgggaucugccccagggcuucucagcccuggagccccugguggaccugcccaucggcaucaacaucacccgguuccagacccugcuggcccugcaccggagcuaccugaccccaggcgacagcagcagcggguggacagcaggcgcggcugcuuacuacgugggcuaccugcagccccggaccuuccugcugaaguacaacgagaacggcaccaucaccgacgccguggacugcgcccuggacccucugagcgagaccaagugcacccugaagagcuucaccguggagaagggcaucuaccagaccagcaacuuccgggugcagcccaccgagagcaucgugcgguuccccaacaucaccaaccugugccccuucggcgagguguucaacgccacccgguucgccagcguguacgccuggaaccggaagcggaucagcaacugcguggccgacuacagcgugcuguacaacagcgccagcuucagcaccuucaagugcuacggcgugagccccaccaagcugaacgaccugugcuucaccaacguguacgccgacagcuucgugauccguggcgacgaggugcggcagaucgcacccggccagacaggcaagaucgccgacuacaacuacaagcugcccgacgacuucaccggcugcgugaucgccuggaacagcaacaaccucgacagcaaggugggcggcaacuacaacuaccuguuccggcuguuccggaagagcaaccugaagcccuucgagcgggacaucagcaccgagaucuaccaagccggcuccaccccuugcaacggcguggagggcuucaacugcuacuucccucugcagagcuacggcuuccagcccaccaacggcgugggcuaccagcccuaccgggugguggugcugagcuucgagcugcugcacgccccagccaccguguguggccccaagaagagcaccaaccuggugaagaacaagugcgugaacuucaacuucaacggccuuaccggcaccggcgugcugaccgagagcaacaagaaauuccugcccuuucagcaguucggccgggacaucgccgacaccaccgacgcugugcgggauccccagacccuggagauccuggacaucaccccuugcagcuucggcggcgugagcgugaucaccccaggcaccaacaccagcaaccagguggccgugcuguaccagggcgugaacugcaccgaggugcccguggccauccacgccgaccagcugacacccaccuggcgggucuacagcaccggcagcaacguguuccagacccgggccgguugccugaucggcgccgagcacgugaacaacagcuacgagugcgacauccccaucggcgccggcaucugugccagcuaccagacccagaccaauucaccccggagggcaaggagcguggccagccagagcgugaucgccuacaccaugagccugggcgccgagaacagcguggccuacagcaacaacagcaucgccauccccaccaacuucaccaucagcgugaccaccgagauucugcccgugagcaugaccaagaccagcguggacugcaccauguacaucugcggcgacagcaccgagugcagcaaccugcugcugcaguacggcagcuucugcacccagcugaaccgggcccugaccggcaucgccguggagcaggacaagaacacccaggagguguucgcccaggugaagcagaucuacaagaccccucccaucaaggacuucggcggcuucaacuucagccagauccugcccgaccccagcaagcccagcaagcggagcuucaucgaggaccugcuguucaacaaggugacccuagccgacgccggcuucaucaagcaguacggcgacugccucggcgacauagccgcccgggaccugaucugcgcccagaaguucaacggccugaccgugcugccuccccugcugaccgacgagaugaucgcccaguacaccagcgcccuguuagccggaaccaucaccagcggcuggacuuucggcgcuggagccgcucugcagauccccuucgccaugcagauggccuaccgguucaacggcaucggcgugacccagaacgugcuguacgagaaccagaagcugaucgccaaccaguucaacagcgccaucggcaagauccaggacagccugagcagcaccgcuagcgcccugggcaagcugcaggacguggugaaccagaacgcccaggcccugaacacccuggugaagcagcugagcagcaacuucggcgccaucagcagcgugcugaacgacauccugagccggcuggacccucccgaggccgaggugcagaucgaccggcugaucacuggccggcugcagagccugcagaccuacgugacccagcagcugauccgggccgccgagauucgggccagcgccaaccuggccgccaccaagaugagcgagugcgugcugggccagagcaagcggguggacuucugcggcaagggcuaccaccugaugagcuuuccccagagcgcaccccacggagugguguuccugcacgugaccuacgugcccgcccaggagaagaacuucaccaccgccccagccaucugccacgacggcaaggcccacuuuccccgggagggcguguucgugagcaacggcacccacugguucgugacccagcggaacuucuacgagccccagaucaucaccaccgacaacaccuucgugagcggcaacugcgacguggugaucggcaucgugaacaacaccguguacgauccccugcagcccgagcuggacagcuucaaggaggagcuggacaaguacuucaagaaucacaccagccccgacguggaccugggcgacaucagcggcaucaacgccagcguggugaacauccagaaggagaucgaucggcugaacgagguggccaagaaccugaacgagagccugaucgaccugcaggagcugggcaaguacgagcaguacaucaaguggcccugguacaucuggcugggcuucaucgccggccugaucgccaucgugaucgugaccaucaugcugugcugcaugaccagcugcugcagcugccugaagggcuguugcagcugcggcagcugcugcaaguucgacgaggacgacagcgagcccgugcugaagggcgugaagcugcacuacaccugaggacuaguguccaccugucccuccugggcugcuggauugucucguuuuccugccaaauaaacaggaucagcgcuuuacagaucucaaaggcucuuuucagagccaccaaaaaaaaaaaaaaaaaaaaaaaaaaaaaaaaaaaaaaaaaaaaaaaaaaaaaaaaaaaaaaaaaaaaaaaaaaaaaaaaaaaaaaaaaaaaaaaaaaaaa

SEQ ID NO: 24005 - RNA, 4120 nt, Artificial Sequence
  SARS-CoV-2/Wuhan/WIV05/2019__EPI_ISL_402128 spike protein mRNA gc (1-1273)(K986P_V987P_K986P_V987P_H69del_V70del_Y144del_N501Y_A570 D_D614G_P681H_T716I_S982A_D1118H)
aggagacccgugacccggaaguuguacggcuacgcgacuuucccucccacaaacccucgcgcccuuccuuuccuacuugggcccggcagaaagcuuaccauguucguguuccuggugcugcugccccuggugagcagccagugcgugaaccugaccacccggacccagcugccaccagccuacaccaacagcuucacccggggcgucuacuaccccgacaagguguuccggagcagcguccugcacagcacccaggaccuguuccugcccuucuucagcaacgugaccugguuccacgccaucagcggcaccaacggcaccaagcgguucgacaaccccgugcugcccuucaacgacggcguguacuucgccagcaccgagaagagcaacaucauccggggcuggaucuucggcaccacccuggacagcaagacccagagccugcugaucgugaauaacgccaccaacguggugaucaaggugugcgaguuccaguucugcaacgaccccuuccugggcguguaccacaagaacaacaagagcuggauggagagcgaguuccggguguacagcagcgccaacaacugcaccuucgaguacgugagccagcccuuccugauggaccuggagggcaagcagggcaacuucaagaaccugcgggaguucguguucaagaacaucgacggcuacuucaagaucuacagcaagcacaccccaaucaaccuggugcgggaucugccccagggcuucucagcccuggagccccugguggaccugcccaucggcaucaacaucacccgguuccagacccugcuggcccugcaccggagcuaccugaccccaggcgacagcagcagcggguggacagcaggcgcggcugcuuacuacgugggcuaccugcagccccggaccuuccugcugaaguacaacgagaacggcaccaucaccgacgccguggacugcgcccuggacccucugagcgagaccaagugcacccugaagagcuucaccguggagaagggcaucuaccagaccagcaacuuccgggugcagcccaccgagagcaucgugcgguuccccaacaucaccaaccugugccccuucggcgagguguucaacgccacccgguucgccagcguguacgccuggaaccggaagcggaucagcaacugcguggccgacuacagcgugcuguacaacagcgccagcuucagcaccuucaagugcuacggcgugagccccaccaagcugaacgaccugugcuucaccaacguguacgccgacagcuucgugauccguggcgacgaggugcggcagaucgcacccggccagacaggcaagaucgccgacuacaacuacaagcugcccgacgacuucaccggcugcgugaucgccuggaacagcaacaaccucgacagcaaggugggcggcaacuacaacuaccuguaccggcuguuccggaagagcaaccugaagcccuucgagcgggacaucagcaccgagaucuaccaagccggcuccaccccuugcaacggcguggagggcuucaacugcuacuucccucugcagagcuacggcuuccagcccaccuacggcgugggcuaccagcccuaccgggugguggugcugagcuucgagcugcugcacgccccagccaccguguguggccccaagaagagcaccaaccuggugaagaacaagugcgugaacuucaacuucaacggccuuaccggcaccggcgugcugaccgagagcaacaagaaauuccugcccuuucagcaguucggccgggacaucgacgacaccaccgacgcugugcgggauccccagacccuggagauccuggacaucaccccuugcagcuucggcggcgugagcgugaucaccccaggcaccaacaccagcaaccagguggccgugcuguaccagggcgugaacugcaccgaggugcccguggccauccacgccgaccagcugacacccaccuggcgggucuacagcaccggcagcaacguguuccagacccgggccgguugccugaucggcgccgagcacgugaacaacagcuacgagugcgacauccccaucggcgccggcaucugugccagcuaccagacccagaccaauucacaccggagggcaaggagcguggccagccagagcaucaucgccuacaccaugagccugggcgccgagaacagcguggccuacagcaacaacagcaucgccauccccaucaacuucaccaucagcgugaccaccgagauucugcccgugagcaugaccaagaccagcguggacugcaccauguacaucugcggcgacagcaccgagugcagcaaccugcugcugcaguacggcagcuucugcacccagcugaaccgggcccugaccggcaucgccguggagcaggacaagaacacccaggagguguucgcccaggugaagcagaucuacaagaccccucccaucaaggacuucggcggcuucaacuucagccagauccugcccgaccccagcaagcccagcaagcggagcuucaucgaggaccugcuguucaacaaggugacccuagccgacgccggcuucaucaagcaguacggcgacugccucggcgacauagccgcccgggaccugaucugcgcccagaaguucaacggccugaccgugcugccuccccugcugaccgacgagaugaucgcccaguacaccagcgcccuguuagccggaaccaucaccagcggcuggacuuucggcgcuggagccgcucugcagauccccuucgccaugcagauggccuaccgguucaacggcaucggcgugacccagaacgugcuguacgagaaccagaagcugaucgccaaccaguucaacagcgccaucggcaagauccaggacagccugagcagcaccgcuagcgcccugggcaagcugcaggacguggugaaccagaacgcccaggcccugaacacccuggugaagcagcugagcagcaacuucggcgccaucagcagcgugcugaacgacauccuggcccggcuggacccucccgaggccgaggugcagaucgaccggcugaucacuggccggcugcagagccugcagaccuacgugacccagcagcugauccgggccgccgagauucgggccagcgccaaccuggccgccaccaagaugagcgagugcgugcugggccagagcaagcggguggacuucugcggcaagggcuaccaccugaugagcuuuccccagagcgcaccccacggagugguguuccugcacgugaccuacgugcccgcccaggagaagaacuucaccaccgccccagccaucugccacgacggcaaggcccacuuuccccgggagggcguguucgugagcaacggcacccacugguucgugacccagcggaacuucuacgagccccagaucaucaccacccacaacaccuucgugagcggcaacugcgacguggugaucggcaucgugaacaacaccguguacgauccccugcagcccgagcuggacagcuucaaggaggagcuggacaaguacuucaagaaucacaccagccccgacguggaccugggcgacaucagcggcaucaacgccagcguggugaacauccagaaggagaucgaucggcugaacgagguggccaagaaccugaacgagagccugaucgaccugcaggagcugggcaaguacgagcaguacaucaaguggcccugguacaucuggcugggcuucaucgccggccugaucgccaucgugauggugaccaucaugcugugcugcaugaccagcugcugcagcugccugaagggcuguugcagcugcggcagcugcugcaaguucgacgaggacgacagcgagcccgugcugaagggcgugaagcugcacuacaccugaggacuaguguccaccugucccuccugggcugcuggauugucucguuuuccugccaaauaaacaggaucagcgcuuuacagaucucaaaggcucuuuucagagccaccaaaaaaaaaaaaaaaaaaaaaaaaaaaaaaaaaaaaaaaaaaaaaaaaaaaaaaaaaaaaaaaaaaaaaaaaaaaaaaaaaaaaaaaaaaaaaaaaaaaaa

SEQ ID NO: 24006 - RNA, 4129 nt, Artificial Sequence
  SARS-CoV-2/Wuhan/WIV05/2019__EPI_ISL_402128 spike protein mRNA gc (1-1273)(K986P_V987P_K986P_V987P_K417N_E484K_N501Y_D614G)
aggagacccgugacccggaaguuguacggcuacgcgacuuucccucccacaaacccucgcgcccuuccuuuccuacuugggcccggcagaaagcuuaccauguucguguuccuggugcugcugccccuggugagcagccagugcgugaaccugaccacccggacccagcugccaccagccuacaccaacagcuucacccggggcgucuacuaccccgacaagguguuccggagcagcguccugcacagcacccaggaccuguuccugcccuucuucagcaacgugaccugguuccacgccauccacgugagcggcaccaacggcaccaagcgguucgacaaccccgugcugcccuucaacgacggcguguacuucgccagcaccgagaagagcaacaucauccggggcuggaucuucggcaccacccuggacagcaagacccagagccugcugaucgugaauaacgccaccaacguggugaucaaggugugcgaguuccaguucugcaacgaccccuuccugggcguguacuaccacaagaacaacaagagcuggauggagagcgaguuccggguguacagcagcgccaacaacugcaccuucgaguacgugagccagcccuuccugauggaccuggagggcaagcagggcaacuucaagaaccugcgggaguucguguucaagaacaucgacggcuacuucaagaucuacagcaagcacaccccaaucaaccuggugcgggaucugccccagggcuucucagcccuggagccccugguggaccugcccaucggcaucaacaucacccgguuccagacccugcuggcccugcaccggagcuaccugaccccaggcgacagcagcagcggguggacagcaggcgcggcugcuuacuacgugggcuaccugcagccccggaccuuccugcugaaguacaacgagaacggcaccaucaccgacgccguggacugcgcccuggacccucugagcgagaccaagugcacccugaagagcuucaccguggagaagggcaucuaccagaccagcaacuuccgggugcagcccaccgagagcaucgugcgguuccccaacaucaccaaccugugccccuucggcgagguguucaacgccacccgguucgccagcguguacgccuggaaccggaagcggaucagcaacugcguggccgacuacagcgugcuguacaacagcgccagcuucagcaccuucaagugcuacggcgugagccccaccaagcugaacgaccugugcuucaccaacguguacgccgacagcuucgugauccguggcgacgaggugcggcagaucgcacccggccagacaggcaacaucgccgacuacaacuacaagcugcccgacgacuucaccggcugcgugaucgccuggaacagcaacaaccucgacagcaaggugggcggcaacuacaacuaccuguaccggcuguuccggaagagcaaccugaagcccuucgagcgggacaucagcaccgagaucuaccaagccggcuccaccccuugcaacggcgugaagggcuucaacugcuacuucccucugcagagcuacggcuuccagcccaccuacggcgugggcuaccagcccuaccgggugguggugcugagcuucgagcugcugcacgccccagccaccguguguggccccaagaagagcaccaaccuggugaagaacaagugcgugaacuucaacuucaacggccuuaccggcaccggcgugcugaccgagagcaacaagaaauuccugcccuuucagcaguucggccgggacaucgccgacaccaccgacgcugugcgggauccccagacccuggagauccuggacaucaccccuugcagcuucggcggcgugagcgugaucaccccaggcaccaacaccagcaaccagguggccgugcuguaccagggcgugaacugcaccgaggugcccguggccauccacgccgaccagcugacacccaccuggcgggucuacagcaccggcagcaacguguuccagacccgggccgguugccugaucggcgccgagcacgugaacaacagcuacgagugcgacauccccaucggcgccggcaucugugccagcuaccagacccagaccaauucaccccggagggcaaggagcguggccagccagagcaucaucgccuacaccaugagccugggcgccgagaacagcguggccuacagcaacaacagcaucgccauccccaccaacuucaccaucagcgugaccaccgagauucugcccgugagcaugaccaagaccagcguggacugcaccauguacaucugcggcgacagcaccgagugcagcaaccugcugcugcaguacggcagcuucugcacccagcugaaccgggcccugaccggcaucgccguggagcaggacaagaacacccaggagguguucgcccaggugaagcagaucuacaagaccccucccaucaaggacuucggcggcuucaacuucagccagauccugcccgaccccagcaagcccagcaagcggagcuucaucgaggaccugcuguucaacaaggugacccuagccgacgccggcuucaucaagcaguacggcgacugccucggcgacauagccgcccgggaccugaucugcgcccagaaguucaacggccugaccgugcugccuccccugcugaccgacgagaugaucgcccaguacaccagcgcccuguuagccggaaccaucaccagcggcuggacuuucggcgcuggagccgcucugcagauccccuucgccaugcagauggccuaccgguucaacggcaucggcgugacccagaacgugcuguacgagaaccagaagcugaucgccaaccaguucaacagcgccaucggcaagauccaggacagccugagcagcaccgcuagcgcccugggcaagcugcaggacguggugaaccagaacgcccaggcccugaacacccuggugaagcagcugagcagcaacuucggcgccaucagcagcgugcugaacgacauccugagccggcuggacccucccgaggccgaggugcagaucgaccggcugaucacuggccggcugcagagccugcagaccuacgugacccagcagcugauccgggccgccgagauucgggccagcgccaaccuggccgccaccaagaugagcgagugcgugcugggccagagcaagcggguggacuucugcggcaagggcuaccaccugaugagcuuuccccagagcgcaccccacggagugguguuccugcacgugaccuacgugcccgcccaggagaagaacuucaccaccgccccagccaucugccacgacggcaaggcccacuuuccccgggagggcguguucgugagcaacggcacccacugguucgugacccagcggaacuucuacgagccccagaucaucaccaccgacaacaccuucgugagcggcaacugcgacguggugaucggcaucgugaacaacaccguguacgauccccugcagcccgagcuggacagcuucaaggaggagcuggacaaguacuucaagaaucacaccagccccgacguggaccugggcgacaucagcggcaucaacgccagcguggugaacauccagaaggagaucgaucggcugaacgagguggccaagaaccugaacgagagccugaucgaccugcaggagcugggcaaguacgagcaguacaucaaguggcccugguacaucuggcugggcuucaucgccggccugaucgccaucgugauggugaccaucaugcugugcugcaugaccagcugcugcagcugccugaagggcuguugcagcugcggcagcugcugcaaguucgacgaggacgacagcgagcccgugcugaagggcgugaagcugcacuacaccugaggacuaguguccaccugucccuccugggcugcuggauugucucguuuuccugccaaauaaacaggaucagcgcuuuacagaucucaaaggcucuuuucagagccaccaaaaaaaaaaaaaaaaaaaaaaaaaaaaaaaaaaaaaaaaaaaaaaaaaaaaaaaaaaaaaaaaaaaaaaaaaaaaaaaaaaaaaaaaaaaaaaaaaaaaa

SEQ ID NO: 24007 - RNA, 4120 nt, Artificial Sequence
  SARS-CoV-2/Wuhan/WIV05/2019__EPI_ISL_402128 spike protein mRNA gc (1-1273)(K986P_V987P_K986P_V987P_L18F_D80A_D215G_L242del_A243del_ L244del_R246I_K417N_E484K_N501Y_D614G_A701V)
aggagacccgugacccggaaguuguacggcuacgcgacuuucccucccacaaacccucgcgcccuuccuuuccuacuugggcccggcagaaagcuuaccauguucguguuccuggugcugcugccccuggugagcagccagugcgugaacuucaccacccggacccagcugccaccagccuacaccaacagcuucacccggggcgucuacuaccccgacaagguguuccggagcagcguccugcacagcacccaggaccuguuccugcccuucuucagcaacgugaccugguuccacgccauccacgugagcggcaccaacggcaccaagcgguucgccaaccccgugcugcccuucaacgacggcguguacuucgccagcaccgagaagagcaacaucauccggggcuggaucuucggcaccacccuggacagcaagacccagagccugcugaucgugaauaacgccaccaacguggugaucaaggugugcgaguuccaguucugcaacgaccccuuccugggcguguacuaccacaagaacaacaagagcuggauggagagcgaguuccggguguacagcagcgccaacaacugcaccuucgaguacgugagccagcccuuccugauggaccuggagggcaagcagggcaacuucaagaaccugcgggaguucguguucaagaacaucgacggcuacuucaagaucuacagcaagcacaccccaaucaaccuggugcggggccugccccagggcuucucagcccuggagccccugguggaccugcccaucggcaucaacaucacccgguuccagacccugcacaucagcuaccugaccccaggcgacagcagcagcggguggacagcaggcgcggcugcuuacuacgugggcuaccugcagccccggaccuuccugcugaaguacaacgagaacggcaccaucaccgacgccguggacugcgcccuggacccucugagcgagaccaagugcacccugaagagcuucaccguggagaagggcaucuaccagaccagcaacuuccgggugcagcccaccgagagcaucgugcgguuccccaacaucaccaaccugugccccuucggcgagguguucaacgccacccgguucgccagcguguacgccuggaaccggaagcggaucagcaacugcguggccgacuacagcgugcuguacaacagcgccagcuucagcaccuucaagugcuacggcgugagccccaccaagcugaacgaccugugcuucaccaacguguacgccgacagcuucgugauccguggcgacgaggugcggcagaucgcacccggccagacaggcaacaucgccgacuacaacuacaagcugcccgacgacuucaccggcugcgugaucgccuggaacagcaacaaccucgacagcaaggugggcggcaacuacaacuaccuguaccggcuguuccggaagagcaaccugaagcccuucgagcgggacaucagcaccgagaucuaccaagccggcuccaccccuugcaacggcgugaagggcuucaacugcuacuucccucugcagagcuacggcuuccagcccaccuacggcgugggcuaccagcccuaccgggugguggugcugagcuucgagcugcugcacgccccagccaccguguguggccccaagaagagcaccaaccuggugaagaacaagugcgugaacuucaacuucaacggccuuaccggcaccggcgugcugaccgagagcaacaagaaauuccugcccuuucagcaguucggccgggacaucgccgacaccaccgacgcugugcgggauccccagacccuggagauccuggacaucaccccuugcagcuucggcggcgugagcgugaucaccccaggcaccaacaccagcaaccagguggccgugcuguaccagggcgugaacugcaccgaggugcccguggccauccacgccgaccagcugacacccaccuggcgggucuacagcaccggcagcaacguguuccagacccgggccgguugccugaucggcgccgagcacgugaacaacagcuacgagugcgacauccccaucggcgccggcaucugugccagcuaccagacccagaccaauucaccccggagggcaaggagcguggccagccagagcaucaucgccuacaccaugagccugggcguggagaacagcguggccuacagcaacaacagcaucgccauccccaccaacuucaccaucagcgugaccaccgagauucugcccgugagcaugaccaagaccagcguggacugcaccauguacaucugcggcgacagcaccgagugcagcaaccugcugcugcaguacggcagcuucugcacccagcugaaccgggcccugaccggcaucgccguggagcaggacaagaacacccaggagguguucgcccaggugaagcagaucuacaagaccccucccaucaaggacuucggcggcuucaacuucagccagauccugcccgaccccagcaagcccagcaagcggagcuucaucgaggaccugcuguucaacaaggugacccuagccgacgccggcuucaucaagcaguacggcgacugccucggcgacauagccgcccgggaccugaucugcgcccagaaguucaacggccugaccgugcugccuccccugcugaccgacgagaugaucgcccaguacaccagcgcccuguuagccggaaccaucaccagcggcuggacuuucggcgcuggagccgcucugcagauccccuucgccaugcagauggccuaccgguucaacggcaucggcgugacccagaacgugcuguacgagaaccagaagcugaucgccaaccaguucaacagcgccaucggcaagauccaggacagccugagcagcaccgcuagcgcccugggcaagcugcaggacguggugaaccagaacgcccaggcccugaacacccuggugaagcagcugagcagcaacuucggcgccaucagcagcgugcugaacgacauccugagccggcuggacccucccgaggccgaggugcagaucgaccggcugaucacuggccggcugcagagccugcagaccuacgugacccagcagcugauccgggccgccgagauucgggccagcgccaaccuggccgccaccaagaugagcgagugcgugcugggccagagcaagcggguggacuucugcggcaagggcuaccaccugaugagcuuuccccagagcgcaccccacggagugguguuccugcacgugaccuacgugcccgcccaggagaagaacuucaccaccgccccagccaucugccacgacggcaaggcccacuuuccccgggagggcguguucgugagcaacggcacccacugguucgugacccagcggaacuucuacgagccccagaucaucaccaccgacaacaccuucgugagcggcaacugcgacguggugaucggcaucgugaacaacaccguguacgauccccugcagcccgagcuggacagcuucaaggaggagcuggacaaguacuucaagaaucacaccagccccgacguggaccugggcgacaucagcggcaucaacgccagcguggugaacauccagaaggagaucgaucggcugaacgagguggccaagaaccugaacgagagccugaucgaccugcaggagcugggcaaguacgagcaguacaucaaguggcccugguacaucuggcugggcuucaucgccggccugaucgccaucgugauggugaccaucaugcugugcugcaugaccagcugcugcagcugccugaagggcuguugcagcugcggcagcugcugcaaguucgacgaggacgacagcgagcccgugcugaagggcgugaagcugcacuacaccugaggacuaguguccaccugucccuccugggcugcuggauugucucguuuuccugccaaauaaacaggaucagcgcuuuacagaucucaaaggcucuuuucagagccaccaaaaaaaaaaaaaaaaaaaaaaaaaaaaaaaaaaaaaaaaaaaaaaaaaaaaaaaaaaaaaaaaaaaaaaaaaaaaaaaaaaaaaaaaaaaaaaaaaaaaa

SEQ ID NO: 24008 - RNA, 4129 nt, Artificial Sequence
  SARS-CoV-2/Wuhan/WIV05/2019__EPI_ISL_402128 spike protein mRNA gc (1-1273)(K986P_V987P_K986P_V987P_E484K_D614G)
aggagacccgugacccggaaguuguacggcuacgcgacuuucccucccacaaacccucgcgcccuuccuuuccuacuugggcccggcagaaagcuuaccauguucguguuccuggugcugcugccccuggugagcagccagugcgugaaccugaccacccggacccagcugccaccagccuacaccaacagcuucacccggggcgucuacuaccccgacaagguguuccggagcagcguccugcacagcacccaggaccuguuccugcccuucuucagcaacgugaccugguuccacgccauccacgugagcggcaccaacggcaccaagcgguucgacaaccccgugcugcccuucaacgacggcguguacuucgccagcaccgagaagagcaacaucauccggggcuggaucuucggcaccacccuggacagcaagacccagagccugcugaucgugaauaacgccaccaacguggugaucaaggugugcgaguuccaguucugcaacgaccccuuccugggcguguacuaccacaagaacaacaagagcuggauggagagcgaguuccggguguacagcagcgccaacaacugcaccuucgaguacgugagccagcccuuccugauggaccuggagggcaagcagggcaacuucaagaaccugcgggaguucguguucaagaacaucgacggcuacuucaagaucuacagcaagcacaccccaaucaaccuggugcgggaucugccccagggcuucucagcccuggagccccugguggaccugcccaucggcaucaacaucacccgguuccagacccugcuggcccugcaccggagcuaccugaccccaggcgacagcagcagcggguggacagcaggcgcggcugcuuacuacgugggcuaccugcagccccggaccuuccugcugaaguacaacgagaacggcaccaucaccgacgccguggacugcgcccuggacccucugagcgagaccaagugcacccugaagagcuucaccguggagaagggcaucuaccagaccagcaacuuccgggugcagcccaccgagagcaucgugcgguuccccaacaucaccaaccugugccccuucggcgagguguucaacgccacccgguucgccagcguguacgccuggaaccggaagcggaucagcaacugcguggccgacuacagcgugcuguacaacagcgccagcuucagcaccuucaagugcuacggcgugagccccaccaagcugaacgaccugugcuucaccaacguguacgccgacagcuucgugauccguggcgacgaggugcggcagaucgcacccggccagacaggcaagaucgccgacuacaacuacaagcugcccgacgacuucaccggcugcgugaucgccuggaacagcaacaaccucgacagcaaggugggcggcaacuacaacuaccuguaccggcuguuccggaagagcaaccugaagcccuucgagcgggacaucagcaccgagaucuaccaagccggcuccaccccuugcaacggcgugaagggcuucaacugcuacuucccucugcagagcuacggcuuccagcccaccaacggcgugggcuaccagcccuaccgggugguggugcugagcuucgagcugcugcacgccccagccaccguguguggccccaagaagagcaccaaccuggugaagaacaagugcgugaacuucaacuucaacggccuuaccggcaccggcgugcugaccgagagcaacaagaaauuccugcccuuucagcaguucggccgggacaucgccgacaccaccgacgcugugcgggauccccagacccuggagauccuggacaucaccccuugcagcuucggcggcgugagcgugaucaccccaggcaccaacaccagcaaccagguggccgugcuguaccagggcgugaacugcaccgaggugcccguggccauccacgccgaccagcugacacccaccuggcgggucuacagcaccggcagcaacguguuccagacccgggccgguugccugaucggcgccgagcacgugaacaacagcuacgagugcgacauccccaucggcgccggcaucugugccagcuaccagacccagaccaauucaccccggagggcaaggagcguggccagccagagcaucaucgccuacaccaugagccugggcgccgagaacagcguggccuacagcaacaacagcaucgccauccccaccaacuucaccaucagcgugaccaccgagauucugcccgugagcaugaccaagaccagcguggacugcaccauguacaucugcggcgacagcaccgagugcagcaaccugcugcugcaguacggcagcuucugcacccagcugaaccgggcccugaccggcaucgccguggagcaggacaagaacacccaggagguguucgcccaggugaagcagaucuacaagaccccucccaucaaggacuucggcggcuucaacuucagccagauccugcccgaccccagcaagcccagcaagcggagcuucaucgaggaccugcuguucaacaaggugacccuagccgacgccggcuucaucaagcaguacggcgacugccucggcgacauagccgcccgggaccugaucugcgcccagaaguucaacggccugaccgugcugccuccccugcugaccgacgagaugaucgcccaguacaccagcgcccuguuagccggaaccaucaccagcggcuggacuuucggcgcuggagccgcucugcagauccccuucgccaugcagauggccuaccgguucaacggcaucggcgugacccagaacgugcuguacgagaaccagaagcugaucgccaaccaguucaacagcgccaucggcaagauccaggacagccugagcagcaccgcuagcgcccugggcaagcugcaggacguggugaaccagaacgcccaggcccugaacacccuggugaagcagcugagcagcaacuucggcgccaucagcagcgugcugaacgacauccugagccggcuggacccucccgaggccgaggugcagaucgaccggcugaucacuggccggcugcagagccugcagaccuacgugacccagcagcugauccgggccgccgagauucgggccagcgccaaccuggccgccaccaagaugagcgagugcgugcugggccagagcaagcggguggacuucugcggcaagggcuaccaccugaugagcuuuccccagagcgcaccccacggagugguguuccugcacgugaccuacgugcccgcccaggagaagaacuucaccaccgccccagccaucugccacgacggcaaggcccacuuuccccgggagggcguguucgugagcaacggcacccacugguucgugacccagcggaacuucuacgagccccagaucaucaccaccgacaacaccuucgugagcggcaacugcgacguggugaucggcaucgugaacaacaccguguacgauccccugcagcccgagcuggacagcuucaaggaggagcuggacaaguacuucaagaaucacaccagccccgacguggaccugggcgacaucagcggcaucaacgccagcguggugaacauccagaaggagaucgaucggcugaacgagguggccaagaaccugaacgagagccugaucgaccugcaggagcugggcaaguacgagcaguacaucaaguggcccugguacaucuggcugggcuucaucgccggccugaucgccaucgugauggugaccaucaugcugugcugcaugaccagcugcugcagcugccugaagggcuguugcagcugcggcagcugcugcaaguucgacgaggacgacagcgagcccgugcugaagggcgugaagcugcacuacaccugaggacuaguguccaccugucccuccugggcugcuggauugucucguuuuccugccaaauaaacaggaucagcgcuuuacagaucucaaaggcucuuuucagagccaccaaaaaaaaaaaaaaaaaaaaaaaaaaaaaaaaaaaaaaaaaaaaaaaaaaaaaaaaaaaaaaaaaaaaaaaaaaaaaaaaaaaaaaaaaaaaaaaaaaaaa

SEQ ID NO: 24009 - RNA, 4129 nt, Artificial Sequence
  SARS-CoV-2/Wuhan/WIV05/2019__EPI_ISL_402128 spike protein mRNA gc (1-1273)(K986P_V987P_K986P_V987P_L18F_T20N_P26S_D138Y_R190S_K417T _E484K_N501Y_D614G_H655Y_T1027I)
aggagacccgugacccggaaguuguacggcuacgcgacuuucccucccacaaacccucgcgcccuuccuuuccuacuugggcccggcagaaagcuuaccauguucguguuccuggugcugcugccccuggugagcagccagugcgugaacuucaccaaccggacccagcugccaagcgccuacaccaacagcuucacccggggcgucuacuaccccgacaagguguuccggagcagcguccugcacagcacccaggaccuguuccugcccuucuucagcaacgugaccugguuccacgccauccacgugagcggcaccaacggcaccaagcgguucgacaaccccgugcugcccuucaacgacggcguguacuucgccagcaccgagaagagcaacaucauccggggcuggaucuucggcaccacccuggacagcaagacccagagccugcugaucgugaauaacgccaccaacguggugaucaaggugugcgaguuccaguucugcaacuaccccuuccugggcguguacuaccacaagaacaacaagagcuggauggagagcgaguuccggguguacagcagcgccaacaacugcaccuucgaguacgugagccagcccuuccugauggaccuggagggcaagcagggcaacuucaagaaccugagcgaguucguguucaagaacaucgacggcuacuucaagaucuacagcaagcacaccccaaucaaccuggugcgggaucugccccagggcuucucagcccuggagccccugguggaccugcccaucggcaucaacaucacccgguuccagacccugcuggcccugcaccggagcuaccugaccccaggcgacagcagcagcggguggacagcaggcgcggcugcuuacuacgugggcuaccugcagccccggaccuuccugcugaaguacaacgagaacggcaccaucaccgacgccguggacugcgcccuggacccucugagcgagaccaagugcacccugaagagcuucaccguggagaagggcaucuaccagaccagcaacuuccgggugcagcccaccgagagcaucgugcgguuccccaacaucaccaaccugugccccuucggcgagguguucaacgccacccgguucgccagcguguacgccuggaaccggaagcggaucagcaacugcguggccgacuacagcgugcuguacaacagcgccagcuucagcaccuucaagugcuacggcgugagccccaccaagcugaacgaccugugcuucaccaacguguacgccgacagcuucgugauccguggcgacgaggugcggcagaucgcacccggccagacaggcaccaucgccgacuacaacuacaagcugcccgacgacuucaccggcugcgugaucgccuggaacagcaacaaccucgacagcaaggugggcggcaacuacaacuaccuguaccggcuguuccggaagagcaaccugaagcccuucgagcgggacaucagcaccgagaucuaccaagccggcuccaccccuugcaacggcgugaagggcuucaacugcuacuucccucugcagagcuacggcuuccagcccaccuacggcgugggcuaccagcccuaccgggugguggugcugagcuucgagcugcugcacgccccagccaccguguguggccccaagaagagcaccaaccuggugaagaacaagugcgugaacuucaacuucaacggccuuaccggcaccggcgugcugaccgagagcaacaagaaauuccugcccuuucagcaguucggccgggacaucgccgacaccaccgacgcugugcgggauccccagacccuggagauccuggacaucaccccuugcagcuucggcggcgugagcgugaucaccccaggcaccaacaccagcaaccagguggccgugcuguaccagggcgugaacugcaccgaggugcccguggccauccacgccgaccagcugacacccaccuggcgggucuacagcaccggcagcaacguguuccagacccgggccgguugccugaucggcgccgaguacgugaacaacagcuacgagugcgacauccccaucggcgccggcaucugugccagcuaccagacccagaccaauucaccccggagggcaaggagcguggccagccagagcaucaucgccuacaccaugagccugggcgccgagaacagcguggccuacagcaacaacagcaucgccauccccaccaacuucaccaucagcgugaccaccgagauucugcccgugagcaugaccaagaccagcguggacugcaccauguacaucugcggcgacagcaccgagugcagcaaccugcugcugcaguacggcagcuucugcacccagcugaaccgggcccugaccggcaucgccguggagcaggacaagaacacccaggagguguucgcccaggugaagcagaucuacaagaccccucccaucaaggacuucggcggcuucaacuucagccagauccugcccgaccccagcaagcccagcaagcggagcuucaucgaggaccugcuguucaacaaggugacccuagccgacgccggcuucaucaagcaguacggcgacugccucggcgacauagccgcccgggaccugaucugcgcccagaaguucaacggccugaccgugcugccuccccugcugaccgacgagaugaucgcccaguacaccagcgcccuguuagccggaaccaucaccagcggcuggacuuucggcgcuggagccgcucugcagauccccuucgccaugcagauggccuaccgguucaacggcaucggcgugacccagaacgugcuguacgagaaccagaagcugaucgccaaccaguucaacagcgccaucggcaagauccaggacagccugagcagcaccgcuagcgcccugggcaagcugcaggacguggugaaccagaacgcccaggcccugaacacccuggugaagcagcugagcagcaacuucggcgccaucagcagcgugcugaacgacauccugagccggcuggacccucccgaggccgaggugcagaucgaccggcugaucacuggccggcugcagagccugcagaccuacgugacccagcagcugauccgggccgccgagauucgggccagcgccaaccuggccgccaucaagaugagcgagugcgugcugggccagagcaagcggguggacuucugcggcaagggcuaccaccugaugagcuuuccccagagcgcaccccacggagugguguuccugcacgugaccuacgugcccgcccaggagaagaacuucaccaccgccccagccaucugccacgacggcaaggcccacuuuccccgggagggcguguucgugagcaacggcacccacugguucgugacccagcggaacuucuacgagccccagaucaucaccaccgacaacaccuucgugagcggcaacugcgacguggugaucggcaucgugaacaacaccguguacgauccccugcagcccgagcuggacagcuucaaggaggagcuggacaaguacuucaagaaucacaccagccccgacguggaccugggcgacaucagcggcaucaacgccagcguggugaacauccagaaggagaucgaucggcugaacgagguggccaagaaccugaacgagagccugaucgaccugcaggagcugggcaaguacgagcaguacaucaaguggcccugguacaucuggcugggcuucaucgccggccugaucgccaucgugauggugaccaucaugcugugcugcaugaccagcugcugcagcugccugaagggcuguugcagcugcggcagcugcugcaaguucgacgaggacgacagcgagcccgugcugaagggcgugaagcugcacuacaccugaggacuaguguccaccugucccuccugggcugcuggauugucucguuuuccugccaaauaaacaggaucagcgcuuuacagaucucaaaggcucuuuucagagccaccaaaaaaaaaaaaaaaaaaaaaaaaaaaaaaaaaaaaaaaaaaaaaaaaaaaaaaaaaaaaaaaaaaaaaaaaaaaaaaaaaaaaaaaaaaaaaaaaaaaaa

SEQ ID NO: 24010 - RNA, 4129 nt, Artificial Sequence
  SARS-CoV-2/Wuhan/WIV05/2019__EPI_ISL_402128 spike protein mRNA gc (1-1273)(K986P_V987P_K986P_V987P_S13I_W152C_L452R_D614G)
aggagacccgugacccggaaguuguacggcuacgcgacuuucccucccacaaacccucgcgcccuuccuuuccuacuugggcccggcagaaagcuuaccauguucguguuccuggugcugcugccccuggugagcauccagugcgugaaccugaccacccggacccagcugccaccagccuacaccaacagcuucacccggggcgucuacuaccccgacaagguguuccggagcagcguccugcacagcacccaggaccuguuccugcccuucuucagcaacgugaccugguuccacgccauccacgugagcggcaccaacggcaccaagcgguucgacaaccccgugcugcccuucaacgacggcguguacuucgccagcaccgagaagagcaacaucauccggggcuggaucuucggcaccacccuggacagcaagacccagagccugcugaucgugaauaacgccaccaacguggugaucaaggugugcgaguuccaguucugcaacgaccccuuccugggcguguacuaccacaagaacaacaagagcugcauggagagcgaguuccggguguacagcagcgccaacaacugcaccuucgaguacgugagccagcccuuccugauggaccuggagggcaagcagggcaacuucaagaaccugcgggaguucguguucaagaacaucgacggcuacuucaagaucuacagcaagcacaccccaaucaaccuggugcgggaucugccccagggcuucucagcccuggagccccugguggaccugcccaucggcaucaacaucacccgguuccagacccugcuggcccugcaccggagcuaccugaccccaggcgacagcagcagcggguggacagcaggcgcggcugcuuacuacgugggcuaccugcagccccggaccuuccugcugaaguacaacgagaacggcaccaucaccgacgccguggacugcgcccuggacccucugagcgagaccaagugcacccugaagagcuucaccguggagaagggcaucuaccagaccagcaacuuccgggugcagcccaccgagagcaucgugcgguuccccaacaucaccaaccugugccccuucggcgagguguucaacgccacccgguucgccagcguguacgccuggaaccggaagcggaucagcaacugcguggccgacuacagcgugcuguacaacagcgccagcuucagcaccuucaagugcuacggcgugagccccaccaagcugaacgaccugugcuucaccaacguguacgccgacagcuucgugauccguggcgacgaggugcggcagaucgcacccggccagacaggcaagaucgccgacuacaacuacaagcugcccgacgacuucaccggcugcgugaucgccuggaacagcaacaaccucgacagcaaggugggcggcaacuacaacuaccgcuaccggcuguuccggaagagcaaccugaagcccuucgagcgggacaucagcaccgagaucuaccaagccggcuccaccccuugcaacggcguggagggcuucaacugcuacuucccucugcagagcuacggcuuccagcccaccaacggcgugggcuaccagcccuaccgggugguggugcugagcuucgagcugcugcacgccccagccaccguguguggccccaagaagagcaccaaccuggugaagaacaagugcgugaacuucaacuucaacggccuuaccggcaccggcgugcugaccgagagcaacaagaaauuccugcccuuucagcaguucggccgggacaucgccgacaccaccgacgcugugcgggauccccagacccuggagauccuggacaucaccccuugcagcuucggcggcgugagcgugaucaccccaggcaccaacaccagcaaccagguggccgugcuguaccagggcgugaacugcaccgaggugcccguggccauccacgccgaccagcugacacccaccuggcgggucuacagcaccggcagcaacguguuccagacccgggccgguugccugaucggcgccgagcacgugaacaacagcuacgagugcgacauccccaucggcgccggcaucugugccagcuaccagacccagaccaauucaccccggagggcaaggagcguggccagccagagcaucaucgccuacaccaugagccugggcgccgagaacagcguggccuacagcaacaacagcaucgccauccccaccaacuucaccaucagcgugaccaccgagauucugcccgugagcaugaccaagaccagcguggacugcaccauguacaucugcggcgacagcaccgagugcagcaaccugcugcugcaguacggcagcuucugcacccagcugaaccgggcccugaccggcaucgccguggagcaggacaagaacacccaggagguguucgcccaggugaagcagaucuacaagaccccucccaucaaggacuucggcggcuucaacuucagccagauccugcccgaccccagcaagcccagcaagcggagcuucaucgaggaccugcuguucaacaaggugacccuagccgacgccggcuucaucaagcaguacggcgacugccucggcgacauagccgcccgggaccugaucugcgcccagaaguucaacggccugaccgugcugccuccccugcugaccgacgagaugaucgcccaguacaccagcgcccuguuagccggaaccaucaccagcggcuggacuuucggcgcuggagccgcucugcagauccccuucgccaugcagauggccuaccgguucaacggcaucggcgugacccagaacgugcuguacgagaaccagaagcugaucgccaaccaguucaacagcgccaucggcaagauccaggacagccugagcagcaccgcuagcgcccugggcaagcugcaggacguggugaaccagaacgcccaggcccugaacacccuggugaagcagcugagcagcaacuucggcgccaucagcagcgugcugaacgacauccugagccggcuggacccucccgaggccgaggugcagaucgaccggcugaucacuggccggcugcagagccugcagaccuacgugacccagcagcugauccgggccgccgagauucgggccagcgccaaccuggccgccaccaagaugagcgagugcgugcugggccagagcaagcggguggacuucugcggcaagggcuaccaccugaugagcuuuccccagagcgcaccccacggagugguguuccugcacgugaccuacgugcccgcccaggagaagaacuucaccaccgccccagccaucugccacgacggcaaggcccacuuuccccgggagggcguguucgugagcaacggcacccacugguucgugacccagcggaacuucuacgagccccagaucaucaccaccgacaacaccuucgugagcggcaacugcgacguggugaucggcaucgugaacaacaccguguacgauccccugcagcccgagcuggacagcuucaaggaggagcuggacaaguacuucaagaaucacaccagccccgacguggaccugggcgacaucagcggcaucaacgccagcguggugaacauccagaaggagaucgaucggcugaacgagguggccaagaaccugaacgagagccugaucgaccugcaggagcugggcaaguacgagcaguacaucaaguggcccugguacaucuggcugggcuucaucgccggccugaucgccaucgugauggugaccaucaugcugugcugcaugaccagcugcugcagcugccugaagggcuguugcagcugcggcagcugcugcaaguucgacgaggacgacagcgagcccgugcugaagggcgugaagcugcacuacaccugaggacuaguguccaccugucccuccugggcugcuggauugucucguuuuccugccaaauaaacaggaucagcgcuuuacagaucucaaaggcucuuuucagagccaccaaaaaaaaaaaaaaaaaaaaaaaaaaaaaaaaaaaaaaaaaaaaaaaaaaaaaaaaaaaaaaaaaaaaaaaaaaaaaaaaaaaaaaaaaaaaaaaaaaaaa

SEQ ID NO: 24011 - RNA, 4129 nt, Artificial Sequence
  SARS-CoV-2/Wuhan/WIV05/2019__EPI_ISL_402128 spike protein mRNA gc (1-1273)(K986P_V987P)
aggagacccgugacccggaaguuguacggcuacgcgacuuucccucccacaaacccucgcgcccuuccuuuccuacuugggcccggcagaaagcuuaccauguucguguuccuggugcugcugccccuggugagcagccagugcgugaaccugaccacccggacccagcugcccccugccuacaccaacagcuucacccggggcguguacuaccccgacaagguguuccggagcagcgugcugcacagcacccaggaccuguuccugcccuucuucagcaacgugaccugguuccacgccauccacgugagcggcaccaacggcaccaagcgguucgacaacccagugcugcccuucaacgacggcguguacuucgccagcaccgagaagucaaacaucauccggggcuggaucuucggcaccacccuggacagcaagacacagagccugcugaucgugaacaacgccaccaacguggugaucaaggugugcgaguuucaguucugcaacgaccccuuccugggcguguacuaccacaagaacaacaagagcuggauggagagcgaguuccgggucuacagcagcgcuaacaauugcaccuucgaguacgugagccagcccuuccugauggaccucgagggcaagcagggcaacuucaagaaccugcgggaguucguguucaagaacaucgauggcuacuucaagaucuacagcaagcacacccccaucaaccuggugcgggaccugccccagggauucagcgcccuggagccucugguggaccugcccaucggcaucaacaucaccagguuccagacccugcuggcccugcaccggagcuaccugacccccggcgacagcagcagcggcuggaccgccggcgccgccgcauacuacgugggcuaccugcagccacggaccuuccugcugaaguacaacgagaacggcaccaucaccgacgccguggacugcgcccuggacccccugagcgagaccaagugcacccuaaagagcuucaccguggagaagggcaucuaccagaccagcaacuuccgggugcagcccacugagagcaucgugcgguuccccaacauuaccaaccugugucccuucggcgagguguucaacgccacccgguucgccagcguguacgccuggaaccggaagcggaucagcaacugcguggccgacuacagcgugcuguacaacagcgccagcuucagcaccuucaagugcuacggcgugagcccuaccaagcugaacgaccugugcuucaccaacguguacgcugacagcuucgugauccggggcgacgaggugcggcagaucgcccccggccagaccggcaagaucgccgacuacaacuacaagcugcccgacgacuucaccggcugcgugaucgccuggaacagcaacaaccuggacagcaaggugggcggcaacuacaacuaccuguaccggcuguuccguaagagcaaccugaagccauucgagcgggacaucagcaccgagaucuaccaggccggcagcacccccugcaacgguguggagggcuuuaacugcuacuucccccugcagagcuacggcuuccagcccaccaacggcgugggcuaccagcccuaccgggugguggugcugagcuucgagcugcugcacgcccccgccaccgugugcggcccuaaaaagagcaccaaccuggugaagaacaagugcgugaacuucaauuucaacggccugaccggcaccggcgugcugaccgagagcaacaagaaguuccugcccuuccagcaguucggccgggauaucgccgacaccaccgacgcagugcgggacccccagacccuggagauccuggacaucaccccaugcagcuucggcggcgugagcgucaucacccccggcacaaacaccagcaaccagguggccgugcuguaccaggacgugaacugcaccgaggugcccguggccauccacgccgaccagcugacccccaccuggcggguguacagcaccggaagcaacguguuccagacccgggccggcugccugaucggcgccgagcacgugaacaacuccuacgagugcgacauccccaucggcgcuggcaucugcgccagcuaccagacccagaccaacagcccccggcgggcccggagcguggccagccagagcaucaucgccuacaccaugagcuuaggcgccgagaacagcguggccuacagcaacaacagcaucgcgaucccuaccaacuucaccaucagcgugaccaccgagauacugcccgugagcaugaccaagaccagcguggacuguaccauguacaucugcggcgacagcaccgagugcagcaaccugcugcugcaguacggcagcuucugcacccagcugaaccgggcccugaccggcaucgccguggagcaggacaagaacacccaagagguguucgcccaggugaagcagaucuacaagacucccccaaucaaggacuucggcggcuucaacuucagccagauccugcccgaccccagcaagcccagcaagcggagcuucaucgaggaccugcuguucaacaaggugacccuggccgacgccggcuucaucaagcaguacggcgauugccugggcgacaucgccgcucgggaccugaucugcgcccagaaguucaacgggcugaccgugcugcccccucugcugaccgacgagaugaucgcccaguacaccagcgcccugcuugccggcaccaucaccagcggcuggaccuucggcgccggcgcagcccugcagauccccuucgccaugcagauggccuaccgguucaacggcaucggcgugacccagaacgugcuguacgagaaccagaagcugaucgccaaccaguucaacagcgccaucggcaagauccaggacagccugagcagcaccgccagcgcccugggcaagcugcaggacguggugaaccagaacgcucaggcccugaacacccuggugaagcagcugagcagcaacuucggcgccaucagcucagugcugaaugacauccugagcaggcuggaucccccagaggccgaggugcagaucgaccggcugaucaccggccggcugcagagccugcagaccuacgugacccagcagcugauccgggccgccgagauccgggccagcgccaaccuggcagccaccaagaugagcgagugcgugcugggccagagcaagcggguggacuuuugcggcaagggcuaccaccugaugagcuucccccagagcgcuccccacggcgugguguuccuccacgugacauacguccccgcccaggagaagaacuucaccaccgcccccgccauuugccacgacggcaaggcccacuucccccgggagggcguguucgugagcaacggaacccacugguucgugacccagcggaacuucuacgagccucagaucaucaccaccgacaacaccuucgugagcggcaacugcgacguggugaucggcaucgugaacaacaccguguacgacccccugcagcccgagcuggacagcuucaaggaggagcuggacaaguacuucaagaaccacaccagcccagacguggaccugggcgacaucagcggcaucaacgccagcguggugaacauccagaaggagaucgaccggcugaacgagguggccaagaaccugaacgagagccugaucgaccugcaggagcugggcaaguacgagcaguacaucaaguggcccugguacaucuggcugggcuucaucgccggccugaucgccaucgugauggugaccaucaugcugugcugcaugaccagcugcuguagcugccugaagggcugcugcagcugcggcagcugcugcaaguucgacgaggacgacagcgagcccgugcugaagggcgugaagcugcacuacaccugaggacuaguguccaccugucccuccugggcugcuggauugucucguuuuccugccaaauaaacaggaucagcgcuuuacagaucucaaaggcucuuuucagagccaccaaaaaaaaaaaaaaaaaaaaaaaaaaaaaaaaaaaaaaaaaaaaaaaaaaaaaaaaaaaaaaaaaaaaaaaaaaaaaaaaaaaaaaaaaaaaaaaaaaaaa

SEQ ID NO: 24012 - RNA, 4129 nt, Artificial Sequence
  SARS-CoV-2/Wuhan/WIV05/2019__EPI_ISL_402128 spike protein mRNA gc (1-1273)(K986P_V987P_ D614G)
aggagacccgugacccggaaguuguacggcuacgcgacuuucccucccacaaacccucgcgcccuuccuuuccuacuugggcccggcagaaagcuuaccauguucguguuccuggugcugcugccccuggugagcagccagugcgugaaccugaccacccggacccagcugcccccugccuacaccaacagcuucacccggggcguguacuaccccgacaagguguuccggagcagcgugcugcacagcacccaggaccuguuccugcccuucuucagcaacgugaccugguuccacgccauccacgugagcggcaccaacggcaccaagcgguucgacaacccagugcugcccuucaacgacggcguguacuucgccagcaccgagaagucaaacaucauccggggcuggaucuucggcaccacccuggacagcaagacacagagccugcugaucgugaacaacgccaccaacguggugaucaaggugugcgaguuucaguucugcaacgaccccuuccugggcguguacuaccacaagaacaacaagagcuggauggagagcgaguuccgggucuacagcagcgcuaacaauugcaccuucgaguacgugagccagcccuuccugauggaccucgagggcaagcagggcaacuucaagaaccugcgggaguucguguucaagaacaucgauggcuacuucaagaucuacagcaagcacacccccaucaaccuggugcgggaccugccccagggauucagcgcccuggagccucugguggaccugcccaucggcaucaacaucaccagguuccagacccugcuggcccugcaccggagcuaccugacccccggcgacagcagcagcggcuggaccgccggcgccgccgcauacuacgugggcuaccugcagccacggaccuuccugcugaaguacaacgagaacggcaccaucaccgacgccguggacugcgcccuggacccccugagcgagaccaagugcacccuaaagagcuucaccguggagaagggcaucuaccagaccagcaacuuccgggugcagcccacugagagcaucgugcgguuccccaacauuaccaaccugugucccuucggcgagguguucaacgccacccgguucgccagcguguacgccuggaaccggaagcggaucagcaacugcguggccgacuacagcgugcuguacaacagcgccagcuucagcaccuucaagugcuacggcgugagcccuaccaagcugaacgaccugugcuucaccaacguguacgcugacagcuucgugauccggggcgacgaggugcggcagaucgcccccggccagaccggcaagaucgccgacuacaacuacaagcugcccgacgacuucaccggcugcgugaucgccuggaacagcaacaaccuggacagcaaggugggcggcaacuacaacuaccuguaccggcuguuccguaagagcaaccugaagccauucgagcgggacaucagcaccgagaucuaccaggccggcagcacccccugcaacgguguggagggcuuuaacugcuacuucccccugcagagcuacggcuuccagcccaccaacggcgugggcuaccagcccuaccgggugguggugcugagcuucgagcugcugcacgcccccgccaccgugugcggcccuaaaaagagcaccaaccuggugaagaacaagugcgugaacuucaauuucaacggccugaccggcaccggcgugcugaccgagagcaacaagaaguuccugcccuuccagcaguucggccgggauaucgccgacaccaccgacgcagugcgggacccccagacccuggagauccuggacaucaccccaugcagcuucggcggcgugagcgucaucacccccggcacaaacaccagcaaccagguggccgugcuguaccagggagugaacugcaccgaggugcccguggccauccacgccgaccagcugacccccaccuggcggguguacagcaccggcagcaacguguuccagacccgggccggcugccugaucggcgccgagcacgugaacaacuccuacgagugcgacauccccaucggcgcuggcaucugcgccagcuaccagacccagaccaacagcccccggcgggcccggagcguggccagccagagcaucaucgccuacaccaugagcuuaggcgccgagaacagcguggccuacagcaacaacagcaucgcgaucccuaccaacuucaccaucagcgugaccaccgagauacugcccgugagcaugaccaagaccagcguggacuguaccauguacaucugcggcgacagcaccgagugcagcaaccugcugcugcaguacggcagcuucugcacccagcugaaccgggcccugaccggcaucgccguggagcaggacaagaacacccaagagguguucgcccaggugaagcagaucuacaagacucccccaaucaaggacuucggcggcuucaacuucagccagauccugcccgaccccagcaagcccagcaagcggagcuucaucgaggaccugcuguucaacaaggugacccuggccgacgccggcuucaucaagcaguacggcgacugccugggggauaucgccgcucgggaccugaucugcgcccagaaguucaacggccugaccgugcugcccccucugcugaccgacgagaugaucgcccaguacaccagcgcccugcuugccggcaccaucaccagcggcuggaccuucggcgccggcgcagcccugcagauccccuucgccaugcagauggccuaccgguucaacggcaucggcgugacccagaacgugcuguacgagaaccagaagcugaucgccaaccaguucaacagcgccaucggcaagauccaggacagccugagcagcaccgccagcgcccugggcaagcugcaggacguggugaaccagaacgcucaggcccugaacacccuggugaagcagcugagcagcaacuucggcgccaucagcucagugcugaaugacauccugagcaggcuggaucccccagaggccgaggugcagaucgaccggcugaucaccggccggcugcagagccugcagaccuacgugacccagcagcugauccgggccgccgagauccgggccagcgccaaccuggcagccaccaagaugagcgagugcgugcugggccagagcaagcggguggacuuuugcggcaagggcuaccaccugaugagcuucccccagagcgcuccccacggcgugguguuccuccacgugacauacguccccgcccaggagaagaacuucaccaccgcccccgccauuugccacgacggcaaggcccacuucccccgggagggaguguucgugagcaacggcacccacugguucgugacccagcggaacuucuacgagccucagaucaucaccaccgacaacaccuucgugagcggcaacugcgacguggugaucggcaucgugaacaacaccguguacgacccccugcagcccgagcuggacagcuucaaggaggagcuggacaaguacuucaagaaccacaccagcccagacguggaccugggcgacaucagcggcaucaacgccagcguggugaacauccagaaggagaucgaccggcugaacgagguggccaagaaccugaacgagagccugaucgaccugcaggagcugggcaaguacgagcaguacaucaaguggcccugguacaucuggcugggcuucaucgccggccugaucgccaucgugauggugaccaucaugcugugcugcaugaccagcugcuguagcugccugaagggcugcugcagcugcggcagcugcugcaaguucgacgaggacgacagcgagcccgugcugaagggcgugaagcugcacuacaccugaggacuaguguccaccugucccuccugggcugcuggauugucucguuuuccugccaaauaaacaggaucagcgcuuuacagaucucaaaggcucuuuucagagccaccaaaaaaaaaaaaaaaaaaaaaaaaaaaaaaaaaaaaaaaaaaaaaaaaaaaaaaaaaaaaaaaaaaaaaaaaaaaaaaaaaaaaaaaaaaaaaaaaaaaaa

SEQ ID NO: 24013 - RNA, 4129 nt, Artificial Sequence
  SARS-CoV-2/Wuhan/WIV05/2019__EPI_ISL_402128 spike protein mRNA gc (1-1273)(K986P_V987P_A222V_D614G)
aggagacccgugacccggaaguuguacggcuacgcgacuuucccucccacaaacccucgcgcccuuccuuuccuacuugggcccggcagaaagcuuaccauguucguguuccuggugcugcugccccuggugagcagccagugcgugaaccugaccacccggacccagcugcccccugccuacaccaacagcuucacccggggcguguacuaccccgacaagguguuccggagcagcgugcugcacagcacccaggaccuguuccugcccuucuucagcaacgugaccugguuccacgccauccacgugagcggcaccaacggcaccaagcgguucgacaacccagugcugcccuucaacgacggcguguacuucgccagcaccgagaagucaaacaucauccggggcuggaucuucggcaccacccuggacagcaagacacagagccugcugaucgugaacaacgccaccaacguggugaucaaggugugcgaguuucaguucugcaacgaccccuuccugggcguguacuaccacaagaacaacaagagcuggauggagagcgaguuccgggucuacagcagcgcuaacaauugcaccuucgaguacgugagccagcccuuccugauggaccucgagggcaagcagggcaacuucaagaaccugcgggaguucguguucaagaacaucgauggcuacuucaagaucuacagcaagcacacccccaucaaccuggugcgggaccugccccagggauucagcgugcuggagccucugguggaccugcccaucggcaucaacaucaccagguuccagacccugcuggcccugcaccggagcuaccugacccccggcgacagcagcagcggcuggaccgccggcgccgccgccuacuacgugggcuaccugcagccacggaccuuccugcugaaguacaacgagaacggcaccaucaccgacgcaguggacugcgcccuggacccccugagcgagaccaagugcacccuaaagagcuucaccguggagaagggcaucuaccagaccagcaacuuccgggugcagcccacugagagcaucgugcgguuccccaacauuaccaaccugugucccuucggcgagguguucaacgccacccgguucgccagcguguacgccuggaaccggaagcggaucagcaacugcguggccgacuacagcgugcuguacaacagcgccagcuucagcaccuucaagugcuacggcgugagcccuaccaagcugaacgaccugugcuucaccaacguguacgccgacagcuucgugauccggggcgacgaggugcggcagaucgcucccggccagaccggcaagaucgccgacuacaacuacaagcugcccgacgacuucaccggcugcgugaucgccuggaacagcaacaaccuggacagcaaggugggcggcaacuacaacuaccuguaccggcuguuccguaagagcaaccugaagccauucgagcgggacaucagcaccgagaucuaccaggccggcagcacccccugcaacgguguggagggcuuuaacugcuacuucccccugcagagcuacggcuuccagcccaccaacggcgugggcuaccagcccuaccgggugguggugcugagcuucgagcugcugcacgcccccgccaccgugugcggcccuaaaaagagcaccaaccuggugaagaacaagugcgugaacuucaauuucaacggccugaccggcaccggcgugcugaccgagagcaacaagaaguuccugcccuuccagcaguucggccgggauaucgccgacaccaccgacgccgugcgggacccccagacccuggagauccuggacaucaccccaugcagcuucggcggcgucagcgugaucacccccggcacaaacaccagcaaccagguggcagugcuguaccagggagugaacugcaccgaggugcccguggccauccacgccgaccagcugacccccaccuggcggguguacagcaccggcagcaacguguuccagacccgggccggcugccugaucggcgccgagcacgugaacaacuccuacgagugcgacauccccaucggcgccggcaucugcgcuagcuaccagacccagaccaacagcccccggcgggcccggagcguggccagccagagcaucaucgccuacaccaugagcuuaggcgccgagaacagcguggccuacagcaacaacagcaucgccaucccuaccaacuucaccaucagcgugaccaccgagauacugcccgugagcaugaccaagaccagcguggacuguaccauguacaucugcggcgacagcaccgagugcagcaaccugcugcugcaguacggcagcuucugcacccagcugaaccgggcgcugaccggcaucgccguggagcaggacaagaacacccaagagguguucgcccaggugaagcagaucuacaagacucccccaaucaaggacuucggcggcuucaacuucagccagauccugcccgaccccagcaagcccagcaagcggagcuucaucgaggaccugcuguucaacaaggugacccuggccgacgccggcuucaucaagcaguacggcgacugccugggggauaucgccgcccgggaccugaucugcgcucagaaguucaacggccugaccgugcugcccccucugcugaccgacgagaugaucgcccaguacaccagcgcccugcuugccggcaccaucaccagcggcuggaccuucggcgccggcgccgcacugcagauccccuucgccaugcagauggccuaccgguucaacggcaucggcgugacccagaacgugcuguacgagaaccagaagcugaucgccaaccaguucaacagcgccaucggcaagauccaggacagccugagcagcaccgccagcgcccugggcaagcugcaggacguggugaaccagaacgcccaggcucugaacacccuggugaagcagcugagcagcaacuucggcgccaucagcucagugcugaaugacauccugagcaggcuggaucccccagaggccgaggugcagaucgaccggcugaucaccggccggcugcagagccugcagaccuacgugacccagcagcugauccgggccgccgagauccgggccagcgccaaccuggccgcaaccaagaugagcgagugcgugcugggccagagcaagcggguggacuuuugcggcaagggcuaccaccugaugagcuucccccagagcgcuccccacggcgugguguuccuccacgucacauacgugcccgcccaggagaagaacuucaccaccgcccccgccauuugccacgacggcaaggcccacuucccccgggagggaguguucgugagcaacggcacccacugguucgugacccagcggaacuucuacgagccucagaucaucaccaccgacaacaccuucgugagcggcaacugcgacguggugaucggcaucgugaacaacaccguguacgacccccugcagcccgagcuggacagcuucaaggaggagcuggacaaguacuucaagaaccacaccagcccagacguggaccugggcgacaucagcggcaucaacgccagcguggugaacauccagaaggagaucgaccggcugaacgagguggccaagaaccugaacgagagccugaucgaccugcaggagcugggcaaguacgagcaguacaucaaguggcccugguacaucuggcugggcuucaucgccggccugaucgccaucgugauggugaccaucaugcugugcugcaugaccagcugcuguagcugccugaagggcugcugcagcugcggcagcugcugcaaguucgacgaggacgacagcgagcccgugcugaagggcgugaagcugcacuacaccugaggacuaguguccaccugucccuccugggcugcuggauugucucguuuuccugccaaauaaacaggaucagcgcuuuacagaucucaaaggcucuuuucagagccaccaaaaaaaaaaaaaaaaaaaaaaaaaaaaaaaaaaaaaaaaaaaaaaaaaaaaaaaaaaaaaaaaaaaaaaaaaaaaaaaaaaaaaaaaaaaaaaaaaaaaa

SEQ ID NO: 24014 - RNA, 4129 nt, Artificial Sequence
  SARS-CoV-2/Wuhan/WIV05/2019__EPI_ISL_402128 spike protein mRNA gc (1-1273)(K986P_V987P_N439K_D614G)
aggagacccgugacccggaaguuguacggcuacgcgacuuucccucccacaaacccucgcgcccuuccuuuccuacuugggcccggcagaaagcuuaccauguucguguuccuggugcugcugccccuggugagcagccagugcgugaaccugaccacccggacccagcugcccccugccuacaccaacagcuucacccggggcguguacuaccccgacaagguguuccggagcagcgugcugcacagcacccaggaccuguuccugcccuucuucagcaacgugaccugguuccacgccauccacgugagcggcaccaacggcaccaagcgguucgacaacccagugcugcccuucaacgacggcguguacuucgccagcaccgagaagucaaacaucauccggggcuggaucuucggcaccacccuggacagcaagacacagagccugcugaucgugaacaacgccaccaacguggugaucaaggugugcgaguuucaguucugcaacgaccccuuccugggcguguacuaccacaagaacaacaagagcuggauggagagcgaguuccgggucuacagcagcgcuaacaauugcaccuucgaguacgugagccagcccuuccugauggaccucgagggcaagcagggcaacuucaagaaccugcgggaguucguguucaagaacaucgauggcuacuucaagaucuacagcaagcacacccccaucaaccuggugcgggaccugccccagggauucagcgcccuggagccucugguggaccugcccaucggcaucaacaucaccagguuccagacccugcuggcccugcaccggagcuaccugacccccggcgacagcagcagcggcuggaccgccggcgccgccgcauacuacgugggcuaccugcagccacggaccuuccugcugaaguacaacgagaacggcaccaucaccgacgccguggacugcgcccuggacccccugagcgagaccaagugcacccuaaagagcuucaccguggagaagggcaucuaccagaccagcaacuuccgggugcagcccacugagagcaucgugcgguuccccaacauuaccaaccugugucccuucggcgagguguucaacgccacccgguucgccagcguguacgccuggaaccggaagcggaucagcaacugcguggccgacuacagcgugcuguacaacagcgccagcuucagcaccuucaagugcuacggcgugagcccuaccaagcugaacgaccugugcuucaccaacguguacgcugacagcuucgugauccggggcgacgaggugcggcagaucgcccccggccagaccggcaagaucgccgacuacaacuacaagcugcccgacgacuucaccggcugcgugaucgccuggaacagcaagaaccuggacagcaaggugggcggcaacuacaacuaccuguaccggcuguuccguaagagcaaccugaagccauucgagcgggacaucagcaccgagaucuaccaggccggcagcacccccugcaacgguguggagggcuuuaacugcuacuucccccugcagagcuacggcuuccagcccaccaacggcgugggcuaccagcccuaccgggugguggugcugagcuucgagcugcugcacgcccccgccaccgugugcggcccuaaaaagagcaccaaccuggugaagaacaagugcgugaacuucaacuucaauggccugaccggcaccggcgugcugaccgagagcaacaagaaguuccugcccuuccagcaguucggccgggauaucgccgacaccaccgacgcagugcgggacccccagacccuggagauccuggacaucaccccaugcagcuucggcggcgugagcgucaucacccccggcacaaacaccagcaaccagguggccgugcuguaccagggagugaacugcaccgaggugcccguggccauccacgccgaccagcugacccccaccuggcggguguacagcaccggcagcaacguguuccagacccgggccggcugccugaucggcgccgagcacgugaacaacuccuacgagugcgacauccccaucggcgcuggcaucugcgccagcuaccagacccagaccaacagcccccggcgggcccggagcguggccagccagagcaucaucgccuacaccaugagcuuaggcgccgagaacagcguggccuacagcaacaacagcaucgcgaucccuaccaacuucaccaucagcgugaccaccgagauacugcccgugagcaugaccaagaccagcguggacuguaccauguacaucugcggcgacagcaccgagugcagcaaccugcugcugcaguacggcagcuucugcacccagcugaaccgggcccugaccggcaucgccguggagcaggacaagaacacccaagagguguucgcccaggugaagcagaucuacaagacucccccaaucaaggacuucggcggcuucaacuucagccagauccugcccgaccccagcaagcccagcaagcggagcuucaucgaggaccugcuguucaacaaggugacccuggccgacgccggcuucaucaagcaguacggcgacugccugggggauaucgccgcucgggaccugaucugcgcccagaaguucaacggccugaccgugcugcccccucugcugaccgacgagaugaucgcccaguacaccagcgcccugcuugccggcaccaucaccagcggcuggaccuucggcgccggcgcagcccugcagauccccuucgccaugcagauggccuaccgguucaacggcaucggcgugacccagaacgugcuguacgagaaccagaagcugaucgccaaccaguucaacagcgccaucggcaagauccaggacagccugagcagcaccgccagcgcccugggcaagcugcaggacguggugaaccagaacgcucaggcccugaacacccuggugaagcagcugagcagcaacuucggcgccaucagcucagugcugaacgacauccugagcaggcuggaucccccagaggccgaggugcagaucgaccggcugaucaccggccggcugcagagccugcagaccuacgugacccagcagcugauccgggccgccgagauccgggccagcgccaaucuggcagccaccaagaugagcgagugcgugcugggccagagcaagcggguggacuuuugcggcaagggcuaccaccugaugagcuucccccagagcgcuccccacggcgugguguuccuccacgugacauacguccccgcccaggagaagaacuucaccaccgcccccgccauuugccacgacggcaaggcccacuucccccgggagggaguguucgugagcaacggcacccacugguucgugacccagcggaacuucuacgagccucagaucaucaccaccgacaacaccuucgugagcggcaacugcgacguggugaucggcaucgugaacaacaccguguacgacccccugcagcccgagcuggacagcuucaaggaggagcuggacaaguacuucaagaaccacaccagcccagacguggaccugggcgacaucagcggcaucaacgccagcguggugaacauccagaaggagaucgaccggcugaacgagguggccaagaaccugaacgagagccugaucgaccugcaggagcugggcaaguacgagcaguacaucaaguggcccugguacaucuggcugggcuucaucgccggccugaucgccaucgugauggugaccaucaugcugugcugcaugaccagcugcuguagcugccugaagggcugcugcagcugcggcagcugcugcaaguucgacgaggacgacagcgagcccgugcugaagggcgugaagcugcacuacaccugaggacuaguguccaccugucccuccugggcugcuggauugucucguuuuccugccaaauaaacaggaucagcgcuuuacagaucucaaaggcucuuuucagagccaccaaaaaaaaaaaaaaaaaaaaaaaaaaaaaaaaaaaaaaaaaaaaaaaaaaaaaaaaaaaaaaaaaaaaaaaaaaaaaaaaaaaaaaaaaaaaaaaaaaaaa

SEQ ID NO: 24015 - RNA, 4129 nt, Artificial Sequence
  SARS-CoV-2/Wuhan/WIV05/2019__EPI_ISL_402128 spike protein mRNA gc (1-1273)(K986P_V987P_S477N_D614G)
aggagacccgugacccggaaguuguacggcuacgcgacuuucccucccacaaacccucgcgcccuuccuuuccuacuugggcccggcagaaagcuuaccauguucguguuccuggugcugcugccccuggugagcagccagugcgugaaccugaccacccggacccagcugcccccugccuacaccaacagcuucacccggggcguguacuaccccgacaagguguuccggagcagcgugcugcacagcacccaggaccuguuccugcccuucuucagcaacgugaccugguuccacgccauccacgugagcggcaccaacggcaccaagcgguucgacaacccagugcugcccuucaacgacggcguguacuucgccagcaccgagaagucaaacaucauccggggcuggaucuucggcaccacccuggacagcaagacacagagccugcugaucgugaacaacgccaccaacguggugaucaaggugugcgaguuucaguucugcaacgaccccuuccugggcguguacuaccacaagaacaacaagagcuggauggagagcgaguuccgggucuacagcagcgcuaacaauugcaccuucgaguacgugagccagcccuuccugauggaccucgagggcaagcagggcaacuucaagaaccugcgggaguucguguucaagaacaucgauggcuacuucaagaucuacagcaagcacacccccaucaaccuggugcgggaccugccccagggauucagcgcccuggagccucugguggaccugcccaucggcaucaacaucaccagguuccagacccugcuggcccugcaccggagcuaccugacccccggcgacagcagcagcggcuggaccgccggcgccgccgcauacuacgugggcuaccugcagccacggaccuuccugcugaaguacaacgagaacggcaccaucaccgacgccguggacugcgcccuggacccccugagcgagaccaagugcacccuaaagagcuucaccguggagaagggcaucuaccagaccagcaacuuccgggugcagcccacugagagcaucgugcgguuccccaacauuaccaaccugugucccuucggcgagguguucaacgccacccgguucgccagcguguacgccuggaaccggaagcggaucagcaacugcguggccgacuacagcgugcuguacaacagcgccagcuucagcaccuucaagugcuacggcgugagcccuaccaagcugaacgaccugugcuucaccaacguguacgcugacagcuucgugauccggggcgacgaggugcggcagaucgcccccggccagaccggcaagaucgccgacuacaacuacaagcugcccgacgacuucaccggcugcgugaucgccuggaacagcaacaaccuggacagcaaggugggcggcaacuacaacuaccuguaccggcuguuccguaagagcaaccugaagccauucgagcgggacaucagcaccgagaucuaccaggccggcaacacccccugcaacgguguggagggcuuuaacugcuacuucccccugcagagcuacggcuuccagcccaccaacggcgugggcuaccagcccuaccgggugguggugcugagcuucgagcugcugcacgcccccgccaccgugugcggcccuaaaaagagcaccaaccuggugaagaacaagugcgugaauuucaacuucaacggccugaccggcaccggcgugcugaccgagagcaacaagaaguuccugcccuuccagcaguucggccgggauaucgccgacaccaccgacgcagugcgggacccccagacccuggagauccuggacaucaccccaugcagcuucggcggcgugagcgucaucacccccggcacaaacaccagcaaccagguggccgugcuguaccagggagugaacugcaccgaggugcccguggccauccacgccgaccagcugacccccaccuggcggguguacagcaccggcagcaacguguuccagacccgggccggcugccugaucggcgccgagcacgugaacaacagcuacgagugcgacauccccaucggcgcuggcaucugcgccuccuaccagacccagaccaacagcccccggcgggcccggagcguggccagccagagcaucaucgccuacaccaugagcuuaggcgccgagaacagcguggccuacagcaacaacagcaucgcgaucccuaccaacuucaccaucagcgugaccaccgagauacugcccgugagcaugaccaagaccagcguggacuguaccauguacaucugcggcgacagcaccgagugcagcaaccugcugcugcaguacggcagcuucugcacccagcugaaccgggcccugaccggcaucgccguggagcaggacaagaacacccaagagguguucgcccaggugaagcagaucuacaagacucccccaaucaaggacuucggcggcuucaacuucagccagauccugcccgaccccagcaagcccagcaagcggagcuucaucgaggaccugcuguucaacaaggugacccuggccgacgccggcuucaucaagcaguacggcgacugccugggggauaucgccgcucgggaccugaucugcgcccagaaguucaacggccugaccgugcugcccccucugcugaccgacgagaugaucgcccaguacaccagcgcccugcuugccggcaccaucaccagcggcuggaccuucggcgccggcgcagcccugcagauccccuucgccaugcagauggccuaccgguucaacggcaucggcgugacccagaacgugcuguacgagaaccagaagcugaucgccaaccaguucaacagcgccaucggcaagauccaggacagccugagcagcaccgccagcgcccugggcaagcugcaggacguggugaaccagaacgcucaggcccugaacacccuggugaagcagcugagcagcaauuucggcgccaucagcagcgugcugaacgacauccugucaaggcuggaucccccagaggccgaggugcagaucgaccggcugaucaccggccggcugcagagccugcagaccuacgugacccagcagcugauccgggccgccgagauccgggccagcgccaaccuggcagccaccaagaugagcgagugcgugcugggccagagcaagcggguggacuuuugcggcaagggcuaccaccugaugagcuucccccagagcgcuccccacggcgugguguuccuccacgugacauacguccccgcccaggagaagaacuucaccaccgcccccgccauuugccacgacggcaaggcccacuucccccgggagggaguguucgugagcaacggcacccacugguucgugacccagcggaacuucuacgagccucagaucaucaccaccgacaacaccuucgugagcggcaacugcgacguggugaucggcaucgugaacaacaccguguacgacccccugcagcccgagcuggacagcuucaaggaggagcuggacaaguacuucaagaaccacaccagcccagacguggaccugggcgacaucagcggcaucaacgccagcguggugaacauccagaaggagaucgaccggcugaacgagguggccaagaaccugaacgagagccugaucgaccugcaggagcugggcaaguacgagcaguacaucaaguggcccugguacaucuggcugggcuucaucgccggccugaucgccaucgugauggugaccaucaugcugugcugcaugaccagcugcuguagcugccugaagggcugcugcagcugcggcagcugcugcaaguucgacgaggacgacagcgagcccgugcugaagggcgugaagcugcacuacaccugaggacuaguguccaccugucccuccugggcugcuggauugucucguuuuccugccaaauaaacaggaucagcgcuuuacagaucucaaaggcucuuuucagagccaccaaaaaaaaaaaaaaaaaaaaaaaaaaaaaaaaaaaaaaaaaaaaaaaaaaaaaaaaaaaaaaaaaaaaaaaaaaaaaaaaaaaaaaaaaaaaaaaaaaaaa

SEQ ID NO: 24016 - RNA, 4129 nt, Artificial Sequence
  SARS-CoV-2/Wuhan/WIV05/2019__EPI_ISL_402128 spike protein mRNA gc (1-1273)(K986P_V987P_N501Y_D614G)
aggagacccgugacccggaaguuguacggcuacgcgacuuucccucccacaaacccucgcgcccuuccuuuccuacuugggcccggcagaaagcuuaccauguucguguuccuggugcugcugccccuggugagcagccagugcgugaaccugaccacccggacccagcugcccccugccuacaccaacagcuucacccggggcguguacuaccccgacaagguguuccggagcagcgugcugcacagcacccaggaccuguuccugcccuucuucagcaacgugaccugguuccacgccauccacgugagcggcaccaacggcaccaagcgguucgacaacccagugcugcccuucaacgacggcguguacuucgccagcaccgagaagucaaacaucauccggggcuggaucuucggcaccacccuggacagcaagacacagagccugcugaucgugaacaacgccaccaacguggugaucaaggugugcgaguuucaguucugcaacgaccccuuccugggcguguacuaccacaagaacaacaagagcuggauggagagcgaguuccgggucuacagcagcgcuaacaauugcaccuucgaguacgugagccagcccuuccugauggaccucgagggcaagcagggcaacuucaagaaccugcgggaguucguguucaagaacaucgauggcuacuucaagaucuacagcaagcacacccccaucaaccuggugcgggaccugccccagggauucagcgcccuggagccucugguggaccugcccaucggcaucaacaucaccagguuccagacccugcuggcccugcaccggagcuaccugacccccggcgacagcagcagcggcuggaccgccggcgccgccgcauacuacgugggcuaccugcagccacggaccuuccugcugaaguacaacgagaacggcaccaucaccgacgccguggacugcgcccuggacccccugagcgagaccaagugcacccuaaagagcuucaccguggagaagggcaucuaccagaccagcaacuuccgggugcagcccacugagagcaucgugcgguuccccaacauuaccaaccugugucccuucggcgagguguucaacgccacccgguucgccagcguguacgccuggaaccggaagcggaucagcaacugcguggccgacuacagcgugcuguacaacagcgccagcuucagcaccuucaagugcuacggcgugagcccuaccaagcugaacgaccugugcuucaccaacguguacgcugacagcuucgugauccggggcgacgaggugcggcagaucgcccccggccagaccggcaagaucgccgacuacaacuacaagcugcccgacgacuucaccggcugcgugaucgccuggaacagcaacaaccuggacagcaaggugggcggcaacuacaacuaccuguaccggcuguuccguaagagcaaccugaagccauucgagcgggacaucagcaccgagaucuaccaggccggcagcacccccugcaacgguguggagggcuuuaacugcuacuucccccugcagagcuacggcuuccagcccaccuacggcgugggcuaccagcccuaccgggugguggugcugagcuucgagcugcugcacgcccccgccaccgugugcggcccuaaaaagagcaccaaccuggugaagaacaagugcgugaacuucaacuucaauggccugaccggcaccggcgugcugaccgagagcaacaagaaguuccugcccuuccagcaguucggccgggauaucgccgacaccaccgacgcagugcgggacccccagacccuggagauccuggacaucaccccaugcagcuucggcggcgugagcgucaucacccccggcacaaacaccagcaaccagguggccgugcuguaccagggagugaacugcaccgaggugcccguggccauccacgccgaccagcugacccccaccuggcggguguacagcaccggcagcaacguguuccagacccgggccggcugccugaucggcgccgagcacgugaacaacuccuacgagugcgacauccccaucggcgcuggcaucugcgccagcuaccagacccagaccaacagcccccggcgggcccggagcguggccagccagagcaucaucgccuacaccaugagcuuaggcgccgagaacagcguggccuacagcaacaacagcaucgcgaucccuaccaacuucaccaucagcgugaccaccgagauacugcccgugagcaugaccaagaccagcguggacuguaccauguacaucugcggcgacagcaccgagugcagcaaccugcugcugcaguacggcagcuucugcacccagcugaaccgggcccugaccggcaucgccguggagcaggacaagaacacccaagagguguucgcccaggugaagcagaucuacaagacucccccaaucaaggacuucggcggcuucaacuucagccagauccugcccgaccccagcaagcccagcaagcggagcuucaucgaggaccugcuguucaacaaggugacccuggccgacgccggcuucaucaagcaguacggcgacugccugggggauaucgccgcucgggaccugaucugcgcccagaaguucaacggccugaccgugcugcccccucugcugaccgacgagaugaucgcccaguacaccagcgcccugcuugccggcaccaucaccagcggcuggaccuucggcgccggcgcagcccugcagauccccuucgccaugcagauggccuaccgguucaacggcaucggcgugacccagaacgugcuguacgagaaccagaagcugaucgccaaccaguucaacagcgccaucggcaagauccaggacagccugagcagcaccgccagcgcccugggcaagcugcaggacguggugaaccagaacgcucaggcccugaacacccuggugaagcagcugagcagcaacuucggcgccaucagcucagugcugaacgacauccugagcaggcuggaucccccagaggccgaggugcagaucgaccggcugaucaccggccggcugcagagccugcagaccuacgugacccagcagcugauccgggccgccgagauccgggccagcgccaaucuggcagccaccaagaugagcgagugcgugcugggccagagcaagcggguggacuuuugcggcaagggcuaccaccugaugagcuucccccagagcgcuccccacggcgugguguuccuccacgugacauacguccccgcccaggagaagaacuucaccaccgcccccgccauuugccacgacggcaaggcccacuucccccgggagggaguguucgugagcaacggcacccacugguucgugacccagcggaacuucuacgagccucagaucaucaccaccgacaacaccuucgugagcggcaacugcgacguggugaucggcaucgugaacaacaccguguacgacccccugcagcccgagcuggacagcuucaaggaggagcuggacaaguacuucaagaaccacaccagcccagacguggaccugggcgacaucagcggcaucaacgccagcguggugaacauccagaaggagaucgaccggcugaacgagguggccaagaaccugaacgagagccugaucgaccugcaggagcugggcaaguacgagcaguacaucaaguggcccugguacaucuggcugggcuucaucgccggccugaucgccaucgugauggugaccaucaugcugugcugcaugaccagcugcuguagcugccugaagggcugcugcagcugcggcagcugcugcaaguucgacgaggacgacagcgagcccgugcugaagggcgugaagcugcacuacaccugaggacuaguguccaccugucccuccugggcugcuggauugucucguuuuccugccaaauaaacaggaucagcgcuuuacagaucucaaaggcucuuuucagagccaccaaaaaaaaaaaaaaaaaaaaaaaaaaaaaaaaaaaaaaaaaaaaaaaaaaaaaaaaaaaaaaaaaaaaaaaaaaaaaaaaaaaaaaaaaaaaaaaaaaaaa

SEQ ID NO: 24017 - RNA, 4123 nt, Artificial Sequence
  SARS-CoV-2/Wuhan/WIV05/2019__EPI_ISL_402128 spike protein mRNA gc (1-1273)(K986P_V987P_H69del_V70del_D614G)
aggagacccgugacccggaaguuguacggcuacgcgacuuucccucccacaaacccucgcgcccuuccuuuccuacuugggcccggcagaaagcuuaccauguucguguuccuggugcugcugccccuggugagcagccagugcgugaaccugaccacccggacccagcugcccccugccuacaccaacagcuucacccggggcguguacuaccccgacaagguguuccggagcagcgugcugcacagcacccaggaccuguuccugcccuucuucagcaacgugaccugguuccacgccaucagcggcaccaacggcaccaagcgguucgacaacccagugcugcccuucaacgacggcguguacuucgccagcaccgagaagucaaacaucauccggggcuggaucuucggcaccacccuggacagcaagacacagagccugcugaucgugaacaacgccaccaacguggugaucaaggugugcgaguuucaguucugcaacgaccccuuccugggcguguacuaccacaagaacaacaagagcuggauggagagcgaguuccggguguacagcagcgcuaacaauugcaccuucgaguacgucagccagcccuuccugauggaccucgagggcaagcagggcaacuucaagaaccugcgggaguucguguucaagaacaucgauggcuacuucaagaucuacagcaagcacacccccaucaaccuggugcgggaccugccccagggauucagcgcccuggagccucugguggaccugcccaucggcaucaacaucaccagguuccagacccugcuggcccugcaccggagcuaccugacccccggcgacagcagcagcggcuggaccgccggcgccgccgcauacuacgugggcuaccugcagccacggaccuuccugcugaaguacaacgagaacggcaccaucaccgacgccguggacugcgcccuggacccccugagcgagaccaagugcacccuaaagagcuucaccguggagaagggcaucuaccagaccagcaacuuccgggugcagcccacugagagcaucgugcgguuccccaacauuaccaaccugugucccuucggcgagguguucaacgccacccgguucgccagcguguacgccuggaaccggaagcggaucagcaacugcguggccgacuacagcgugcuguacaacagcgccagcuucagcaccuucaagugcuacggcgugagcccuaccaagcugaacgaccugugcuucaccaacguguacgcugacagcuucgugauccggggcgacgaggugcggcagaucgcccccggccagaccggcaagaucgccgacuacaacuacaagcugcccgacgacuucaccggcugcgugaucgccuggaacagcaacaaccuggacagcaaggugggcggcaacuacaacuaccuguaccggcuguuccguaagagcaaccugaagccauucgagcgggacaucagcaccgagaucuaccaggccggcagcacccccugcaacgguguggagggcuuuaacugcuacuucccccugcagagcuacggcuuccagcccaccaacggcgugggcuaccagcccuaccgggugguggugcugagcuucgagcugcugcacgcccccgccaccgugugcggcccuaaaaagagcaccaaccuggugaagaacaagugcgugaacuucaauuucaacggccugaccggcaccggcgugcugaccgagagcaacaagaaguuccugcccuuccagcaguucggccgggauaucgccgacaccaccgacgcagugcgggacccccagacccuggagauccuggacaucaccccaugcagcuucggcggcgugagcgugaucacccccggcacaaacaccagcaaccaggucgccgugcuguaccagggagugaacugcaccgaggugcccguggccauccacgccgaccagcugacccccaccuggcggguguacagcaccggcagcaacguguuccagacccgggccggcugccugaucggcgccgagcacgugaacaacuccuacgagugcgacauccccaucggcgcuggcaucugcgccagcuaccagacccagaccaacagcccccggcgggcccggagcguggccagccagagcaucaucgccuacaccaugagcuuaggcgccgagaacagcguggccuacagcaacaacagcaucgcgaucccuaccaacuucaccaucagcgugaccaccgagauacugcccgugagcaugaccaagaccagcguggacuguaccauguacaucugcggcgacagcaccgagugcagcaaccugcugcugcaguacggcagcuucugcacccagcugaaccgggcccugaccggcaucgccguggagcaggacaagaacacccaagagguguucgcccaggugaagcagaucuacaagacucccccaaucaaggacuucggcggcuucaacuucagccagauccugcccgaccccagcaagcccagcaagcggagcuucaucgaggaccugcuguucaacaaggugacccuggccgacgccggcuucaucaagcaguacggcgacugccugggggauaucgccgcucgggaccugaucugcgcccagaaguucaacggccugaccgugcugcccccucugcugaccgacgagaugaucgcccaguacaccagcgcccugcuugccggcaccaucaccagcggcuggaccuucggcgccggcgcagcccugcagauccccuucgccaugcagauggccuaccgguucaacggcaucggcgugacccagaacgugcuguacgagaaccagaagcugaucgccaaccaguucaacagcgccaucggcaagauccaggacagccugagcagcaccgccagcgcccugggcaagcugcaggacguggugaaccagaacgcucaggcccugaacacccuggugaagcagcugagcagcaacuucggcgccaucagcucagugcugaaugacauccugagcaggcuggaucccccagaggccgaggugcagaucgaccggcugaucaccggccggcugcagagccugcagaccuacgugacccagcagcugauccgggccgccgagauccgggccagcgccaaccuggcagccaccaagaugagcgagugcgugcugggccagagcaagcggguggacuuuugcggcaagggcuaccaccugaugagcuucccccagagcgcuccccacggcgugguguuccuccacgugacauacgugcccgcccaggagaagaacuucaccaccgcccccgccauuugccacgacggcaaggcccacuucccccgggagggagucuucgugagcaacggcacccacugguucgugacccagcggaacuucuacgagccucagaucaucaccaccgacaacaccuucgugagcggcaacugcgacguggugaucggcaucgugaacaacaccguguacgacccccugcagcccgagcuggacagcuucaaggaggagcuggacaaguacuucaagaaccacaccagcccagacguggaccugggcgacaucagcggcaucaacgccagcguggugaacauccagaaggagaucgaccggcugaacgagguggccaagaaccugaacgagagccugaucgaccugcaggagcugggcaaguacgagcaguacaucaaguggcccugguacaucuggcugggcuucaucgccggccugaucgccaucgugauggugaccaucaugcugugcugcaugaccagcugcuguagcugccugaagggcugcugcagcugcggcagcugcugcaaguucgacgaggacgacagcgagcccgugcugaagggcgugaagcugcacuacaccugaggacuaguguccaccugucccuccugggcugcuggauugucucguuuuccugccaaauaaacaggaucagcgcuuuacagaucucaaaggcucuuuucagagccaccaaaaaaaaaaaaaaaaaaaaaaaaaaaaaaaaaaaaaaaaaaaaaaaaaaaaaaaaaaaaaaaaaaaaaaaaaaaaaaaaaaaaaaaaaaaaaaaaaaaaa

SEQ ID NO: 24018 - RNA, 4129 nt, Artificial Sequence
  SARS-CoV-2/Wuhan/WIV05/2019__EPI_ISL_402128 spike protein mRNA gc (1-1273)(K986P_V987P_Y453F_D614G)
aggagacccgugacccggaaguuguacggcuacgcgacuuucccucccacaaacccucgcgcccuuccuuuccuacuugggcccggcagaaagcuuaccauguucguguuccuggugcugcugccccuggugagcagccagugcgugaaccugaccacccggacccagcugcccccugccuacaccaacagcuucacccggggcguguacuaccccgacaagguguuccggagcagcgugcugcacagcacccaggaccuguuccugcccuucuucagcaacgugaccugguuccacgccauccacgugagcggcaccaacggcaccaagcgguucgacaacccagugcugcccuucaacgacggcguguacuucgccagcaccgagaagucaaacaucauccggggcuggaucuucggcaccacccuggacagcaagacacagagccugcugaucgugaacaacgccaccaacguggugaucaaggugugcgaguuucaguucugcaacgaccccuuccugggcguguacuaccacaagaacaacaagagcuggauggagagcgaguuccgggucuacagcagcgcuaacaauugcaccuucgaguacgugagccagcccuuccugauggaccucgagggcaagcagggcaacuucaagaaccugcgggaguucguguucaagaacaucgauggcuacuucaagaucuacagcaagcacacccccaucaaccuggugcgggaccugccccagggauucagcgcccuggagccucugguggaccugcccaucggcaucaacaucaccagguuccagacccugcuggcccugcaccggagcuaccugacccccggcgacagcagcagcggcuggaccgccggcgccgccgcauacuacgugggcuaccugcagccacggaccuuccugcugaaguacaacgagaacggcaccaucaccgacgccguggacugcgcccuggacccccugagcgagaccaagugcacccuaaagagcuucaccguggagaagggcaucuaccagaccagcaacuuccgggugcagcccacugagagcaucgugcgguuccccaacauuaccaaccugugucccuucggcgagguguucaacgccacccgguucgccagcguguacgccuggaaccggaagcggaucagcaacugcguggccgacuacagcgugcuguacaacagcgccagcuucagcaccuucaagugcuacggcgugagcccuaccaagcugaacgaccugugcuucaccaacguguacgcugacagcuucgugauccggggcgacgaggugcggcagaucgcccccggccagaccggcaagaucgccgacuacaacuacaagcugcccgacgacuucaccggcugcgugaucgccuggaacagcaacaaccuggacagcaaggugggcggcaacuacaacuaccuguuccggcuguuccguaagagcaaccugaagccauuugagcgggacaucagcaccgagaucuaccaggccggcagcacccccugcaacgguguggagggcuucaacugcuacuucccccugcagagcuacggcuuccagcccaccaacggcgugggcuaccagcccuaccgggugguggugcugagcuucgagcugcugcacgcccccgccaccgugugcggcccuaaaaagagcaccaaccuggugaagaacaagugcgugaacuucaauuucaacggccugaccggcaccggcgugcugaccgagagcaacaagaaguuccugcccuuccagcaguucggccgggauaucgccgacaccaccgacgcagugcgggacccccagacccuggagauccuggacaucaccccaugcagcuucggcggcgugagcgucaucacccccggcacaaacaccagcaaccagguggccgugcuguaccagggagugaacugcaccgaggugcccguggccauccacgccgaccagcugacccccaccuggcggguguacagcaccggcagcaacguguuccagacccgggccggcugccugaucggcgccgagcacgugaacaacuccuacgagugcgacauccccaucggcgcuggcaucugcgccagcuaccagacccagaccaacagcccccggcgggcccggagcguggccagccagagcaucaucgccuacaccaugagcuuaggcgccgagaacagcguggccuacagcaacaacagcaucgcgaucccuaccaacuucaccaucagcgugaccaccgagauacugcccgugagcaugaccaagaccagcguggacuguaccauguacaucugcggcgacagcaccgagugcagcaaccugcugcugcaguacggcagcuucugcacccagcugaaccgggcccugaccggcaucgccguggagcaggacaagaacacccaagagguguucgcccaggugaagcagaucuacaagacucccccaaucaaggacuucggcggcuucaacuucagccagauccugcccgaccccagcaagcccagcaagcggagcuucaucgaggaccugcuguucaacaaggugacccuggccgacgccggcuucaucaagcaguacggcgacugccugggggauaucgccgcucgggaccugaucugcgcccagaaguucaacggccugaccgugcugcccccucugcugaccgacgagaugaucgcccaguacaccagcgcccugcuugccggcaccaucaccagcggcuggaccuucggcgccggcgcagcccugcagauccccuucgccaugcagauggccuaccgguucaacggcaucggcgugacccagaacgugcuguacgagaaccagaagcugaucgccaaccaguucaacagcgccaucggcaagauccaggacagccugagcagcaccgccagcgcccugggcaagcugcaggacguggugaaccagaacgcucaggcccugaacacccuggugaagcagcugagcagcaacuuuggcgccaucagcucagugcugaaugacauccugagcaggcuggaucccccagaggccgaggugcagaucgaccggcugaucaccggccggcugcagagccugcagaccuacgugacccagcagcugauccgggccgccgagauccgggccagcgccaaccuggcagccaccaagaugagcgagugcgugcugggccagagcaagcggguggacuucugcggcaagggcuaccaccugaugagcuucccccagagcgcuccccacggcgugguguuccuccacgugacauacguccccgcccaggagaagaacuucaccaccgcccccgccauuugccacgacggcaaggcccacuucccccgggagggaguguucgugagcaacggcacccacugguucgugacccagcggaacuucuacgagccucagaucaucaccaccgacaacaccuucgugagcggcaacugcgacguggugaucggcaucgugaacaacaccguguacgacccccugcagcccgagcuggacagcuucaaggaggagcuggacaaguacuucaagaaccacaccagcccagacguggaccugggcgacaucagcggcaucaacgccagcguggugaacauccagaaggagaucgaccggcugaacgagguggccaagaaccugaacgagagccugaucgaccugcaggagcugggcaaguacgagcaguacaucaaguggcccugguacaucuggcugggcuucaucgccggccugaucgccaucgugauggugaccaucaugcugugcugcaugaccagcugcuguagcugccugaagggcugcugcagcugcggcagcugcugcaaguucgacgaggacgacagcgagcccgugcugaagggcgugaagcugcacuacaccugaggacuaguguccaccugucccuccugggcugcuggauugucucguuuuccugccaaauaaacaggaucagcgcuuuacagaucucaaaggcucuuuucagagccaccaaaaaaaaaaaaaaaaaaaaaaaaaaaaaaaaaaaaaaaaaaaaaaaaaaaaaaaaaaaaaaaaaaaaaaaaaaaaaaaaaaaaaaaaaaaaaaaaaaaaa

SEQ ID NO: 24019 - RNA, 4129 nt, Artificial Sequence
  SARS-CoV-2/Wuhan/WIV05/2019__EPI_ISL_402128 spike protein mRNA gc (1-1273)(K986P_V987P_D614G_I692V)
aggagacccgugacccggaaguuguacggcuacgcgacuuucccucccacaaacccucgcgcccuuccuuuccuacuugggcccggcagaaagcuuaccauguucguguuccuggugcugcugccccuggugagcagccagugcgugaaccugaccacccggacccagcugcccccugccuacaccaacagcuucacccggggcguguacuaccccgacaagguguuccggagcagcgugcugcacagcacccaggaccuguuccugcccuucuucagcaacgugaccugguuccacgccauccacgugagcggcaccaacggcaccaagcgguucgacaacccagugcugcccuucaacgacggcguguacuucgccagcaccgagaagucaaacaucauccggggcuggaucuucggcaccacccuggacagcaagacacagagccugcugaucgugaacaacgccaccaacguggugaucaaggugugcgaguuucaguucugcaacgaccccuuccugggcguguacuaccacaagaacaacaagagcuggauggagagcgaguuccgggucuacagcagcgcuaacaauugcaccuucgaguacgugagccagcccuuccugauggaccucgagggcaagcagggcaacuucaagaaccugcgggaguucguguucaagaacaucgauggcuacuucaagaucuacagcaagcacacccccaucaaccuggugcgggaccugccccagggauucagcgcccuggagccucugguggaccugcccaucggcaucaacaucaccagguuccagacccugcuggcccugcaccggagcuaccugacccccggcgacagcagcagcggcuggaccgccggcgccgccgcauacuacgugggcuaccugcagccacggaccuuccugcugaaguacaacgagaacggcaccaucaccgacgccguggacugcgcccuggacccccugagcgagaccaagugcacccuaaagagcuucaccguggagaagggcaucuaccagaccagcaacuuccgggugcagcccacugagagcaucgugcgguuccccaacauuaccaaccugugucccuucggcgagguguucaacgccacccgguucgccagcguguacgccuggaaccggaagcggaucagcaacugcguggccgacuacagcgugcuguacaacagcgccagcuucagcaccuucaagugcuacggcgugagcccuaccaagcugaacgaccugugcuucaccaacguguacgcugacagcuucgugauccggggcgacgaggugcggcagaucgcccccggccagaccggcaagaucgccgacuacaacuacaagcugcccgacgacuucaccggcugcgugaucgccuggaacagcaacaaccuggacagcaaggugggcggcaacuacaacuaccuguaccggcuguuccguaagagcaaccugaagccauucgagcgggacaucagcaccgagaucuaccaggccggcagcacccccugcaacgguguggagggcuuuaacugcuacuucccccugcagagcuacggcuuccagcccaccaacggcgugggcuaccagcccuaccgggugguggugcugagcuucgagcugcugcacgcccccgccaccgugugcggcccuaaaaagagcaccaaccuggugaagaacaagugcgugaacuucaauuucaacggccugaccggcaccggcgugcugaccgagagcaacaagaaguuccugcccuuccagcaguucggccgggauaucgccgacaccaccgacgcagugcgggacccccagacccuggagauccuggacaucaccccaugcagcuucggcggcgugagcgucaucacccccggcacaaacaccagcaaccagguggccgugcuguaccagggagugaacugcaccgaggugcccguggccauccacgccgaccagcugacccccaccuggcggguguacagcaccggcagcaacguguuccagacccgggccggcugccugaucggcgccgagcacgugaacaacuccuacgagugcgacauccccaucggcgcuggcaucugcgccagcuaccagacccagaccaacagcccccggcgggcccggagcguggccagccagagcgugaucgccuacaccaugagcuuaggcgccgagaacagcguggccuacagcaacaacagcaucgcgaucccuaccaacuucaccaucagcgugaccaccgagauccugcccgugagcaugaccaagaccagcguggacuguaccauguacauaugcggcgacagcaccgagugcagcaaccugcugcugcaguacggcagcuucugcacccagcugaaccgggcccugaccggcaucgccguggagcaggacaagaacacccaagagguguucgcccaggugaagcagaucuacaagacucccccaaucaaggacuucggcggcuucaacuucagccagauccugcccgaccccagcaagcccagcaagcggagcuucaucgaggaccugcuguucaacaaggugacccuggccgacgccggcuucaucaagcaguacggcgacugccugggggauaucgccgcucgggaccugaucugcgcccagaaguucaacggccugaccgugcugcccccucugcugaccgacgagaugaucgcccaguacaccagcgcccugcuugccggcaccaucaccagcggcuggaccuucggcgccggcgcagcccugcagauccccuucgccaugcagauggccuaccgguucaacggcaucggcgugacccagaacgugcuguacgagaaccagaagcugaucgccaaccaguucaacagcgccaucggcaagauccaggacagccugagcagcaccgccagcgcccugggcaagcugcaggacguggugaaccagaacgcucaggcccugaacacccuggugaagcagcugagcagcaacuucggcgccaucagcucagugcugaaugacauccugagcaggcuggaucccccagaggccgaggugcagaucgaccggcugaucaccggccggcugcagagccugcagaccuacgugacccagcagcugauccgggccgccgagauccgggccagcgccaaccuggcagccaccaagaugagcgagugcgugcugggccagagcaagcggguggacuuuugcggcaagggcuaccaccugaugagcuucccccagagcgcuccccacggcgugguguuccuccacgucacauacgugcccgcccaggagaagaacuucaccaccgcccccgccaucugccacgacggcaaggcccacuucccccgggagggaguguucgugagcaacggcacccacugguucgugacccagcggaacuucuacgagccucagauuaucaccaccgacaacaccuucgugagcggcaacugcgacguggugaucggcaucgugaacaacaccguguacgacccccugcagcccgagcuggacagcuucaaggaggagcuggacaaguacuucaagaaccacaccagcccagacguggaccugggcgacaucagcggcaucaacgccagcguggugaacauccagaaggagaucgaccggcugaacgagguggccaagaaccugaacgagagccugaucgaccugcaggagcugggcaaguacgagcaguacaucaaguggcccugguacaucuggcugggcuucaucgccggccugaucgccaucgugauggugaccaucaugcugugcugcaugaccagcugcuguagcugccugaagggcugcugcagcugcggcagcugcugcaaguucgacgaggacgacagcgagcccgugcugaagggcgugaagcugcacuacaccugaggacuaguguccaccugucccuccugggcugcuggauugucucguuuuccugccaaauaaacaggaucagcgcuuuacagaucucaaaggcucuuuucagagccaccaaaaaaaaaaaaaaaaaaaaaaaaaaaaaaaaaaaaaaaaaaaaaaaaaaaaaaaaaaaaaaaaaaaaaaaaaaaaaaaaaaaaaaaaaaaaaaaaaaaaa

SEQ ID NO: 24020 - RNA, 4129 nt, Artificial Sequence
  SARS-CoV-2/Wuhan/WIV05/2019__EPI_ISL_402128 spike protein mRNA gc (1-1273)(K986P_V987P_D614G_M1229I)
aggagacccgugacccggaaguuguacggcuacgcgacuuucccucccacaaacccucgcgcccuuccuuuccuacuugggcccggcagaaagcuuaccauguucguguuccuggugcugcugccccuggugagcagccagugcgugaaccugaccacccggacccagcugcccccugccuacaccaacagcuucacccggggcguguacuaccccgacaagguguuccggagcagcgugcugcacagcacccaggaccuguuccugcccuucuucagcaacgugaccugguuccacgccauccacgugagcggcaccaacggcaccaagcgguucgacaacccagugcugcccuucaacgacggcguguacuucgccagcaccgagaagucaaacaucauccggggcuggaucuucggcaccacccuggacagcaagacacagagccugcugaucgugaacaacgccaccaacguggugaucaaggugugcgaguuucaguucugcaacgaccccuuccugggcguguacuaccacaagaacaacaagagcuggauggagagcgaguuccgggucuacagcagcgcuaacaauugcaccuucgaguacgugagccagcccuuccugauggaccucgagggcaagcagggcaacuucaagaaccugcgggaguucguguucaagaacaucgauggcuacuucaagaucuacagcaagcacacccccaucaaccuggugcgggaccugccccagggauucagcgcccuggagccucugguggaccugcccaucggcaucaacaucaccagguuccagacccugcuggcccugcaccggagcuaccugacccccggcgacagcagcagcggcuggaccgccggcgccgccgcauacuacgugggcuaccugcagccacggaccuuccugcugaaguacaacgagaacggcaccaucaccgacgccguggacugcgcccuggacccccugagcgagaccaagugcacccuaaagagcuucaccguggagaagggcaucuaccagaccagcaacuuccgggugcagcccacugagagcaucgugcgguuccccaacauuaccaaccugugucccuucggcgagguguucaacgccacccgguucgccagcguguacgccuggaaccggaagcggaucagcaacugcguggccgacuacagcgugcuguacaacagcgccagcuucagcaccuucaagugcuacggcgugagcccuaccaagcugaacgaccugugcuucaccaacguguacgcugacagcuucgugauccggggcgacgaggugcggcagaucgcccccggccagaccggcaagaucgccgacuacaacuacaagcugcccgacgacuucaccggcugcgugaucgccuggaacagcaacaaccuggacagcaaggugggcggcaacuacaacuaccuguaccggcuguuccguaagagcaaccugaagccauucgagcgggacaucagcaccgagaucuaccaggccggcagcacccccugcaacgguguggagggcuuuaacugcuacuucccccugcagagcuacggcuuccagcccaccaacggcgugggcuaccagcccuaccgggugguggugcugagcuucgagcugcugcacgcccccgccaccgugugcggcccuaaaaagagcaccaaccuggugaagaacaagugcgugaacuucaauuucaacggccugaccggcaccggcgugcugaccgagagcaacaagaaguuccugcccuuccagcaguucggccgggauaucgccgacaccaccgacgcagugcgggacccccagacccuggagauccuggacaucaccccaugcagcuucggcggcgugagcgucaucacccccggcacaaacaccagcaaccagguggccgugcuguaccagggagugaacugcaccgaggugcccguggccauccacgccgaccagcugacccccaccuggcggguguacagcaccggcagcaacguguuccagacccgggccggcugccugaucggcgccgagcacgugaacaacuccuacgagugcgacauccccaucggcgcuggcaucugcgccagcuaccagacccagaccaacagcccccggcgggcccggagcguggccagccagagcaucaucgccuacaccaugagcuuaggcgccgagaacagcguggccuacagcaacaacagcaucgcgaucccuaccaacuucaccaucagcgugaccaccgagauacugcccgugagcaugaccaagaccagcguggacuguaccauguacaucugcggcgacagcaccgagugcagcaaccugcugcugcaguacggcagcuucugcacccagcugaaccgggcccugaccggcaucgccguggagcaggacaagaacacccaagagguguucgcccaggugaagcagaucuacaagacucccccaaucaaggacuucggcggcuucaacuucagccagauccugcccgaccccagcaagcccagcaagcggagcuucaucgaggaccugcuguucaacaaggugacccuggccgacgccggcuucaucaagcaguacggcgacugccugggggauaucgccgcucgggaccugaucugcgcccagaaguucaacggccugaccgugcugcccccucugcugaccgacgagaugaucgcccaguacaccagcgcccugcuugccggcaccaucaccagcggcuggaccuucggcgccggcgcagcccugcagauccccuucgccaugcagauggccuaccgguucaacggcaucggcgugacccagaacgugcuguacgagaaccagaagcugaucgccaaccaguucaacagcgccaucggcaagauccaggacagccugagcagcaccgccagcgcccugggcaagcugcaggacguggugaaccagaacgcucaggcccugaacacccuggugaagcagcugagcagcaacuucggcgccaucagcucagugcugaaugacauccugagcaggcuggaucccccagaggccgaggugcagaucgaccggcugaucaccggccggcugcagagccugcagaccuacgugacccagcagcugauccgggccgccgagauccgggccagcgccaaccuggcagccaccaagaugagcgagugcgugcugggccagagcaagcggguggacuuuugcggcaagggcuaccaccugaugagcuucccccagagcgcuccccacggcgugguguuccuccacgugacauacguccccgcccaggagaagaacuucaccaccgcccccgccauuugccacgacggcaaggcccacuucccccgggagggaguguucgugagcaacggcacccacugguucgugacccagcggaacuucuacgagccucagaucaucaccaccgacaacaccuucgugagcggcaacugcgacguggugaucggcaucgugaacaacaccguguacgacccccugcagcccgagcuggacagcuucaaggaggagcuggacaaguacuucaagaaccacaccagcccagacguggaccugggcgacaucagcggcaucaacgccagcguggugaacauccagaaggagaucgaccggcugaacgagguggccaagaaccugaacgagagccugaucgaccugcaggagcugggcaaguacgagcaguacaucaaguggcccugguacaucuggcugggcuucaucgccggccugaucgccaucgugaucgugaccaucaugcugugcugcaugaccagcugcuguagcugccugaagggcugcugcagcugcggcagcugcugcaaguucgacgaggacgacagcgagcccgugcugaagggcgugaagcugcacuacaccugaggacuaguguccaccugucccuccugggcugcuggauugucucguuuuccugccaaauaaacaggaucagcgcuuuacagaucucaaaggcucuuuucagagccaccaaaaaaaaaaaaaaaaaaaaaaaaaaaaaaaaaaaaaaaaaaaaaaaaaaaaaaaaaaaaaaaaaaaaaaaaaaaaaaaaaaaaaaaaaaaaaaaaaaaaa

SEQ ID NO: 24021 - RNA, 4123 nt, Artificial Sequence
  SARS-CoV-2/Wuhan/WIV05/2019__EPI_ISL_402128 spike protein mRNA gc (1-1273)(K986P_V987P_H69del_V70del_A222V_Y453F_S477N_D614G_I692V)
aggagacccgugacccggaaguuguacggcuacgcgacuuucccucccacaaacccucgcgcccuuccuuuccuacuugggcccggcagaaagcuuaccauguucguguuccuggugcugcugccccuggugagcagccagugcgugaaccugaccacccggacccagcugcccccugccuacaccaacagcuucacccggggcguguacuaccccgacaagguguuccggagcagcgugcugcacagcacccaggaccuguuccugcccuucuucagcaacgugaccugguuccacgccaucagcggcaccaacggcaccaagcgguucgacaacccagugcugcccuucaacgacggcguguacuucgccagcaccgagaagucaaacaucauccggggcuggaucuucggcaccacccuggacagcaagacacagagccugcugaucgugaacaacgccaccaacguggugaucaaggugugcgaguuucaguucugcaacgaccccuuccugggcguguacuaccacaagaacaacaagagcuggauggagagcgaguuccggguguacagcagcgcuaacaauugcaccuucgaguacgucagccagcccuuccugauggaccucgagggcaagcagggcaacuucaagaaccugcgggaguucguguucaagaacaucgauggcuacuucaagaucuacagcaagcacacccccaucaaccuggugcgggaccugccccagggauucagcgugcuggagccucugguggaccugcccaucggcaucaacaucaccagguuccagacccugcuggcccugcaccggagcuaccugacccccggcgacagcagcagcggcuggaccgccggcgccgccgccuacuacgugggcuaccugcagccacggaccuuccugcugaaguacaacgagaacggcaccaucaccgacgcaguggacugcgcccuggacccccugagcgagaccaagugcacccuaaagagcuucaccguggagaagggcaucuaccagaccagcaacuuccgggugcagcccacugagagcaucgugcgguuccccaacauuaccaaccugugucccuucggcgagguguucaacgccacccgguucgccagcguguacgccuggaaccggaagcggaucagcaacugcguggccgacuacagcgugcuguacaacagcgccagcuucagcaccuucaagugcuacggcgugagcccuaccaagcugaacgaccugugcuucaccaacguguacgccgacagcuucgugauccggggcgacgaggugcggcagaucgcucccggccagaccggcaagaucgccgacuacaacuacaagcugcccgacgacuucaccggcugcgugaucgccuggaacagcaacaaccuggacagcaaggugggcggcaacuacaacuaccuguuccggcuguuccguaagagcaaccugaagccauuugagcgggacaucagcaccgagaucuaccaggccggcaacacccccugcaacgguguggagggcuucaacugcuacuucccccugcagagcuacggcuuccagcccaccaacggcgugggcuaccagcccuaccgggugguggugcugagcuucgagcugcugcacgcccccgccaccgugugcggcccuaaaaagagcaccaaccuggugaagaacaagugcgugaauuucaacuucaacggccugaccggcaccggcgugcugaccgagagcaacaagaaguuccugcccuuccagcaguucggccgggauaucgccgacaccaccgacgccgugcgggacccccagacccuggagauccuggacaucaccccaugcagcuucggcggcgugagcgucaucacccccggcacaaacaccagcaaccagguggcagugcuguaccagggagugaacugcaccgaggugcccguggccauccacgccgaccagcugacccccaccuggcggguguacagcaccggcagcaacguguuccagacccgggccggcugccugaucggcgccgagcacgugaacaacagcuacgagugcgacauccccaucggcgccggcaucugcgcuuccuaccagacccagaccaacagcccccggcgggcccggagcguggccagccagagcgugaucgccuacaccaugagcuuaggcgccgagaacagcguggccuacagcaacaacagcaucgccaucccuaccaacuucaccaucagcgugaccaccgagauccugcccgugagcaugaccaagaccagcguggacuguaccauguacauaugcggcgacagcaccgagugcagcaaccugcugcugcaguacggcagcuucugcacccagcugaaccgggcgcugaccggcaucgccguggagcaggacaagaacacccaagagguguucgcccaggugaagcagaucuacaagacucccccaaucaaggacuucggcggcuucaacuucagccagauccugcccgaccccagcaagcccagcaagcggagcuucaucgaggaccugcuguucaacaaggugacccuggccgacgccggcuucaucaagcaguacggcgacugccugggggauaucgccgcccgggaccugaucugcgcucagaaguucaacggccugaccgugcugcccccucugcugaccgacgagaugaucgcccaguacaccagcgcccugcuugccggcaccaucaccagcggcuggaccuucggcgccggcgccgcacugcagauccccuucgccaugcagauggccuaccgguucaacggcaucggcgugacccagaacgugcuguacgagaaccagaagcugaucgccaaccaguucaacagcgccaucggcaagauccaggacagccugagcagcaccgccagcgcccugggcaagcugcaggacguggugaaccagaacgcccaggcucugaacacccuggugaagcagcugagcagcaauuuuggcgccaucagcagcgugcugaacgacauccugucaaggcuggaucccccagaggccgaggugcagaucgaccggcugaucaccggccggcugcagagccugcagaccuacgugacccagcagcugauccgggccgccgagauccgggccagcgccaaccuggccgcaaccaagaugagcgagugcgugcugggccagagcaagcggguggacuucugcggcaagggcuaccaccugaugagcuucccccagagcgcuccccacggcgugguguuccuccacgucacauacgugcccgcccaggagaagaacuucaccaccgcccccgccaucugccacgacggcaaggcccacuucccccgggagggaguguucgugagcaacggcacccacugguucgugacccagcggaacuucuacgagccucagauuaucaccaccgacaacaccuucgugagcggcaacugcgacguggugaucggcaucgugaacaacaccguguacgacccccugcagcccgagcuggacagcuucaaggaggagcuggacaaguacuucaagaaccacaccagcccagacguggaccugggcgacaucagcggcaucaacgccagcguggugaacauccagaaggagaucgaccggcugaacgagguggccaagaaccugaacgagagccugaucgaccugcaggagcugggcaaguacgagcaguacaucaaguggcccugguacaucuggcugggcuucaucgccggccugaucgccaucgugauggugaccaucaugcugugcugcaugaccagcugcuguagcugccugaagggcugcugcagcugcggcagcugcugcaaguucgacgaggacgacagcgagcccgugcugaagggcgugaagcugcacuacaccugaggacuaguguccaccugucccuccugggcugcuggauugucucguuuuccugccaaauaaacaggaucagcgcuuuacagaucucaaaggcucuuuucagagccaccaaaaaaaaaaaaaaaaaaaaaaaaaaaaaaaaaaaaaaaaaaaaaaaaaaaaaaaaaaaaaaaaaaaaaaaaaaaaaaaaaaaaaaaaaaaaaaaaaaaaa

SEQ ID NO: 24022 - RNA, 4123 nt, Artificial Sequence
  SARS-CoV-2/Wuhan/WIV05/2019__EPI_ISL_402128 spike protein mRNA gc (1-1273)(K986P_V987P_H69del_V70del_Y453F_D614G_I692V_M1229I)
aggagacccgugacccggaaguuguacggcuacgcgacuuucccucccacaaacccucgcgcccuuccuuuccuacuugggcccggcagaaagcuuaccauguucguguuccuggugcugcugccccuggugagcagccagugcgugaaccugaccacccggacccagcugcccccugccuacaccaacagcuucacccggggcguguacuaccccgacaagguguuccggagcagcgugcugcacagcacccaggaccuguuccugcccuucuucagcaacgugaccugguuccacgccaucagcggcaccaacggcaccaagcgguucgacaacccagugcugcccuucaacgacggcguguacuucgccagcaccgagaagucaaacaucauccggggcuggaucuucggcaccacccuggacagcaagacacagagccugcugaucgugaacaacgccaccaacguggugaucaaggugugcgaguuucaguucugcaacgaccccuuccugggcguguacuaccacaagaacaacaagagcuggauggagagcgaguuccggguguacagcagcgcuaacaauugcaccuucgaguacgucagccagcccuuccugauggaccucgagggcaagcagggcaacuucaagaaccugcgggaguucguguucaagaacaucgauggcuacuucaagaucuacagcaagcacacccccaucaaccuggugcgggaccugccccagggauucagcgcccuggagccucugguggaccugcccaucggcaucaacaucaccagguuccagacccugcuggcccugcaccggagcuaccugacccccggcgacagcagcagcggcuggaccgccggcgccgccgcauacuacgugggcuaccugcagccacggaccuuccugcugaaguacaacgagaacggcaccaucaccgacgccguggacugcgcccuggacccccugagcgagaccaagugcacccuaaagagcuucaccguggagaagggcaucuaccagaccagcaacuuccgggugcagcccacugagagcaucgugcgguuccccaacauuaccaaccugugucccuucggcgagguguucaacgccacccgguucgccagcguguacgccuggaaccggaagcggaucagcaacugcguggccgacuacagcgugcuguacaacagcgccagcuucagcaccuucaagugcuacggcgugagcccuaccaagcugaacgaccugugcuucaccaacguguacgcugacagcuucgugauccggggcgacgaggugcggcagaucgcccccggccagaccggcaagaucgccgacuacaacuacaagcugcccgacgacuucaccggcugcgugaucgccuggaacagcaacaaccuggacagcaaggugggcggcaacuacaacuaccuguuccggcuguuccguaagagcaaccugaagccauuugagcgggacaucagcaccgagaucuaccaggccggcagcacccccugcaacgguguggagggcuucaacugcuacuucccccugcagagcuacggcuuccagcccaccaacggcgugggcuaccagcccuaccgggugguggugcugagcuucgagcugcugcacgcccccgccaccgugugcggcccuaaaaagagcaccaaccuggugaagaacaagugcgugaacuucaauuucaacggccugaccggcaccggcgugcugaccgagagcaacaagaaguuccugcccuuccagcaguucggccgggauaucgccgacaccaccgacgcagugcgggacccccagacccuggagauccuggacaucaccccaugcagcuucggcggcgugagcgugaucacccccggcacaaacaccagcaaccaggucgccgugcuguaccagggagugaacugcaccgaggugcccguggccauccacgccgaccagcugacccccaccuggcggguguacagcaccggcagcaacguguuccagacccgggccggcugccugaucggcgccgagcacgugaacaacuccuacgagugcgacauccccaucggcgcuggcaucugcgccagcuaccagacccagaccaacagcccccggcgggcccggagcguggccagccagagcgugaucgccuacaccaugagcuuaggcgccgagaacagcguggccuacagcaacaacagcaucgcgaucccuaccaacuucaccaucagcgugaccaccgagauccugcccgugagcaugaccaagaccagcguggacuguaccauguacauaugcggcgacagcaccgagugcagcaaccugcugcugcaguacggcagcuucugcacccagcugaaccgggcccugaccggcaucgccguggagcaggacaagaacacccaagagguguucgcccaggugaagcagaucuacaagacucccccaaucaaggacuucggcggcuucaacuucagccagauccugcccgaccccagcaagcccagcaagcggagcuucaucgaggaccugcuguucaacaaggugacccuggccgacgccggcuucaucaagcaguacggcgacugccugggggauaucgccgcucgggaccugaucugcgcccagaaguucaacggccugaccgugcugcccccucugcugaccgacgagaugaucgcccaguacaccagcgcccugcuugccggcaccaucaccagcggcuggaccuucggcgccggcgcagcccugcagauccccuucgccaugcagauggccuaccgguucaacggcaucggcgugacccagaacgugcuguacgagaaccagaagcugaucgccaaccaguucaacagcgccaucggcaagauccaggacagccugagcagcaccgccagcgcccugggcaagcugcaggacguggugaaccagaacgcucaggcccugaacacccuggugaagcagcugagcagcaacuuuggcgccaucagcucagugcugaaugacauccugagcaggcuggaucccccagaggccgaggugcagaucgaccggcugaucaccggccggcugcagagccugcagaccuacgugacccagcagcugauccgggccgccgagauccgggccagcgccaaccuggcagccaccaagaugagcgagugcgugcugggccagagcaagcggguggacuucugcggcaagggcuaccaccugaugagcuucccccagagcgcuccccacggcgugguguuccuccacgugacauacguccccgcccaggagaagaacuucaccaccgcccccgccaucugccacgacggcaaggcccacuucccccgggagggaguguucgugagcaacggcacccacugguucgugacccagcggaacuucuacgagccucagauuaucaccaccgacaacaccuucgugagcggcaacugcgacguggugaucggcaucgugaacaacaccguguacgacccccugcagcccgagcuggacagcuucaaggaggagcuggacaaguacuucaagaaccacaccagcccagacguggaccugggcgacaucagcggcaucaacgccagcguggugaacauccagaaggagaucgaccggcugaacgagguggccaagaaccugaacgagagccugaucgaccugcaggagcugggcaaguacgagcaguacaucaaguggcccugguacaucuggcugggcuucaucgccggccugaucgccaucgugaucgugaccaucaugcugugcugcaugaccagcugcuguagcugccugaagggcugcugcagcugcggcagcugcugcaaguucgacgaggacgacagcgagcccgugcugaagggcgugaagcugcacuacaccugaggacuaguguccaccugucccuccugggcugcuggauugucucguuuuccugccaaauaaacaggaucagcgcuuuacagaucucaaaggcucuuuucagagccaccaaaaaaaaaaaaaaaaaaaaaaaaaaaaaaaaaaaaaaaaaaaaaaaaaaaaaaaaaaaaaaaaaaaaaaaaaaaaaaaaaaaaaaaaaaaaaaaaaaaaa

SEQ ID NO: 24023 - RNA, 4120 nt, Artificial Sequence
  SARS-CoV-2/Wuhan/WIV05/2019__EPI_ISL_402128 spike protein mRNA gc (1-1273)(K986P_V987P_K986P_V987P_H69del_V70del_Y144del_N501Y_A570 D_D614G_P681H_T716I_S982A_D1118H)
aggagacccgugacccggaaguuguacggcuacgcgacuuucccucccacaaacccucgcgcccuuccuuuccuacuugggcccggcagaaagcuuaccauguucguguuccuggugcugcugccccuggugagcagccagugcgugaaccugaccacccggacccagcugcccccugccuacaccaacagcuucacccggggcguguacuaccccgacaagguguuccggagcagcgugcugcacagcacccaggaccuguuccugcccuucuucagcaacgugaccugguuccacgccaucagcggcaccaacggcaccaagcgguucgacaacccagugcugcccuucaacgacggcguguacuucgccagcaccgagaagucaaacaucauccggggcuggaucuucggcaccacccuggacagcaagacacagagccugcugaucgugaacaacgccaccaacguggugaucaaggugugcgaguuucaguucugcaacgaccccuuccugggcguguaccacaagaacaacaagagcuggauggagagcgaguuccggguguacagcagcgcuaacaauugcaccuucgaguacgucagccagcccuuccugauggaccucgagggcaagcagggcaacuucaagaaccugcgggaguucguguucaagaacaucgauggcuacuucaagaucuacagcaagcacacccccaucaaccuggugcgggaccugccccagggauucagcgcccuggagccucugguggaccugcccaucggcaucaacaucaccagguuccagacccugcuggcccugcaccggagcuaccugacccccggcgacagcagcagcggcuggaccgccggcgccgccgcauacuacgugggcuaccugcagccacggaccuuccugcugaaguacaacgagaacggcaccaucaccgacgccguggacugcgcccuggacccccugagcgagaccaagugcacccuaaagagcuucaccguggagaagggcaucuaccagaccagcaacuuccgggugcagcccacugagagcaucgugcgguuccccaacauuaccaaccugugucccuucggcgagguguucaacgccacccgguucgccagcguguacgccuggaaccggaagcggaucagcaacugcguggccgacuacagcgugcuguacaacagcgccagcuucagcaccuucaagugcuacggcgugagcccuaccaagcugaacgaccugugcuucaccaacguguacgcugacagcuucgugauccggggcgacgaggugcggcagaucgcccccggccagaccggcaagaucgccgacuacaacuacaagcugcccgacgacuucaccggcugcgugaucgccuggaacagcaacaaccuggacagcaaggugggcggcaacuacaacuaccuguaccggcuguuccguaagagcaaccugaagccauucgagcgggacaucagcaccgagaucuaccaggccggcagcacccccugcaacgguguggagggcuuuaacugcuacuucccccugcagagcuacggcuuccagcccaccuacggcgugggcuaccagcccuaccgggugguggugcugagcuucgagcugcugcacgcccccgccaccgugugcggcccuaaaaagagcaccaaccuggugaagaacaagugcgugaacuucaacuucaauggccugaccggcaccggcgugcugaccgagagcaacaagaaguuccugcccuuccagcaguucggccgggauaucgacgacaccaccgacgccgugcgggacccccagacccuggagauccuggacaucaccccaugcagcuucggcggcgugagcgugaucacccccggcacaaacaccagcaaccaggucgcagugcuguaccagggagugaacugcaccgaggugcccguggccauccacgccgaccagcugacccccaccuggcggguguacagcaccggcagcaacguguuccagacccgggccggcugccugaucggcgccgagcacgugaacaacuccuacgagugcgacauccccaucggcgccggcaucugcgcuagcuaccagacccagaccaacagccaccggcgggcccggagcguggccagccagagcaucaucgccuacaccaugagcuuaggcgccgagaacagcguggccuacagcaacaacagcaucgccauccccaucaacuucaccauaagcgugaccaccgagauccugccugugagcaugaccaagaccagcguggacuguaccauguacaucugcggcgacagcaccgagugcagcaaccugcugcugcaguacggcagcuucugcacccagcugaaccgggcgcugaccggcaucgccguggagcaggacaagaacacccaagagguguucgcccaggugaagcagaucuacaagaccccacccaucaaggacuucggcggcuucaacuucagccagauccugcccgaccccagcaagcccagcaagcggagcuucaucgaggaccugcuguucaacaaggugacucuggccgacgccggcuucaucaagcaguacggcgauugccugggggacaucgccgcccgggaccugaucugcgcucagaaguucaacggccugaccgugcugccuccccugcugaccgacgagaugaucgcccaguacaccagcgcccugcuugccggcaccaucaccagcggcuggaccuucggcgccggcgccgcacugcagauccccuucgccaugcagauggccuaccgguucaacggcaucggcgugacccagaacgugcuguacgagaaccagaagcugaucgccaaccaguucaacagcgccaucggcaagauccaggacagccugagcagcaccgccagcgcccugggcaagcugcaggacguggugaaccagaacgcccaggcucugaacacccuggugaagcagcugagcagcaacuucggcgccaucagcucagugcugaacgacauccuggccaggcuggacccacccgaggccgaggugcagaucgaccggcugaucaccggccggcugcagagccugcagaccuacgugacccagcagcugauccgggccgccgagauucgggccagcgccaaucuggcagccaccaagaugagcgagugcgugcugggccagagcaagcggguggacuuuugcggcaagggcuaccaccugaugagcuucccccagagcgcuccccacggcgugguguuccuccacgugaccuacgugcccgcccaggagaagaacuucacaaccgcccccgccaucugccacgacggcaaggcccacuucccccgggagggagucuucgugagcaacggcacccacugguucgugacccagcggaacuucuacgagccccagaucaucaccacccacaacaccuucgugagcggcaacugcgacguggugaucggcaucgugaacaacaccguguacgacccucugcagcccgagcuggacagcuucaaggaggagcuggacaaguacuucaagaaccacaccagccccgacguggaucugggcgacaucagcggcaucaacgccagcguggugaacauccagaaggagaucgaccggcugaacgagguggccaagaaccugaacgagagccugaucgaccugcaggagcugggcaaguacgagcaguacaucaaguggccaugguacaucuggcugggcuucaucgccggccugaucgccaucgugauggugaccaucaugcugugcugcaugaccagcugcuguagcugccugaagggcugcugcagcugcggcagcugcugcaaguucgacgaggacgacagcgagcccgugcugaagggcgugaagcugcacuacaccugaggacuaguguccaccugucccuccugggcugcuggauugucucguuuuccugccaaauaaacaggaucagcgcuuuacagaucucaaaggcucuuuucagagccaccaaaaaaaaaaaaaaaaaaaaaaaaaaaaaaaaaaaaaaaaaaaaaaaaaaaaaaaaaaaaaaaaaaaaaaaaaaaaaaaaaaaaaaaaaaaaaaaaaaaaa

SEQ ID NO: 24024 - RNA, 4129 nt, Artificial Sequence
  SARS-CoV-2/Wuhan/WIV05/2019__EPI_ISL_402128 spike protein mRNA gc (1-1273)(K986P_V987P_K986P_V987P_K417N_E484K_N501Y_D614G)
aggagacccgugacccggaaguuguacggcuacgcgacuuucccucccacaaacccucgcgcccuuccuuuccuacuugggcccggcagaaagcuuaccauguucguguuccuggugcugcugccccuggugagcagccagugcgugaaccugaccacccggacccagcugcccccugccuacaccaacagcuucacccggggcguguacuaccccgacaagguguuccggagcagcgugcugcacagcacccaggaccuguuccugcccuucuucagcaacgugaccugguuccacgccauccacgugagcggcaccaacggcaccaagcgguucgacaacccagugcugcccuucaacgacggcguguacuucgccagcaccgagaagucaaacaucauccggggcuggaucuucggcaccacccuggacagcaagacacagagccugcugaucgugaacaacgccaccaacguggugaucaaggugugcgaguuucaguucugcaacgaccccuuccugggcguguacuaccacaagaacaacaagagcuggauggagagcgaguuccgggucuacagcagcgcuaacaauugcaccuucgaguacgugagccagcccuuccugauggaccucgagggcaagcagggcaacuucaagaaccugcgggaguucguguucaagaacaucgauggcuacuucaagaucuacagcaagcacacccccaucaaccuggugcgggaccugccccagggauucagcgcccuggagccucugguggaccugcccaucggcaucaacaucaccagguuccagacccugcuggcccugcaccggagcuaccugacccccggcgacagcagcagcggcuggaccgccggcgccgccgcauacuacgugggcuaccugcagccacggaccuuccugcugaaguacaacgagaacggcaccaucaccgacgccguggacugcgcccuggacccccugagcgagaccaagugcacccuaaagagcuucaccguggagaagggcaucuaccagaccagcaacuuccgggugcagcccacugagagcaucgugcgguuccccaacauuaccaaccugugucccuucggcgagguguucaacgccacccgguucgccagcguguacgccuggaaccggaagcggaucagcaacugcguggccgacuacagcgugcuguacaacagcgccagcuucagcaccuucaagugcuacggcgugagcccuaccaagcugaacgaccugugcuucaccaacguguacgcugacagcuucgugauccggggcgacgaggugcggcagaucgcccccggccagaccggcaacaucgccgacuacaacuacaagcugcccgacgacuucaccggcugcgugaucgccuggaacagcaacaaccuggacagcaaggugggcggcaacuacaacuaccuguaccggcuguuccguaagagcaaccugaagccauucgagcgggacaucagcaccgagaucuaccaggccggcagcacccccugcaacggugugaagggcuuuaacugcuacuucccccugcagagcuacggcuuccagcccaccuacggcgugggcuaccagcccuaccgggugguggugcugagcuucgagcugcugcacgcccccgccaccgugugcggcccuaaaaagagcaccaaccuggugaagaacaagugcgugaacuucaauuucaacggccugaccggcaccggcgugcugaccgagagcaacaagaaguuccugcccuuccagcaguucggccgggauaucgccgacaccaccgacgcagugcgggacccccagacccuggagauccuggacaucaccccaugcagcuucggcggcgugagcgucaucacccccggcacaaacaccagcaaccagguggccgugcuguaccagggagugaacugcaccgaggugcccguggccauccacgccgaccagcugacccccaccuggcggguguacagcaccggcagcaacguguuccagacccgggccggcugccugaucggcgccgagcacgugaacaacuccuacgagugcgacauccccaucggcgcuggcaucugcgccagcuaccagacccagaccaacagcccccggcgggcccggagcguggccagccagagcaucaucgccuacaccaugagcuuaggcgccgagaacagcguggccuacagcaacaacagcaucgcgaucccuaccaacuucaccaucagcgugaccaccgagauacugcccgugagcaugaccaagaccagcguggacuguaccauguacaucugcggcgacagcaccgagugcagcaaccugcugcugcaguacggcagcuucugcacccagcugaaccgggcccugaccggcaucgccguggagcaggacaagaacacccaagagguguucgcccaggugaagcagaucuacaagacucccccaaucaaggacuucggcggcuucaacuucagccagauccugcccgaccccagcaagcccagcaagcggagcuucaucgaggaccugcuguucaacaaggugacccuggccgacgccggcuucaucaagcaguacggcgacugccugggggauaucgccgcucgggaccugaucugcgcccagaaguucaacggccugaccgugcugcccccucugcugaccgacgagaugaucgcccaguacaccagcgcccugcuugccggcaccaucaccagcggcuggaccuucggcgccggcgcagcccugcagauccccuucgccaugcagauggccuaccgguucaacggcaucggcgugacccagaacgugcuguacgagaaccagaagcugaucgccaaccaguucaacagcgccaucggcaagauccaggacagccugagcagcaccgccagcgcccugggcaagcugcaggacguggugaaccagaacgcucaggcccugaacacccuggugaagcagcugagcagcaacuucggcgccaucagcucagugcugaaugacauccugagcaggcuggaucccccagaggccgaggugcagaucgaccggcugaucaccggccggcugcagagccugcagaccuacgugacccagcagcugauccgggccgccgagauccgggccagcgccaaccuggcagccaccaagaugagcgagugcgugcugggccagagcaagcggguggacuuuugcggcaagggcuaccaccugaugagcuucccccagagcgcuccccacggcgugguguuccuccacgugacauacguccccgcccaggagaagaacuucaccaccgcccccgccauuugccacgacggcaaggcccacuucccccgggagggaguguucgugagcaacggcacccacugguucgugacccagcggaacuucuacgagccucagaucaucaccaccgacaacaccuucgugagcggcaacugcgacguggugaucggcaucgugaacaacaccguguacgacccccugcagcccgagcuggacagcuucaaggaggagcuggacaaguacuucaagaaccacaccagcccagacguggaccugggcgacaucagcggcaucaacgccagcguggugaacauccagaaggagaucgaccggcugaacgagguggccaagaaccugaacgagagccugaucgaccugcaggagcugggcaaguacgagcaguacaucaaguggcccugguacaucuggcugggcuucaucgccggccugaucgccaucgugauggugaccaucaugcugugcugcaugaccagcugcuguagcugccugaagggcugcugcagcugcggcagcugcugcaaguucgacgaggacgacagcgagcccgugcugaagggcgugaagcugcacuacaccugaggacuaguguccaccugucccuccugggcugcuggauugucucguuuuccugccaaauaaacaggaucagcgcuuuacagaucucaaaggcucuuuucagagccaccaaaaaaaaaaaaaaaaaaaaaaaaaaaaaaaaaaaaaaaaaaaaaaaaaaaaaaaaaaaaaaaaaaaaaaaaaaaaaaaaaaaaaaaaaaaaaaaaaaaaa

SEQ ID NO: 24025 - RNA, 4120 nt, Artificial Sequence
  SARS-CoV-2/Wuhan/WIV05/2019__EPI_ISL_402128 spike protein mRNA gc (1-1273)(K986P_V987P_K986P_V987P_L18F_D80A_D215G_L242del_A243del_ L244del_R246I_K417N_E484K_N501Y_D614G_A701V)
aggagacccgugacccggaaguuguacggcuacgcgacuuucccucccacaaacccucgcgcccuuccuuuccuacuugggcccggcagaaagcuuaccauguucguguuccuggugcugcugccccuggugagcagccagugcgugaacuucaccacccggacccagcugcccccugccuacaccaacagcuucacccggggcguguacuaccccgacaagguguuccggagcagcgugcugcacagcacccaggaccuguuccugcccuucuucagcaacgugaccugguuccacgccauccacgugagcggcaccaacggcaccaagcgguucgccaacccagugcugcccuucaacgacggcguguacuucgccagcaccgagaagucaaacaucauccggggcuggaucuuuggcaccacccuggacagcaagacacagagccugcugaucgugaacaacgcuaccaacguggugaucaaggugugcgaguuccaguucugcaacgaccccuuccugggcguguacuaccacaagaacaacaagagcuggauggagagcgaguuccgggucuacagcagcgccaacaauugcaccuucgaguacgugagccagcccuuccugauggaccuggagggcaagcagggcaacuucaagaaccuccgggaguucguguucaagaacaucgacggcuacuucaagaucuacagcaagcacacccccaucaaccuggugcggggacugccccagggcuucagcgcccuggagccucugguggaucugcccaucggcaucaacaucaccagguuccagacccugcacaucagcuaccugacccccggcgacagcagcagcggcuggaccgccggcgccgccgcauacuacgugggcuaccugcagccacggaccuuccugcugaaguacaacgagaacggcaccaucaccgacgccguggacugcgcccuggacccccugagcgagaccaagugcacccuuaagagcuucaccguggagaagggcaucuaccagaccagcaacuuccgggugcagcccacugagagcauugugcgguuccccaacaucaccaaccugugucccuucggcgagguguucaacgccacccgguucgccagcguguacgccuggaaccggaagcggaucagcaacugcguggccgacuacagcgugcuguacaacagcgccagcuucagcaccuucaagugcuacggcgugagcccuaccaagcugaacgaccugugcuucaccaacguguacgcugacagcuucgugauccggggcgacgaggugcggcagaucgcccccggccagaccggcaacaucgccgacuacaacuacaagcugcccgacgacuucaccggcugcgugaucgccuggaacagcaacaaccuggacagcaaggugggcggcaacuacaacuaccuguaccggcuauuccguaagagcaaccugaagccauuugagcgggacaucagcaccgagaucuaccaggccgguagcacccccugcaacggcgugaagggcuucaacugcuacuucccccugcagagcuacggcuuccagcccaccuacggcgugggcuaccagcccuaccgggugguggugcugagcuucgagcugcugcacgcccccgccaccgugugcggcccuaaaaagagcaccaaccuggugaagaacaagugcgugaacuucaauuucaacggccugaccggcaccggcgugcugaccgagagcaacaagaaguuccugcccuuccagcaguucggccgggacaucgccgacaccaccgaugcagugcgggacccccagacccuggagauccuggacaucaccccaugcagcuucggcggcgugagcgucaucacccccggaacaaacaccagcaaccagguggccgugcuguaccagggcgugaacugcaccgaggugcccguggccauccacgccgaccagcugacccccaccuggcggguguacagcaccggcagcaacguguuccagacccgggccggcugccugaucggcgccgagcacgugaacaacuccuacgagugcgacauccccaucggcgcuggcaucugcgccagcuaccagacccagaccaacagcccccggcgggcccggagcguggccagccagagcaucaucgccuacaccaugagccugggcguggagaacagcguggccuacagcaacaacagcaucgccaucccuaccaacuucaccauaagcgugaccaccgagauccugcccgugagcaugaccaagaccagcguggacuguaccauguacaucugcggcgacagcaccgagugcagcaaccuguuacugcaguacggcagcuucugcacccagcugaaccgggcgcugaccggcaucgccguggagcaggacaagaacacccaagagguguucgcccaggugaagcagaucuacaagacucccccaaucaaggacuucggcggcuucaacuucagccagauccugcccgaccccagcaagcccagcaagcggagcuucaucgaggaccugcuguucaacaaggugacccuggccgacgccggcuucaucaagcaguacggggacugccugggcgacaucgccgcccgggaccugaucugcgcucagaaguucaacggccugaccgugcugcccccucugcugaccgaugagaugaucgcccaguacaccagcgcccugcuggccggcaccaucaccagcggcuggaccuucggcgccggcgccgcacugcagauccccuucgccaugcagauggccuaccgguucaacggcaucggcgugacccagaacgugcuguacgagaaccagaagcugaucgccaaccaguucaacagcgccaucggcaagauccaggacagccugagcagcaccgccagcgcccugggcaagcugcaggacguggugaaccagaacgcccaggcucugaacacccuggugaagcagcugagcagcaacuuuggcgccaucagcucagugcugaaugacauccugagccggcuggaucccccagaggccgaggugcagaucgacaggcugaucaccggccggcugcagagccugcagaccuacgugacccagcagcugauccgggccgccgagauucgggccagcgccaaccuggccgcaaccaagaugagcgagugcgugcugggccagagcaagcggguggacuucugcggcaagggcuaccaccugaugagcuucccccagagcgcuccccacggcgugguguuccugcacgucacauacgugcccgcccaggagaagaacuucaccaccgcccccgccaucugccacgacggaaaggcccacuucccccgggagggcguguucgugagcaacggcacccacugguucgugacccagcggaacuucuacgagccucagaucaucaccaccgacaacaccuucgugagcggcaacugcgacguggugaucggcaucgugaacaacaccguguacgacccccugcagcccgagcuggacagcuucaaggaggagcucgacaaguacuucaagaaccacaccagcccagacguggaccugggcgacaucagcggcaucaacgccagcguggugaacauccagaaggagaucgaccggcugaacgagguggccaagaaccugaacgagagccugaucgaccugcaggagcugggcaaguacgagcaguacaucaaguggcccugguacaucuggcugggcuucaucgccggccugaucgccaucgugauggugaccaucaugcugugcugcaugaccagcugcuguagcugccugaagggcugcugcagcugcggcagcugcugcaaguucgacgaggacgacagcgagcccgugcugaagggcgugaagcugcacuacaccugaggacuaguguccaccugucccuccugggcugcuggauugucucguuuuccugccaaauaaacaggaucagcgcuuuacagaucucaaaggcucuuuucagagccaccaaaaaaaaaaaaaaaaaaaaaaaaaaaaaaaaaaaaaaaaaaaaaaaaaaaaaaaaaaaaaaaaaaaaaaaaaaaaaaaaaaaaaaaaaaaaaaaaaaaaa

SEQ ID NO: 24026 - RNA, 4129 nt, Artificial Sequence
  SARS-CoV-2/Wuhan/WIV05/2019__EPI_ISL_402128 spike protein mRNA gc (1-1273)(K986P_V987P_K986P_V987P_E484K_D614G)
aggagacccgugacccggaaguuguacggcuacgcgacuuucccucccacaaacccucgcgcccuuccuuuccuacuugggcccggcagaaagcuuaccauguucguguuccuggugcugcugccccuggugagcagccagugcgugaaccugaccacccggacccagcugcccccugccuacaccaacagcuucacccggggcguguacuaccccgacaagguguuccggagcagcgugcugcacagcacccaggaccuguuccugcccuucuucagcaacgugaccugguuccacgccauccacgugagcggcaccaacggcaccaagcgguucgacaacccagugcugcccuucaacgacggcguguacuucgccagcaccgagaagucaaacaucauccggggcuggaucuucggcaccacccuggacagcaagacacagagccugcugaucgugaacaacgccaccaacguggugaucaaggugugcgaguuucaguucugcaacgaccccuuccugggcguguacuaccacaagaacaacaagagcuggauggagagcgaguuccgggucuacagcagcgcuaacaauugcaccuucgaguacgugagccagcccuuccugauggaccucgagggcaagcagggcaacuucaagaaccugcgggaguucguguucaagaacaucgauggcuacuucaagaucuacagcaagcacacccccaucaaccuggugcgggaccugccccagggauucagcgcccuggagccucugguggaccugcccaucggcaucaacaucaccagguuccagacccugcuggcccugcaccggagcuaccugacccccggcgacagcagcagcggcuggaccgccggcgccgccgcauacuacgugggcuaccugcagccacggaccuuccugcugaaguacaacgagaacggcaccaucaccgacgccguggacugcgcccuggacccccugagcgagaccaagugcacccuaaagagcuucaccguggagaagggcaucuaccagaccagcaacuuccgggugcagcccacugagagcaucgugcgguuccccaacauuaccaaccugugucccuucggcgagguguucaacgccacccgguucgccagcguguacgccuggaaccggaagcggaucagcaacugcguggccgacuacagcgugcuguacaacagcgccagcuucagcaccuucaagugcuacggcgugagcccuaccaagcugaacgaccugugcuucaccaacguguacgcugacagcuucgugauccggggcgacgaggugcggcagaucgcccccggccagaccggcaagaucgccgacuacaacuacaagcugcccgacgacuucaccggcugcgugaucgccuggaacagcaacaaccuggacagcaaggugggcggcaacuacaacuaccuguaccggcuguuccguaagagcaaccugaagccauucgagcgggacaucagcaccgagaucuaccaggccggcagcacccccugcaacggugugaagggcuuuaacugcuacuucccccugcagagcuacggcuuccagcccaccaacggcgugggcuaccagcccuaccgggugguggugcugagcuucgagcugcugcacgcccccgccaccgugugcggcccuaaaaagagcaccaaccuggugaagaacaagugcgugaacuucaauuucaacggccugaccggcaccggcgugcugaccgagagcaacaagaaguuccugcccuuccagcaguucggccgggauaucgccgacaccaccgacgcagugcgggacccccagacccuggagauccuggacaucaccccaugcagcuucggcggcgugagcgucaucacccccggcacaaacaccagcaaccagguggccgugcuguaccagggagugaacugcaccgaggugcccguggccauccacgccgaccagcugacccccaccuggcggguguacagcaccggcagcaacguguuccagacccgggccggcugccugaucggcgccgagcacgugaacaacuccuacgagugcgacauccccaucggcgcuggcaucugcgccagcuaccagacccagaccaacagcccccggcgggcccggagcguggccagccagagcaucaucgccuacaccaugagcuuaggcgccgagaacagcguggccuacagcaacaacagcaucgcgaucccuaccaacuucaccaucagcgugaccaccgagauacugcccgugagcaugaccaagaccagcguggacuguaccauguacaucugcggcgacagcaccgagugcagcaaccugcugcugcaguacggcagcuucugcacccagcugaaccgggcccugaccggcaucgccguggagcaggacaagaacacccaagagguguucgcccaggugaagcagaucuacaagacucccccaaucaaggacuucggcggcuucaacuucagccagauccugcccgaccccagcaagcccagcaagcggagcuucaucgaggaccugcuguucaacaaggugacccuggccgacgccggcuucaucaagcaguacggcgacugccugggggauaucgccgcucgggaccugaucugcgcccagaaguucaacggccugaccgugcugcccccucugcugaccgacgagaugaucgcccaguacaccagcgcccugcuugccggcaccaucaccagcggcuggaccuucggcgccggcgcagcccugcagauccccuucgccaugcagauggccuaccgguucaacggcaucggcgugacccagaacgugcuguacgagaaccagaagcugaucgccaaccaguucaacagcgccaucggcaagauccaggacagccugagcagcaccgccagcgcccugggcaagcugcaggacguggugaaccagaacgcucaggcccugaacacccuggugaagcagcugagcagcaacuucggcgccaucagcucagugcugaaugacauccugagcaggcuggaucccccagaggccgaggugcagaucgaccggcugaucaccggccggcugcagagccugcagaccuacgugacccagcagcugauccgggccgccgagauccgggccagcgccaaccuggcagccaccaagaugagcgagugcgugcugggccagagcaagcggguggacuuuugcggcaagggcuaccaccugaugagcuucccccagagcgcuccccacggcgugguguuccuccacgugacauacguccccgcccaggagaagaacuucaccaccgcccccgccauuugccacgacggcaaggcccacuucccccgggagggaguguucgugagcaacggcacccacugguucgugacccagcggaacuucuacgagccucagaucaucaccaccgacaacaccuucgugagcggcaacugcgacguggugaucggcaucgugaacaacaccguguacgacccccugcagcccgagcuggacagcuucaaggaggagcuggacaaguacuucaagaaccacaccagcccagacguggaccugggcgacaucagcggcaucaacgccagcguggugaacauccagaaggagaucgaccggcugaacgagguggccaagaaccugaacgagagccugaucgaccugcaggagcugggcaaguacgagcaguacaucaaguggcccugguacaucuggcugggcuucaucgccggccugaucgccaucgugauggugaccaucaugcugugcugcaugaccagcugcuguagcugccugaagggcugcugcagcugcggcagcugcugcaaguucgacgaggacgacagcgagcccgugcugaagggcgugaagcugcacuacaccugaggacuaguguccaccugucccuccugggcugcuggauugucucguuuuccugccaaauaaacaggaucagcgcuuuacagaucucaaaggcucuuuucagagccaccaaaaaaaaaaaaaaaaaaaaaaaaaaaaaaaaaaaaaaaaaaaaaaaaaaaaaaaaaaaaaaaaaaaaaaaaaaaaaaaaaaaaaaaaaaaaaaaaaaaaa

SEQ ID NO: 24027 - RNA, 4129 nt, Artificial Sequence
  SARS-CoV-2/Wuhan/WIV05/2019__EPI_ISL_402128 spike protein mRNA gc (1-1273)(K986P_V987P_K986P_V987P_L18F_T20N_P26S_D138Y_R190S_K417T _E484K_N501Y_D614G_H655Y_T1027I)
aggagacccgugacccggaaguuguacggcuacgcgacuuucccucccacaaacccucgcgcccuuccuuuccuacuugggcccggcagaaagcuuaccauguucguguuccuggugcugcugccccuggugagcagccagugcgugaacuucaccaaccggacccagcugcccagcgccuacaccaacagcuucacccggggcguguacuacccugacaagguguuccggagcagcgugcugcacagcacccaggaccuguuccugcccuucuucagcaacgugaccugguuccacgccauccacgugagcggcaccaacggcaccaagcgguucgacaaccccgugcugccauucaacgacggcguguacuucgccagcaccgagaagucaaacaucauccggggcuggaucuuuggcaccacccuggacagcaagacccagagccugcugaucgugaacaacgccacaaacguggugaucaaggugugcgaguuccaguucugcaacuaccccuuccugggcguguacuaccacaagaacaacaagagcuggauggagagcgaguuccgggucuacagcagcgcuaauaacugcaccuucgaguacgugagccagcccuuccugauggaccuggagggcaagcagggcaacuucaagaaccucagcgaguucguguucaagaacaucgacggcuacuucaagaucuacagcaagcacacccccaucaaccuggugcgggaucugccccagggauucagcgcccuggagccccugguggaccugccuaucggcaucaacaucacccgguuccagacccugcuggcccugcacaggagcuaccugacccccggcgacagcagcagcggcuggaccgccggcgccgccgcauacuacgugggcuaccugcagccccggaccuuccugcugaaguacaacgagaacggcaccaucaccgacgccguggacugcgcccuggacccacugagcgagaccaagugcacccuaaagagcuucaccguggagaagggcaucuaccagaccagcaacuuccgggugcagcccaccgagagcaucgugcgguuccccaacauuacuaaccugugucccuucggcgagguguucaacgccacccgguucgccagcguguacgccuggaaccggaagcggaucagcaacugcguggccgacuacagcgugcuguacaacagcgccagcuucagcaccuucaagugcuacggcgugagccccaccaagcugaacgaccugugcuucaccaacguguacgcugacagcuucgugauccggggcgacgaggugcggcagaucgccccuggccagaccggcaccaucgccgacuacaacuacaagcugcccgacgacuucaccggcugcgugaucgccuggaacagcaacaaccuggacagcaaggugggcggcaacuacaacuaccuguaccggcuguuccguaagagcaaccugaagcccuuugagcgggacaucagcaccgagaucuaccaggccggcagcaccccaugcaacggugugaagggcuucaacugcuacuucccccugcagagcuacggcuuccagcccaccuacggcgugggcuaccagcccuaccgggugguggugcugagcuucgagcugcugcacgcccccgccaccgugugcggccccaaaaagagcaccaaccuggugaagaacaagugcgugaacuucaauuucaacggccugaccggcaccggcgugcugaccgagagcaacaagaaguuccugccuuuccagcaguucggccgggacaucgccgauaccaccgacgcagugcgggacccccagacccuggagauccuggacaucacccccugcagcuucggcggcgugagcgucaucaccccaggcacaaacaccagcaaccagguggccgugcuguaccagggagugaacugcaccgaggugcccguggccauccacgccgaccagcugacccccaccuggcggguguacuccaccggcagcaacguguuccagacccgggccggcugccugaucggcgccgaguacgugaacaacagcuacgagugcgacauccccaucggcgcuggcaucugcgccagcuaccagacccagaccaacagcccccggcgggcccggagcguggccagccagagcaucaucgccuacaccaugagccugggcgccgagaacagcguggccuacagcaacaacagcaucgcgauccccaccaacuucaccaucagcgugaccaccgagauauuaccugugagcaugaccaagaccagcguggacuguaccauguacaucugcggcgacagcaccgagugcagcaaccugcugcugcaguacggcagcuucugcacccagcugaaccgggcccugaccggcaucgccguggagcaggacaagaacacccaagagguguucgcccaggugaagcagaucuacaagacuccacccaucaaggacuucggcggcuucaacuucagccagauccugcccgaccccagcaagcccagcaagcggagcuucaucgaggaccugcuguucaacaaggugacccuggccgacgccggcuucaucaagcaguacggcgacugccugggggacaucgccgcucgggaucugaucugcgcccagaaguucaacggccugaccgugcugccuccccugcugaccgacgagaugaucgcccaguacaccagcgcccugcuggccggcaccaucaccagcggcuggaccuucggcgccggcgcagcccuucagauccccuucgccaugcagauggccuaccgguucaacggcaucggcgugacccagaacgugcuguacgagaaccagaagcugaucgccaaccaguucaacagcgccaucggcaagauccaggacagccugagcagcaccgccagcgcccugggcaagcugcaggacguggugaaccagaacgcucaggcccugaacacccuggugaagcagcugagcucaaacuuuggcgccaucagcagcgugcugaaugacauccugagccggcuggacccacccgaggccgaggugcagaucgacaggcugaucaccggccggcugcagagccugcagaccuacgugacccagcagcugauccgggccgccgagauccgggccagcgccaaccuggcagccauuaagaugagcgagugcgugcugggccagagcaagcggguggacuucugcggcaagggcuaccaccugaugagcuucccccagagcgcuccccacggcgugguguuccugcacgugaccuacguccccgcccaggagaagaacuucacaaccgcccccgccaucugccacgacggcaaggcccacuucccccgggagggaguguucgugagcaacggcacccacugguucgugacccagcggaacuucuacgagccccagaucaucaccaccgacaacaccuucgugagcggcaacugcgacguggugaucggcaucgugaacaacaccguguacgacccucuccagcccgagcuggacagcuucaaggaggagcuggacaaguacuucaagaaccacaccagccccgacguggaccugggcgauaucagcggcaucaacgccagcguggugaacauccagaaggagaucgaccggcugaacgagguggccaagaaccugaacgagagccugaucgaccugcaggagcugggcaaguacgagcaguacaucaaguggccaugguacaucuggcugggcuucaucgccggccugaucgccaucgugauggugaccaucaugcugugcugcaugaccagcugcuguagcugccugaagggcugcugcagcugcggcagcugcugcaaguucgacgaggacgacagcgagcccgugcugaagggcgugaagcugcacuacaccugaggacuaguguccaccugucccuccugggcugcuggauugucucguuuuccugccaaauaaacaggaucagcgcuuuacagaucucaaaggcucuuuucagagccaccaaaaaaaaaaaaaaaaaaaaaaaaaaaaaaaaaaaaaaaaaaaaaaaaaaaaaaaaaaaaaaaaaaaaaaaaaaaaaaaaaaaaaaaaaaaaaaaaaaaaa

SEQ ID NO: 24028 - RNA, 4129 nt, Artificial Sequence
  SARS-CoV-2/Wuhan/WIV05/2019__EPI_ISL_402128 spike protein mRNA gc (1-1273)(K986P_V987P_K986P_V987P_S13I_W152C_L452R_D614G)
aggagacccgugacccggaaguuguacggcuacgcgacuuucccucccacaaacccucgcgcccuuccuuuccuacuugggcccggcagaaagcuuaccauguucguguuccuggugcugcugccccuggugagcauccagugcgugaaccugaccacccggacccagcugcccccugccuacaccaacagcuucacccggggcguguacuaccccgacaagguguuccggagcagcgugcugcacagcacccaggaccuguuccugcccuucuucagcaacgugaccugguuccacgccauccacgugagcggcaccaacggcaccaagcgguucgacaacccagugcugcccuucaacgacggcguguacuucgccagcaccgagaagucaaacaucauccggggcuggaucuucggcaccacccuggacagcaagacacagagccugcugaucgugaacaacgccaccaacguggugaucaaggugugcgaguuucaguucugcaacgaccccuuccugggcguguacuaccacaagaacaacaagagcugcauggagagcgaguuccgggucuacagcagcgcuaacaauugcaccuucgaguacgugagccagcccuuccugauggaccucgagggcaagcagggcaacuucaagaaccugcgggaguucguguucaagaacaucgauggcuacuucaagaucuacagcaagcacacccccaucaaccuggugcgggaccugccccagggauucagcgcccuggagccucugguggaccugcccaucggcaucaacaucaccagguuccagacccugcuggcccugcaccggagcuaccugacccccggcgacagcagcagcggcuggaccgccggcgccgccgcauacuacgugggcuaccugcagccacggaccuuccugcugaaguacaacgagaacggcaccaucaccgacgccguggacugcgcccuggacccccugagcgagaccaaguguacccuaaagagcuucaccguggagaagggcaucuaccagaccagcaacuuccgggugcagcccacugagagcauugugcgguuccccaacaucaccaaccugugccccuucggcgagguguucaacgccacccgguucgccagcguguacgccuggaaccggaagcggaucagcaacugcguggccgacuacagcgugcuguacaacagcgccagcuucagcaccuucaagugcuacggcgugagcccuaccaagcugaacgaccugugcuucaccaacguguacgcugacagcuucgugauccggggcgacgaggugcggcagaucgcccccggccagaccggcaagaucgccgacuacaacuacaagcugcccgacgacuucaccggcugcgugaucgccuggaacagcaacaaccuggacagcaaggugggcggcaacuacaacuaccgguaccggcuguuccguaagagcaaccugaagccauucgagcgggacaucagcaccgagaucuaccaggccggcagcacccccugcaacgguguggagggcuuuaacugcuacuucccccugcagagcuacggcuuccagcccaccaacggcgugggcuaccagcccuaccgggugguggugcugagcuucgagcugcugcacgcccccgccaccgugugcggcccuaaaaagagcaccaaccuggugaagaacaagugcgugaacuucaauuucaacggccugaccggcaccggcgugcugaccgagagcaacaagaaguuccugcccuuccagcaguucggccgggauaucgccgacaccaccgacgcagugcgggacccccagacccuggagauccuggacaucaccccaugcagcuucggcggcgugagcgucaucacccccggcacaaacaccagcaaccagguggccgugcuguaccagggagugaacugcaccgaggugcccguggccauccacgccgaccagcugacccccaccuggcggguguacagcaccggcagcaacguguuccagacccgggccggcugccugaucggcgccgagcacgugaacaacagcuacgagugcgacauccccaucggcgcuggcaucugugccuccuaccagacccagaccaacagcccccggcgggcccggagcguggccagccagagcaucaucgccuacaccaugagccugggcgccgagaacagcguggccuacagcaacaacagcaucgcgaucccuaccaacuucaccauaagcgugaccaccgagaucuuacccgugagcaugaccaagaccagcguggacugcaccauguacaucugcggcgacagcaccgagugcagcaaccugcugcugcaguacggcagcuucugcacccagcugaaccgggcccugaccggcaucgccguggagcaggacaagaacacccaagagguguucgcccaggugaagcagaucuacaagacucccccaaucaaggacuucggcggcuucaacuucagccagauccugcccgaccccagcaagcccagcaagcggagcuucaucgaggaccugcuguucaacaaggugacccuggccgacgccggcuucaucaagcaguacggcgacugccugggggauaucgccgcucgggaccugaucugcgcccagaaguucaacggccugaccgugcugcccccucugcugaccgacgagaugaucgcccaguacaccagcgcccugcuggccggcaccaucaccagcggcuggaccuucggcgccggcgcagcccuucagauccccuucgccaugcagauggccuacagguucaacggcaucggcgugacccagaacgugcuguacgagaaccagaagcugaucgccaaccaguucaacagcgccaucggcaagauccaggacagccugagcagcaccgccagcgcccugggcaagcugcaggacguggugaaccagaacgcucaggcccugaacacccuggugaagcagcugagcagcaacuucggcgccaucagcagcgugcugaaugacauccugucacggcuggaucccccagaggccgaggugcagaucgaccggcugaucaccggccggcugcagagccugcagaccuacgugacccagcagcugauccgggccgccgagauucgggccagcgccaaccuggcagccaccaagaugagcgagugcgugcugggccagagcaagcggguggacuuuugcggcaagggcuaccaccugaugagcuucccccagagcgcuccccacggcgugguguuccugcacgugacauacguccccgcccaggagaagaacuucaccaccgcccccgccaucugccacgacggcaaggcccacuucccccgggagggaguguucgugagcaacggcacccacugguucgugacccagcggaacuucuacgagccucagaucaucaccaccgacaacaccuucgugagcggcaacugcgacguggugaucggcaucgugaacaacaccguguacgacccccuccagcccgagcuggacagcuucaaggaggagcuggacaaguacuucaagaaccacaccagcccagacguggaccugggcgacaucagcggcaucaacgccagcguggugaacauccagaaggagaucgaccggcugaacgagguggccaagaaccugaacgagagccugaucgaccugcaggagcugggcaaguacgagcaguacaucaaguggcccugguacaucuggcugggcuucaucgccggccugaucgccaucgugauggugaccaucaugcugugcugcaugaccagcuguugcagcugccugaagggcugcugcagcugcggcagcugcugcaaguucgacgaggacgacagcgagcccgugcugaagggcgugaagcugcacuacaccugaggacuaguguccaccugucccuccugggcugcuggauugucucguuuuccugccaaauaaacaggaucagcgcuuuacagaucucaaaggcucuuuucagagccaccaaaaaaaaaaaaaaaaaaaaaaaaaaaaaaaaaaaaaaaaaaaaaaaaaaaaaaaaaaaaaaaaaaaaaaaaaaaaaaaaaaaaaaaaaaaaaaaaaaaaa

SEQ ID NO: 24029 - RNA, 4129 nt, Artificial Sequence
  SARS-CoV-2/Wuhan/WIV05/2019__EPI_ISL_402128 spike protein mRNA gc mod (1-1273)(K986P_V987P)
aggagacccgugacccggaaguuguacggcuacgcgacuuucccucccacaaacccucgcgcccuuccuuuccuacuugggcccggcagaaagcuuaccauguucguguuucuggugcugcugccccugguguccagccagugugugaaccugaccaccagaacacagcugccuccagccuacaccaacagcuucaccagaggcguguacuaccccgacaagguguucagauccagcgugcugcacucuacccaggaccuguuccugccuuucuucagcaacgugaccugguuccacgccauccacguguccggcaccaauggcaccaagagauucgacaaccccgugcugcccuucaacgacgggguguacuuugccagcaccgagaaguccaacaucaucagaggcuggaucuucggcaccacacuggacagcaagacccagagccugcugaucgugaacaacgccaccaacguggucaucaaagugugcgaguuccaguucugcaacgaccccuuccugggcgucuacuaccacaagaacaacaagagcuggauggaaagcgaguuccggguguacagcagcgccaacaacugcaccuucgaguacgugucccagccuuuccugauggaccuggaaggcaagcagggcaacuucaagaaccugcgcgaguucguguucaagaacaucgacggcuacuucaaaaucuacagcaagcacaccccuaucaaccucgugcgggaucugccucagggcuucucugcucuggaaccccugguggaucugcccaucggcaucaacaucacccgguuucagacacugcuggcccugcacagaagcuaccugacaccuggcgauagcagcagcggauggacagcuggugccgccgcuuacuaugugggcuaccugcagccuagaaccuuccugcugaaguacaacgagaacggcaccaucaccgacgccguggauugugcucuggauccucugagcgagacaaagugcacccugaaguccuucaccguggaaaagggcaucuaccagaccagcaacuuccgggugcagcccaccgaauccaucgugcgguuccccaauaucaccaaucugugccccuucggcgagguguucaaugccaccagauucgccucuguguacgccuggaaccggaagcggaucagcaauugcguggccgacuacuccgugcuguacaacuccgccagcuucagcaccuucaagugcuacggcguguccccuaccaagcugaacgaccugugcuucacaaacguguacgccgacagcuucgugauccggggagaugaagugcggcagauugccccuggacagacaggcaagaucgccgacuacaacuacaagcugcccgacgacuucaccggcugugugauugccuggaacagcaacaaccuggacuccaaagucggcggcaacuacaauuaccuguaccggcuguuccggaaguccaaucugaagcccuucgagcgggacaucagcaccgaaaucuaucaggccggcagcaccccuugcaacggcguggaaggcuucaacugcuacuucccacugcaguccuacggcuuucagcccacaaauggcgugggcuaucagcccuacagagugguggugcugagcuucgaacugcugcaugcuccugccacagugugcggcccuaagaaaagcaccaaucucgugaagaacaaaugcgugaacuucaacuucaacggccugaccggcaccggcgugcugacagagagcaacaagaaguuccugccauuccagcaguuuggccgggauaucgccgauaccacagacgccguuagagauccccagacacuggaaauccuggacaucaccccaugcagcuucggcggagugucugugaucaccccuggcaccaacaccagcaaucagguggcagugcuguaccaggacgugaacuguaccgaagugcccguggccauucacgccgaucagcugacaccuacauggcggguguacuccaccggcagcaauguguuucagaccagagccggcugucugaucggagccgagcacgugaacaauagcuacgagugcgacauccccaucggcgcuggcaucugugccagcuaccagacacagacaaacagccccagacgggcuagaagcguggccagccagagcaucauugccuacacaaugucucugggcgccgagaacagcguggccuacuccaacaacucuaucgcuauccccaccaacuucaccaucagcgugaccaccgagauccugccuguguccaugaccaagaccagcguggacugcaccauguacaucugcggcgauuccaccgagugcuccaaccugcugcugcaguacggcagcuucugcacccagcugaauagagcccugacagggaucgccguggaacaggacaagaacacccaagagguguucgcccaagugaagcaaaucuacaagaccccuccuaucaaggacuucggcggcuucaauuucagccagauucugcccgauccuagcaagcccagcaagcggagcuucaucgaggaccugcuguucaacaaagugacacuggccgacgccggcuucaucaagcaguauggcgauugucugggcgacauugccgccagggaucugauuugcgcccagaaguuuaacggacugacagugcugccuccucugcugaccgaugagaugaucgcccaguacacaucugcccugcuggccggcacaaucacaagcggcuggacauuuggagcuggcgccgcucugcagauccccuuugcuaugcagauggccuaccgguucaacggcaucggagugacccagaaugugcuguacgagaaccagaagcugaucgccaaccaguucaacagcgccaucggcaagauccaggacagccugagcagcacagcaagcgcccugggaaagcugcaggacguggucaaccagaaugcccaggcacugaacacccuggucaagcagcuguccuccaacuucggcgccaucagcucugugcugaacgauauccugagcagacuggacccuccugaggccgaggugcagaucgacagacugaucacaggcagacugcagagccuccagacauacgugacccagcagcugaucagagccgccgagauuagagccucugccaaucuggccgccaccaagaugucugagugugugcugggccagagcaagagaguggacuuuugcggcaagggcuaccaccugaugagcuucccucagucugccccucacggcgugguguuucugcacgugacauaugugcccgcucaagagaagaauuucaccaccgcuccagccaucugccacgacggcaaagcccacuuuccuagagaaggcguguucguguccaacggcacccauugguucgugacacagcggaacuucuacgagccccagaucaucaccaccgacaacaccuucgugucuggcaacugcgacguugugaucggcauugugaacaauaccguguacgacccucugcagcccgagcuggacagcuucaaagaggaacuggacaaguacuuuaagaaccacacaagccccgacguggaccugggcgauaucagcggaaucaaugccagcgucgugaacauccagaaagagaucgaccggcugaacgagguggccaagaaucugaacgagagccugaucgaccugcaagaacuggggaaguacgagcaguacaucaaguggcccugguacaucuggcugggcuuuaucgccggacugauugccaucgugauggucacaaucaugcuguguugcaugaccagcugcuguagcugccugaagggcuguuguagcuguggcagcugcugcaaguucgacgaggacgauucugagcccgugcugaagggcgugaaacugcacuacaccugaggacuaguguccaccugucccuccugggcugcuggauugucucguuuuccugccaaauaaacaggaucagcgcuuuacagaucucaaaggcucuuuucagagccaccaaaaaaaaaaaaaaaaaaaaaaaaaaaaaaaaaaaaaaaaaaaaaaaaaaaaaaaaaaaaaaaaaaaaaaaaaaaaaaaaaaaaaaaaaaaaaaaaaaaaa

SEQ ID NO: 24030 - RNA, 4129 nt, Artificial Sequence
  SARS-CoV-2/Wuhan/WIV05/2019__EPI_ISL_402128 spike protein mRNA gc mod (1-1273)(K986P_V987P_ D614G)
aggagacccgugacccggaaguuguacggcuacgcgacuuucccucccacaaacccucgcgcccuuccuuuccuacuugggcccggcagaaagcuuaccauguucguguuucuggugcugcugccccugguguccagccagugugugaaccugaccaccagaacacagcugccuccagccuacaccaacagcuucaccagaggcguguacuaccccgacaagguguucagauccagcgugcugcacucuacccaggaccuguuccugccuuucuucagcaacgugaccugguuccacgccauccacguguccggcaccaauggcaccaagagauucgacaaccccgugcugcccuucaacgacgggguguacuuugccagcaccgagaaguccaacaucaucagaggcuggaucuucggcaccacacuggacagcaagacccagagccugcugaucgugaacaacgccaccaacguggucaucaaagugugcgaguuccaguucugcaacgaccccuuccugggcgucuacuaccacaagaacaacaagagcuggauggaaagcgaguuccggguguacagcagcgccaacaacugcaccuucgaguacgugucccagccuuuccugauggaccuggaaggcaagcagggcaacuucaagaaccugcgcgaguucguguucaagaacaucgacggcuacuucaaaaucuacagcaagcacaccccuaucaaccucgugcgggaucugccucagggcuucucugcucuggaaccccugguggaucugcccaucggcaucaacaucacccgguuucagacacugcuggcccugcacagaagcuaccugacaccuggcgauagcagcagcggauggacagcuggugccgccgcuuacuaugugggcuaccugcagccuagaaccuuccugcugaaguacaacgagaacggcaccaucaccgacgccguggauugugcucuggauccucugagcgagacaaagugcacccugaaguccuucaccguggaaaagggcaucuaccagaccagcaacuuccgggugcagcccaccgaauccaucgugcgguuccccaauaucaccaaucugugccccuucggcgagguguucaaugccaccagauucgccucuguguacgccuggaaccggaagcggaucagcaauugcguggccgacuacuccgugcuguacaacuccgccagcuucagcaccuucaagugcuacggcguguccccuaccaagcugaacgaccugugcuucacaaacguguacgccgacagcuucgugauccggggagaugaagugcggcagauugccccuggacagacaggcaagaucgccgacuacaacuacaagcugcccgacgacuucaccggcugugugauugccuggaacagcaacaaccuggacuccaaagucggcggcaacuacaauuaccuguaccggcuguuccggaaguccaaucugaagcccuucgagcgggacaucagcaccgaaaucuaucaggccggcagcaccccuugcaacggcguggaaggcuucaacugcuacuucccacugcaguccuacggcuuucagcccacaaauggcgugggcuaucagcccuacagagugguggugcugagcuucgaacugcugcaugcuccugccacagugugcggcccuaagaaaagcaccaaucucgugaagaacaaaugcgugaacuucaacuucaacggccugaccggcaccggcgugcugacagagagcaacaagaaguuccugccauuccagcaguuuggccgggauaucgccgauaccacagacgccguuagagauccccagacacuggaaauccuggacaucaccccaugcagcuucggcggagugucugugaucaccccuggcaccaacaccagcaaucagguggcagugcuguaccagggcgugaacuguaccgaagugcccguggccauucacgccgaucagcugacaccuacauggcggguguacuccaccggcagcaauguguuucagaccagagccggcugucugaucggagccgagcacgugaacaauagcuacgagugcgacauccccaucggcgcuggcaucugugccagcuaccagacacagacaaacagccccagacgggcuagaagcguggccagccagagcaucauugccuacacaaugucucugggcgccgagaacagcguggccuacuccaacaacucuaucgcuauccccaccaacuucaccaucagcgugaccaccgagauccugccuguguccaugaccaagaccagcguggacugcaccauguacaucugcggcgauuccaccgagugcuccaaccugcugcugcaguacggcagcuucugcacccagcugaauagagcccugacagggaucgccguggaacaggacaagaacacccaagagguguucgcccaagugaagcaaaucuacaagaccccuccuaucaaggacuucggcggcuucaauuucagccagauucugcccgauccuagcaagcccagcaagcggagcuucaucgaggaccugcuguucaacaaagugacacuggccgacgccggcuucaucaagcaguauggcgauugucugggcgacauugccgccagggaucugauuugcgcccagaaguuuaacggacugacagugcugccuccucugcugaccgaugagaugaucgcccaguacacaucugcccugcuggccggcacaaucacaagcggcuggacauuuggagcuggcgccgcucugcagauccccuuugcuaugcagauggccuaccgguucaacggcaucggagugacccagaaugugcuguacgagaaccagaagcugaucgccaaccaguucaacagcgccaucggcaagauccaggacagccugagcagcacagcaagcgcccugggaaagcugcaggacguggucaaccagaaugcccaggcacugaacacccuggucaagcagcuguccuccaacuucggcgccaucagcucugugcugaacgauauccugagcagacuggacccuccugaggccgaggugcagaucgacagacugaucacaggcagacugcagagccuccagacauacgugacccagcagcugaucagagccgccgagauuagagccucugccaaucuggccgccaccaagaugucugagugugugcugggccagagcaagagaguggacuuuugcggcaagggcuaccaccugaugagcuucccucagucugccccucacggcgugguguuucugcacgugacauaugugcccgcucaagagaagaauuucaccaccgcuccagccaucugccacgacggcaaagcccacuuuccuagagaaggcguguucguguccaacggcacccauugguucgugacacagcggaacuucuacgagccccagaucaucaccaccgacaacaccuucgugucuggcaacugcgacguugugaucggcauugugaacaauaccguguacgacccucugcagcccgagcuggacagcuucaaagaggaacuggacaaguacuuuaagaaccacacaagccccgacguggaccugggcgauaucagcggaaucaaugccagcgucgugaacauccagaaagagaucgaccggcugaacgagguggccaagaaucugaacgagagccugaucgaccugcaagaacuggggaaguacgagcaguacaucaaguggcccugguacaucuggcugggcuuuaucgccggacugauugccaucgugauggucacaaucaugcuguguugcaugaccagcugcuguagcugccugaagggcuguuguagcuguggcagcugcugcaaguucgacgaggacgauucugagcccgugcugaagggcgugaaacugcacuacaccugaggacuaguguccaccugucccuccugggcugcuggauugucucguuuuccugccaaauaaacaggaucagcgcuuuacagaucucaaaggcucuuuucagagccaccaaaaaaaaaaaaaaaaaaaaaaaaaaaaaaaaaaaaaaaaaaaaaaaaaaaaaaaaaaaaaaaaaaaaaaaaaaaaaaaaaaaaaaaaaaaaaaaaaaaaa

SEQ ID NO: 24031 - RNA, 4129 nt, Artificial Sequence
  SARS-CoV-2/Wuhan/WIV05/2019__EPI_ISL_402128 spike protein mRNA gc mod (1-1273)(K986P_V987P_A222V_D614G)
aggagacccgugacccggaaguuguacggcuacgcgacuuucccucccacaaacccucgcgcccuuccuuuccuacuugggcccggcagaaagcuuaccauguucguguuucuggugcugcugccccugguguccagccagugugugaaccugaccaccagaacacagcugccuccagccuacaccaacagcuucaccagaggcguguacuaccccgacaagguguucagauccagcgugcugcacucuacccaggaccuguuccugccuuucuucagcaacgugaccugguuccacgccauccacguguccggcaccaauggcaccaagagauucgacaaccccgugcugcccuucaacgacgggguguacuuugccagcaccgagaaguccaacaucaucagaggcuggaucuucggcaccacacuggacagcaagacccagagccugcugaucgugaacaacgccaccaacguggucaucaaagugugcgaguuccaguucugcaacgaccccuuccugggcgucuacuaccacaagaacaacaagagcuggauggaaagcgaguuccggguguacagcagcgccaacaacugcaccuucgaguacgugucccagccuuuccugauggaccuggaaggcaagcagggcaacuucaagaaccugcgcgaguucguguucaagaacaucgacggcuacuucaaaaucuacagcaagcacaccccuaucaaccucgugcgggaucugccucagggcuucucugugcuggaaccccugguggaucugcccaucggcaucaacaucacccgguuucagacacugcuggcccugcacagaagcuaccugacaccuggcgauagcagcagcggauggacagcuggugccgccgcuuacuaugugggcuaccugcagccuagaaccuuccugcugaaguacaacgagaacggcaccaucaccgacgccguggauugugcucuggauccucugagcgagacaaagugcacccugaaguccuucaccguggaaaagggcaucuaccagaccagcaacuuccgggugcagcccaccgaauccaucgugcgguuccccaauaucaccaaucugugccccuucggcgagguguucaaugccaccagauucgccucuguguacgccuggaaccggaagcggaucagcaauugcguggccgacuacuccgugcuguacaacuccgccagcuucagcaccuucaagugcuacggcguguccccuaccaagcugaacgaccugugcuucacaaacguguacgccgacagcuucgugauccggggagaugaagugcggcagauugccccuggacagacaggcaagaucgccgacuacaacuacaagcugcccgacgacuucaccggcugugugauugccuggaacagcaacaaccuggacuccaaagucggcggcaacuacaauuaccuguaccggcuguuccggaaguccaaucugaagcccuucgagcgggacaucagcaccgaaaucuaucaggccggcagcaccccuugcaacggcguggaaggcuucaacugcuacuucccacugcaguccuacggcuuucagcccacaaauggcgugggcuaucagcccuacagagugguggugcugagcuucgaacugcugcaugcuccugccacagugugcggcccuaagaaaagcaccaaucucgugaagaacaaaugcgugaacuucaacuucaacggccugaccggcaccggcgugcugacagagagcaacaagaaguuccugccauuccagcaguuuggccgggauaucgccgauaccacagacgccguuagagauccccagacacuggaaauccuggacaucaccccaugcagcuucggcggagugucugugaucaccccuggcaccaacaccagcaaucagguggcagugcuguaccagggcgugaacuguaccgaagugcccguggccauucacgccgaucagcugacaccuacauggcggguguacuccaccggcagcaauguguuucagaccagagccggcugucugaucggagccgagcacgugaacaauagcuacgagugcgacauccccaucggcgcuggcaucugugccagcuaccagacacagacaaacagccccagacgggcuagaagcguggccagccagagcaucauugccuacacaaugucucugggcgccgagaacagcguggccuacuccaacaacucuaucgcuauccccaccaacuucaccaucagcgugaccaccgagauccugccuguguccaugaccaagaccagcguggacugcaccauguacaucugcggcgauuccaccgagugcuccaaccugcugcugcaguacggcagcuucugcacccagcugaauagagcccugacagggaucgccguggaacaggacaagaacacccaagagguguucgcccaagugaagcaaaucuacaagaccccuccuaucaaggacuucggcggcuucaauuucagccagauucugcccgauccuagcaagcccagcaagcggagcuucaucgaggaccugcuguucaacaaagugacacuggccgacgccggcuucaucaagcaguauggcgauugucugggcgacauugccgccagggaucugauuugcgcccagaaguuuaacggacugacagugcugccuccucugcugaccgaugagaugaucgcccaguacacaucugcccugcuggccggcacaaucacaagcggcuggacauuuggagcuggcgccgcucugcagauccccuuugcuaugcagauggccuaccgguucaacggcaucggagugacccagaaugugcuguacgagaaccagaagcugaucgccaaccaguucaacagcgccaucggcaagauccaggacagccugagcagcacagcaagcgcccugggaaagcugcaggacguggucaaccagaaugcccaggcacugaacacccuggucaagcagcuguccuccaacuucggcgccaucagcucugugcugaacgauauccugagcagacuggacccuccugaggccgaggugcagaucgacagacugaucacaggcagacugcagagccuccagacauacgugacccagcagcugaucagagccgccgagauuagagccucugccaaucuggccgccaccaagaugucugagugugugcugggccagagcaagagaguggacuuuugcggcaagggcuaccaccugaugagcuucccucagucugccccucacggcgugguguuucugcacgugacauaugugcccgcucaagagaagaauuucaccaccgcuccagccaucugccacgacggcaaagcccacuuuccuagagaaggcguguucguguccaacggcacccauugguucgugacacagcggaacuucuacgagccccagaucaucaccaccgacaacaccuucgugucuggcaacugcgacguugugaucggcauugugaacaauaccguguacgacccucugcagcccgagcuggacagcuucaaagaggaacuggacaaguacuuuaagaaccacacaagccccgacguggaccugggcgauaucagcggaaucaaugccagcgucgugaacauccagaaagagaucgaccggcugaacgagguggccaagaaucugaacgagagccugaucgaccugcaagaacuggggaaguacgagcaguacaucaaguggcccugguacaucuggcugggcuuuaucgccggacugauugccaucgugauggucacaaucaugcuguguugcaugaccagcugcuguagcugccugaagggcuguuguagcuguggcagcugcugcaaguucgacgaggacgauucugagcccgugcugaagggcgugaaacugcacuacaccugaggacuaguguccaccugucccuccugggcugcuggauugucucguuuuccugccaaauaaacaggaucagcgcuuuacagaucucaaaggcucuuuucagagccaccaaaaaaaaaaaaaaaaaaaaaaaaaaaaaaaaaaaaaaaaaaaaaaaaaaaaaaaaaaaaaaaaaaaaaaaaaaaaaaaaaaaaaaaaaaaaaaaaaaaaa

SEQ ID NO: 24032 - RNA, 4129 nt, Artificial Sequence
  SARS-CoV-2/Wuhan/WIV05/2019__EPI_ISL_402128 spike protein mRNA gc mod (1-1273)(K986P_V987P_N439K_D614G)
aggagacccgugacccggaaguuguacggcuacgcgacuuucccucccacaaacccucgcgcccuuccuuuccuacuugggcccggcagaaagcuuaccauguucguguuucuggugcugcugccccugguguccagccagugugugaaccugaccaccagaacacagcugccuccagccuacaccaacagcuucaccagaggcguguacuaccccgacaagguguucagauccagcgugcugcacucuacccaggaccuguuccugccuuucuucagcaacgugaccugguuccacgccauccacguguccggcaccaauggcaccaagagauucgacaaccccgugcugcccuucaacgacgggguguacuuugccagcaccgagaaguccaacaucaucagaggcuggaucuucggcaccacacuggacagcaagacccagagccugcugaucgugaacaacgccaccaacguggucaucaaagugugcgaguuccaguucugcaacgaccccuuccugggcgucuacuaccacaagaacaacaagagcuggauggaaagcgaguuccggguguacagcagcgccaacaacugcaccuucgaguacgugucccagccuuuccugauggaccuggaaggcaagcagggcaacuucaagaaccugcgcgaguucguguucaagaacaucgacggcuacuucaaaaucuacagcaagcacaccccuaucaaccucgugcgggaucugccucagggcuucucugcucuggaaccccugguggaucugcccaucggcaucaacaucacccgguuucagacacugcuggcccugcacagaagcuaccugacaccuggcgauagcagcagcggauggacagcuggugccgccgcuuacuaugugggcuaccugcagccuagaaccuuccugcugaaguacaacgagaacggcaccaucaccgacgccguggauugugcucuggauccucugagcgagacaaagugcacccugaaguccuucaccguggaaaagggcaucuaccagaccagcaacuuccgggugcagcccaccgaauccaucgugcgguuccccaauaucaccaaucugugccccuucggcgagguguucaaugccaccagauucgccucuguguacgccuggaaccggaagcggaucagcaauugcguggccgacuacuccgugcuguacaacuccgccagcuucagcaccuucaagugcuacggcguguccccuaccaagcugaacgaccugugcuucacaaacguguacgccgacagcuucgugauccggggagaugaagugcggcagauugccccuggacagacaggcaagaucgccgacuacaacuacaagcugcccgacgacuucaccggcugugugauugccuggaacagcaagaaccuggacuccaaagucggcggcaacuacaauuaccuguaccggcuguuccggaaguccaaucugaagcccuucgagcgggacaucagcaccgaaaucuaucaggccggcagcaccccuugcaacggcguggaaggcuucaacugcuacuucccacugcaguccuacggcuuucagcccacaaauggcgugggcuaucagcccuacagagugguggugcugagcuucgaacugcugcaugcuccugccacagugugcggcccuaagaaaagcaccaaucucgugaagaacaaaugcgugaacuucaacuucaacggccugaccggcaccggcgugcugacagagagcaacaagaaguuccugccauuccagcaguuuggccgggauaucgccgauaccacagacgccguuagagauccccagacacuggaaauccuggacaucaccccaugcagcuucggcggagugucugugaucaccccuggcaccaacaccagcaaucagguggcagugcuguaccagggcgugaacuguaccgaagugcccguggccauucacgccgaucagcugacaccuacauggcggguguacuccaccggcagcaauguguuucagaccagagccggcugucugaucggagccgagcacgugaacaauagcuacgagugcgacauccccaucggcgcuggcaucugugccagcuaccagacacagacaaacagccccagacgggcuagaagcguggccagccagagcaucauugccuacacaaugucucugggcgccgagaacagcguggccuacuccaacaacucuaucgcuauccccaccaacuucaccaucagcgugaccaccgagauccugccuguguccaugaccaagaccagcguggacugcaccauguacaucugcggcgauuccaccgagugcuccaaccugcugcugcaguacggcagcuucugcacccagcugaauagagcccugacagggaucgccguggaacaggacaagaacacccaagagguguucgcccaagugaagcaaaucuacaagaccccuccuaucaaggacuucggcggcuucaauuucagccagauucugcccgauccuagcaagcccagcaagcggagcuucaucgaggaccugcuguucaacaaagugacacuggccgacgccggcuucaucaagcaguauggcgauugucugggcgacauugccgccagggaucugauuugcgcccagaaguuuaacggacugacagugcugccuccucugcugaccgaugagaugaucgcccaguacacaucugcccugcuggccggcacaaucacaagcggcuggacauuuggagcuggcgccgcucugcagauccccuuugcuaugcagauggccuaccgguucaacggcaucggagugacccagaaugugcuguacgagaaccagaagcugaucgccaaccaguucaacagcgccaucggcaagauccaggacagccugagcagcacagcaagcgcccugggaaagcugcaggacguggucaaccagaaugcccaggcacugaacacccuggucaagcagcuguccuccaacuucggcgccaucagcucugugcugaacgauauccugagcagacuggacccuccugaggccgaggugcagaucgacagacugaucacaggcagacugcagagccuccagacauacgugacccagcagcugaucagagccgccgagauuagagccucugccaaucuggccgccaccaagaugucugagugugugcugggccagagcaagagaguggacuuuugcggcaagggcuaccaccugaugagcuucccucagucugccccucacggcgugguguuucugcacgugacauaugugcccgcucaagagaagaauuucaccaccgcuccagccaucugccacgacggcaaagcccacuuuccuagagaaggcguguucguguccaacggcacccauugguucgugacacagcggaacuucuacgagccccagaucaucaccaccgacaacaccuucgugucuggcaacugcgacguugugaucggcauugugaacaauaccguguacgacccucugcagcccgagcuggacagcuucaaagaggaacuggacaaguacuuuaagaaccacacaagccccgacguggaccugggcgauaucagcggaaucaaugccagcgucgugaacauccagaaagagaucgaccggcugaacgagguggccaagaaucugaacgagagccugaucgaccugcaagaacuggggaaguacgagcaguacaucaaguggcccugguacaucuggcugggcuuuaucgccggacugauugccaucgugauggucacaaucaugcuguguugcaugaccagcugcuguagcugccugaagggcuguuguagcuguggcagcugcugcaaguucgacgaggacgauucugagcccgugcugaagggcgugaaacugcacuacaccugaggacuaguguccaccugucccuccugggcugcuggauugucucguuuuccugccaaauaaacaggaucagcgcuuuacagaucucaaaggcucuuuucagagccaccaaaaaaaaaaaaaaaaaaaaaaaaaaaaaaaaaaaaaaaaaaaaaaaaaaaaaaaaaaaaaaaaaaaaaaaaaaaaaaaaaaaaaaaaaaaaaaaaaaaaa

SEQ ID NO: 24033 - RNA, 4129 nt, Artificial Sequence
  SARS-CoV-2/Wuhan/WIV05/2019__EPI_ISL_402128 spike protein mRNA gc mod (1-1273)(K986P_V987P_S477N_D614G)
aggagacccgugacccggaaguuguacggcuacgcgacuuucccucccacaaacccucgcgcccuuccuuuccuacuugggcccggcagaaagcuuaccauguucguguuucuggugcugcugccccugguguccagccagugugugaaccugaccaccagaacacagcugccuccagccuacaccaacagcuucaccagaggcguguacuaccccgacaagguguucagauccagcgugcugcacucuacccaggaccuguuccugccuuucuucagcaacgugaccugguuccacgccauccacguguccggcaccaauggcaccaagagauucgacaaccccgugcugcccuucaacgacgggguguacuuugccagcaccgagaaguccaacaucaucagaggcuggaucuucggcaccacacuggacagcaagacccagagccugcugaucgugaacaacgccaccaacguggucaucaaagugugcgaguuccaguucugcaacgaccccuuccugggcgucuacuaccacaagaacaacaagagcuggauggaaagcgaguuccggguguacagcagcgccaacaacugcaccuucgaguacgugucccagccuuuccugauggaccuggaaggcaagcagggcaacuucaagaaccugcgcgaguucguguucaagaacaucgacggcuacuucaaaaucuacagcaagcacaccccuaucaaccucgugcgggaucugccucagggcuucucugcucuggaaccccugguggaucugcccaucggcaucaacaucacccgguuucagacacugcuggcccugcacagaagcuaccugacaccuggcgauagcagcagcggauggacagcuggugccgccgcuuacuaugugggcuaccugcagccuagaaccuuccugcugaaguacaacgagaacggcaccaucaccgacgccguggauugugcucuggauccucugagcgagacaaagugcacccugaaguccuucaccguggaaaagggcaucuaccagaccagcaacuuccgggugcagcccaccgaauccaucgugcgguuccccaauaucaccaaucugugccccuucggcgagguguucaaugccaccagauucgccucuguguacgccuggaaccggaagcggaucagcaauugcguggccgacuacuccgugcuguacaacuccgccagcuucagcaccuucaagugcuacggcguguccccuaccaagcugaacgaccugugcuucacaaacguguacgccgacagcuucgugauccggggagaugaagugcggcagauugccccuggacagacaggcaagaucgccgacuacaacuacaagcugcccgacgacuucaccggcugugugauugccuggaacagcaacaaccuggacuccaaagucggcggcaacuacaauuaccuguaccggcuguuccggaaguccaaucugaagcccuucgagcgggacaucagcaccgaaaucuaucaggccggcaacaccccuugcaacggcguggaaggcuucaacugcuacuucccacugcaguccuacggcuuucagcccacaaauggcgugggcuaucagcccuacagagugguggugcugagcuucgaacugcugcaugcuccugccacagugugcggcccuaagaaaagcaccaaucucgugaagaacaaaugcgugaacuucaacuucaacggccugaccggcaccggcgugcugacagagagcaacaagaaguuccugccauuccagcaguuuggccgggauaucgccgauaccacagacgccguuagagauccccagacacuggaaauccuggacaucaccccaugcagcuucggcggagugucugugaucaccccuggcaccaacaccagcaaucagguggcagugcuguaccagggcgugaacuguaccgaagugcccguggccauucacgccgaucagcugacaccuacauggcggguguacuccaccggcagcaauguguuucagaccagagccggcugucugaucggagccgagcacgugaacaauagcuacgagugcgacauccccaucggcgcuggcaucugugccagcuaccagacacagacaaacagccccagacgggcuagaagcguggccagccagagcaucauugccuacacaaugucucugggcgccgagaacagcguggccuacuccaacaacucuaucgcuauccccaccaacuucaccaucagcgugaccaccgagauccugccuguguccaugaccaagaccagcguggacugcaccauguacaucugcggcgauuccaccgagugcuccaaccugcugcugcaguacggcagcuucugcacccagcugaauagagcccugacagggaucgccguggaacaggacaagaacacccaagagguguucgcccaagugaagcaaaucuacaagaccccuccuaucaaggacuucggcggcuucaauuucagccagauucugcccgauccuagcaagcccagcaagcggagcuucaucgaggaccugcuguucaacaaagugacacuggccgacgccggcuucaucaagcaguauggcgauugucugggcgacauugccgccagggaucugauuugcgcccagaaguuuaacggacugacagugcugccuccucugcugaccgaugagaugaucgcccaguacacaucugcccugcuggccggcacaaucacaagcggcuggacauuuggagcuggcgccgcucugcagauccccuuugcuaugcagauggccuaccgguucaacggcaucggagugacccagaaugugcuguacgagaaccagaagcugaucgccaaccaguucaacagcgccaucggcaagauccaggacagccugagcagcacagcaagcgcccugggaaagcugcaggacguggucaaccagaaugcccaggcacugaacacccuggucaagcagcuguccuccaacuucggcgccaucagcucugugcugaacgauauccugagcagacuggacccuccugaggccgaggugcagaucgacagacugaucacaggcagacugcagagccuccagacauacgugacccagcagcugaucagagccgccgagauuagagccucugccaaucuggccgccaccaagaugucugagugugugcugggccagagcaagagaguggacuuuugcggcaagggcuaccaccugaugagcuucccucagucugccccucacggcgugguguuucugcacgugacauaugugcccgcucaagagaagaauuucaccaccgcuccagccaucugccacgacggcaaagcccacuuuccuagagaaggcguguucguguccaacggcacccauugguucgugacacagcggaacuucuacgagccccagaucaucaccaccgacaacaccuucgugucuggcaacugcgacguugugaucggcauugugaacaauaccguguacgacccucugcagcccgagcuggacagcuucaaagaggaacuggacaaguacuuuaagaaccacacaagccccgacguggaccugggcgauaucagcggaaucaaugccagcgucgugaacauccagaaagagaucgaccggcugaacgagguggccaagaaucugaacgagagccugaucgaccugcaagaacuggggaaguacgagcaguacaucaaguggcccugguacaucuggcugggcuuuaucgccggacugauugccaucgugauggucacaaucaugcuguguugcaugaccagcugcuguagcugccugaagggcuguuguagcuguggcagcugcugcaaguucgacgaggacgauucugagcccgugcugaagggcgugaaacugcacuacaccugaggacuaguguccaccugucccuccugggcugcuggauugucucguuuuccugccaaauaaacaggaucagcgcuuuacagaucucaaaggcucuuuucagagccaccaaaaaaaaaaaaaaaaaaaaaaaaaaaaaaaaaaaaaaaaaaaaaaaaaaaaaaaaaaaaaaaaaaaaaaaaaaaaaaaaaaaaaaaaaaaaaaaaaaaaa

SEQ ID NO: 24034 - RNA, 4129 nt, Artificial Sequence
  SARS-CoV-2/Wuhan/WIV05/2019__EPI_ISL_402128 spike protein mRNA gc mod (1-1273)(K986P_V987P_N501Y_D614G)
aggagacccgugacccggaaguuguacggcuacgcgacuuucccucccacaaacccucgcgcccuuccuuuccuacuugggcccggcagaaagcuuaccauguucguguuucuggugcugcugccccugguguccagccagugugugaaccugaccaccagaacacagcugccuccagccuacaccaacagcuucaccagaggcguguacuaccccgacaagguguucagauccagcgugcugcacucuacccaggaccuguuccugccuuucuucagcaacgugaccugguuccacgccauccacguguccggcaccaauggcaccaagagauucgacaaccccgugcugcccuucaacgacgggguguacuuugccagcaccgagaaguccaacaucaucagaggcuggaucuucggcaccacacuggacagcaagacccagagccugcugaucgugaacaacgccaccaacguggucaucaaagugugcgaguuccaguucugcaacgaccccuuccugggcgucuacuaccacaagaacaacaagagcuggauggaaagcgaguuccggguguacagcagcgccaacaacugcaccuucgaguacgugucccagccuuuccugauggaccuggaaggcaagcagggcaacuucaagaaccugcgcgaguucguguucaagaacaucgacggcuacuucaaaaucuacagcaagcacaccccuaucaaccucgugcgggaucugccucagggcuucucugcucuggaaccccugguggaucugcccaucggcaucaacaucacccgguuucagacacugcuggcccugcacagaagcuaccugacaccuggcgauagcagcagcggauggacagcuggugccgccgcuuacuaugugggcuaccugcagccuagaaccuuccugcugaaguacaacgagaacggcaccaucaccgacgccguggauugugcucuggauccucugagcgagacaaagugcacccugaaguccuucaccguggaaaagggcaucuaccagaccagcaacuuccgggugcagcccaccgaauccaucgugcgguuccccaauaucaccaaucugugccccuucggcgagguguucaaugccaccagauucgccucuguguacgccuggaaccggaagcggaucagcaauugcguggccgacuacuccgugcuguacaacuccgccagcuucagcaccuucaagugcuacggcguguccccuaccaagcugaacgaccugugcuucacaaacguguacgccgacagcuucgugauccggggagaugaagugcggcagauugccccuggacagacaggcaagaucgccgacuacaacuacaagcugcccgacgacuucaccggcugugugauugccuggaacagcaacaaccuggacuccaaagucggcggcaacuacaauuaccuguaccggcuguuccggaaguccaaucugaagcccuucgagcgggacaucagcaccgaaaucuaucaggccggcagcaccccuugcaacggcguggaaggcuucaacugcuacuucccacugcaguccuacggcuuucagcccacauacggcgugggcuaucagcccuacagagugguggugcugagcuucgaacugcugcaugcuccugccacagugugcggcccuaagaaaagcaccaaucucgugaagaacaaaugcgugaacuucaacuucaacggccugaccggcaccggcgugcugacagagagcaacaagaaguuccugccauuccagcaguuuggccgggauaucgccgauaccacagacgccguuagagauccccagacacuggaaauccuggacaucaccccaugcagcuucggcggagugucugugaucaccccuggcaccaacaccagcaaucagguggcagugcuguaccagggcgugaacuguaccgaagugcccguggccauucacgccgaucagcugacaccuacauggcggguguacuccaccggcagcaauguguuucagaccagagccggcugucugaucggagccgagcacgugaacaauagcuacgagugcgacauccccaucggcgcuggcaucugugccagcuaccagacacagacaaacagccccagacgggcuagaagcguggccagccagagcaucauugccuacacaaugucucugggcgccgagaacagcguggccuacuccaacaacucuaucgcuauccccaccaacuucaccaucagcgugaccaccgagauccugccuguguccaugaccaagaccagcguggacugcaccauguacaucugcggcgauuccaccgagugcuccaaccugcugcugcaguacggcagcuucugcacccagcugaauagagcccugacagggaucgccguggaacaggacaagaacacccaagagguguucgcccaagugaagcaaaucuacaagaccccuccuaucaaggacuucggcggcuucaauuucagccagauucugcccgauccuagcaagcccagcaagcggagcuucaucgaggaccugcuguucaacaaagugacacuggccgacgccggcuucaucaagcaguauggcgauugucugggcgacauugccgccagggaucugauuugcgcccagaaguuuaacggacugacagugcugccuccucugcugaccgaugagaugaucgcccaguacacaucugcccugcuggccggcacaaucacaagcggcuggacauuuggagcuggcgccgcucugcagauccccuuugcuaugcagauggccuaccgguucaacggcaucggagugacccagaaugugcuguacgagaaccagaagcugaucgccaaccaguucaacagcgccaucggcaagauccaggacagccugagcagcacagcaagcgcccugggaaagcugcaggacguggucaaccagaaugcccaggcacugaacacccuggucaagcagcuguccuccaacuucggcgccaucagcucugugcugaacgauauccugagcagacuggacccuccugaggccgaggugcagaucgacagacugaucacaggcagacugcagagccuccagacauacgugacccagcagcugaucagagccgccgagauuagagccucugccaaucuggccgccaccaagaugucugagugugugcugggccagagcaagagaguggacuuuugcggcaagggcuaccaccugaugagcuucccucagucugccccucacggcgugguguuucugcacgugacauaugugcccgcucaagagaagaauuucaccaccgcuccagccaucugccacgacggcaaagcccacuuuccuagagaaggcguguucguguccaacggcacccauugguucgugacacagcggaacuucuacgagccccagaucaucaccaccgacaacaccuucgugucuggcaacugcgacguugugaucggcauugugaacaauaccguguacgacccucugcagcccgagcuggacagcuucaaagaggaacuggacaaguacuuuaagaaccacacaagccccgacguggaccugggcgauaucagcggaaucaaugccagcgucgugaacauccagaaagagaucgaccggcugaacgagguggccaagaaucugaacgagagccugaucgaccugcaagaacuggggaaguacgagcaguacaucaaguggcccugguacaucuggcugggcuuuaucgccggacugauugccaucgugauggucacaaucaugcuguguugcaugaccagcugcuguagcugccugaagggcuguuguagcuguggcagcugcugcaaguucgacgaggacgauucugagcccgugcugaagggcgugaaacugcacuacaccugaggacuaguguccaccugucccuccugggcugcuggauugucucguuuuccugccaaauaaacaggaucagcgcuuuacagaucucaaaggcucuuuucagagccaccaaaaaaaaaaaaaaaaaaaaaaaaaaaaaaaaaaaaaaaaaaaaaaaaaaaaaaaaaaaaaaaaaaaaaaaaaaaaaaaaaaaaaaaaaaaaaaaaaaaaa

SEQ ID NO: 24035 - RNA, 4123 nt, Artificial Sequence
  SARS-CoV-2/Wuhan/WIV05/2019__EPI_ISL_402128 spike protein mRNA gc mod (1-1273)(K986P_V987P_H69del_V70del_D614G)
aggagacccgugacccggaaguuguacggcuacgcgacuuucccucccacaaacccucgcgcccuuccuuuccuacuugggcccggcagaaagcuuaccauguucguguuucuggugcugcugccccugguguccagccagugugugaaccugaccaccagaacacagcugccuccagccuacaccaacagcuucaccagaggcguguacuaccccgacaagguguucagauccagcgugcugcacucuacccaggaccuguuccugccuuucuucagcaacgugaccugguuccacgccaucuccggcaccaauggcaccaagagauucgacaaccccgugcugcccuucaacgacgggguguacuuugccagcaccgagaaguccaacaucaucagaggcuggaucuucggcaccacacuggacagcaagacccagagccugcugaucgugaacaacgccaccaacguggucaucaaagugugcgaguuccaguucugcaacgaccccuuccugggcgucuacuaccacaagaacaacaagagcuggauggaaagcgaguuccggguguacagcagcgccaacaacugcaccuucgaguacgugucccagccuuuccugauggaccuggaaggcaagcagggcaacuucaagaaccugcgcgaguucguguucaagaacaucgacggcuacuucaaaaucuacagcaagcacaccccuaucaaccucgugcgggaucugccucagggcuucucugcucuggaaccccugguggaucugcccaucggcaucaacaucacccgguuucagacacugcuggcccugcacagaagcuaccugacaccuggcgauagcagcagcggauggacagcuggugccgccgcuuacuaugugggcuaccugcagccuagaaccuuccugcugaaguacaacgagaacggcaccaucaccgacgccguggauugugcucuggauccucugagcgagacaaagugcacccugaaguccuucaccguggaaaagggcaucuaccagaccagcaacuuccgggugcagcccaccgaauccaucgugcgguuccccaauaucaccaaucugugccccuucggcgagguguucaaugccaccagauucgccucuguguacgccuggaaccggaagcggaucagcaauugcguggccgacuacuccgugcuguacaacuccgccagcuucagcaccuucaagugcuacggcguguccccuaccaagcugaacgaccugugcuucacaaacguguacgccgacagcuucgugauccggggagaugaagugcggcagauugccccuggacagacaggcaagaucgccgacuacaacuacaagcugcccgacgacuucaccggcugugugauugccuggaacagcaacaaccuggacuccaaagucggcggcaacuacaauuaccuguaccggcuguuccggaaguccaaucugaagcccuucgagcgggacaucagcaccgaaaucuaucaggccggcagcaccccuugcaacggcguggaaggcuucaacugcuacuucccacugcaguccuacggcuuucagcccacaaauggcgugggcuaucagcccuacagagugguggugcugagcuucgaacugcugcaugcuccugccacagugugcggcccuaagaaaagcaccaaucucgugaagaacaaaugcgugaacuucaacuucaacggccugaccggcaccggcgugcugacagagagcaacaagaaguuccugccauuccagcaguuuggccgggauaucgccgauaccacagacgccguuagagauccccagacacuggaaauccuggacaucaccccaugcagcuucggcggagugucugugaucaccccuggcaccaacaccagcaaucagguggcagugcuguaccagggcgugaacuguaccgaagugcccguggccauucacgccgaucagcugacaccuacauggcggguguacuccaccggcagcaauguguuucagaccagagccggcugucugaucggagccgagcacgugaacaauagcuacgagugcgacauccccaucggcgcuggcaucugugccagcuaccagacacagacaaacagccccagacgggcuagaagcguggccagccagagcaucauugccuacacaaugucucugggcgccgagaacagcguggccuacuccaacaacucuaucgcuauccccaccaacuucaccaucagcgugaccaccgagauccugccuguguccaugaccaagaccagcguggacugcaccauguacaucugcggcgauuccaccgagugcuccaaccugcugcugcaguacggcagcuucugcacccagcugaauagagcccugacagggaucgccguggaacaggacaagaacacccaagagguguucgcccaagugaagcaaaucuacaagaccccuccuaucaaggacuucggcggcuucaauuucagccagauucugcccgauccuagcaagcccagcaagcggagcuucaucgaggaccugcuguucaacaaagugacacuggccgacgccggcuucaucaagcaguauggcgauugucugggcgacauugccgccagggaucugauuugcgcccagaaguuuaacggacugacagugcugccuccucugcugaccgaugagaugaucgcccaguacacaucugcccugcuggccggcacaaucacaagcggcuggacauuuggagcuggcgccgcucugcagauccccuuugcuaugcagauggccuaccgguucaacggcaucggagugacccagaaugugcuguacgagaaccagaagcugaucgccaaccaguucaacagcgccaucggcaagauccaggacagccugagcagcacagcaagcgcccugggaaagcugcaggacguggucaaccagaaugcccaggcacugaacacccuggucaagcagcuguccuccaacuucggcgccaucagcucugugcugaacgauauccugagcagacuggacccuccugaggccgaggugcagaucgacagacugaucacaggcagacugcagagccuccagacauacgugacccagcagcugaucagagccgccgagauuagagccucugccaaucuggccgccaccaagaugucugagugugugcugggccagagcaagagaguggacuuuugcggcaagggcuaccaccugaugagcuucccucagucugccccucacggcgugguguuucugcacgugacauaugugcccgcucaagagaagaauuucaccaccgcuccagccaucugccacgacggcaaagcccacuuuccuagagaaggcguguucguguccaacggcacccauugguucgugacacagcggaacuucuacgagccccagaucaucaccaccgacaacaccuucgugucuggcaacugcgacguugugaucggcauugugaacaauaccguguacgacccucugcagcccgagcuggacagcuucaaagaggaacuggacaaguacuuuaagaaccacacaagccccgacguggaccugggcgauaucagcggaaucaaugccagcgucgugaacauccagaaagagaucgaccggcugaacgagguggccaagaaucugaacgagagccugaucgaccugcaagaacuggggaaguacgagcaguacaucaaguggcccugguacaucuggcugggcuuuaucgccggacugauugccaucgugauggucacaaucaugcuguguugcaugaccagcugcuguagcugccugaagggcuguuguagcuguggcagcugcugcaaguucgacgaggacgauucugagcccgugcugaagggcgugaaacugcacuacaccugaggacuaguguccaccugucccuccugggcugcuggauugucucguuuuccugccaaauaaacaggaucagcgcuuuacagaucucaaaggcucuuuucagagccaccaaaaaaaaaaaaaaaaaaaaaaaaaaaaaaaaaaaaaaaaaaaaaaaaaaaaaaaaaaaaaaaaaaaaaaaaaaaaaaaaaaaaaaaaaaaaaaaaaaaaa

SEQ ID NO: 24036 - RNA, 4129 nt, Artificial Sequence
  SARS-CoV-2/Wuhan/WIV05/2019__EPI_ISL_402128 spike protein mRNA gc mod (1-1273)(K986P_V987P_Y453F_D614G)
aggagacccgugacccggaaguuguacggcuacgcgacuuucccucccacaaacccucgcgcccuuccuuuccuacuugggcccggcagaaagcuuaccauguucguguuucuggugcugcugccccugguguccagccagugugugaaccugaccaccagaacacagcugccuccagccuacaccaacagcuucaccagaggcguguacuaccccgacaagguguucagauccagcgugcugcacucuacccaggaccuguuccugccuuucuucagcaacgugaccugguuccacgccauccacguguccggcaccaauggcaccaagagauucgacaaccccgugcugcccuucaacgacgggguguacuuugccagcaccgagaaguccaacaucaucagaggcuggaucuucggcaccacacuggacagcaagacccagagccugcugaucgugaacaacgccaccaacguggucaucaaagugugcgaguuccaguucugcaacgaccccuuccugggcgucuacuaccacaagaacaacaagagcuggauggaaagcgaguuccggguguacagcagcgccaacaacugcaccuucgaguacgugucccagccuuuccugauggaccuggaaggcaagcagggcaacuucaagaaccugcgcgaguucguguucaagaacaucgacggcuacuucaaaaucuacagcaagcacaccccuaucaaccucgugcgggaucugccucagggcuucucugcucuggaaccccugguggaucugcccaucggcaucaacaucacccgguuucagacacugcuggcccugcacagaagcuaccugacaccuggcgauagcagcagcggauggacagcuggugccgccgcuuacuaugugggcuaccugcagccuagaaccuuccugcugaaguacaacgagaacggcaccaucaccgacgccguggauugugcucuggauccucugagcgagacaaagugcacccugaaguccuucaccguggaaaagggcaucuaccagaccagcaacuuccgggugcagcccaccgaauccaucgugcgguuccccaauaucaccaaucugugccccuucggcgagguguucaaugccaccagauucgccucuguguacgccuggaaccggaagcggaucagcaauugcguggccgacuacuccgugcuguacaacuccgccagcuucagcaccuucaagugcuacggcguguccccuaccaagcugaacgaccugugcuucacaaacguguacgccgacagcuucgugauccggggagaugaagugcggcagauugccccuggacagacaggcaagaucgccgacuacaacuacaagcugcccgacgacuucaccggcugugugauugccuggaacagcaacaaccuggacuccaaagucggcggcaacuacaauuaccuguuccggcuguuccggaaguccaaucugaagcccuucgagcgggacaucagcaccgaaaucuaucaggccggcagcaccccuugcaacggcguggaaggcuucaacugcuacuucccacugcaguccuacggcuuucagcccacaaauggcgugggcuaucagcccuacagagugguggugcugagcuucgaacugcugcaugcuccugccacagugugcggcccuaagaaaagcaccaaucucgugaagaacaaaugcgugaacuucaacuucaacggccugaccggcaccggcgugcugacagagagcaacaagaaguuccugccauuccagcaguuuggccgggauaucgccgauaccacagacgccguuagagauccccagacacuggaaauccuggacaucaccccaugcagcuucggcggagugucugugaucaccccuggcaccaacaccagcaaucagguggcagugcuguaccagggcgugaacuguaccgaagugcccguggccauucacgccgaucagcugacaccuacauggcggguguacuccaccggcagcaauguguuucagaccagagccggcugucugaucggagccgagcacgugaacaauagcuacgagugcgacauccccaucggcgcuggcaucugugccagcuaccagacacagacaaacagccccagacgggcuagaagcguggccagccagagcaucauugccuacacaaugucucugggcgccgagaacagcguggccuacuccaacaacucuaucgcuauccccaccaacuucaccaucagcgugaccaccgagauccugccuguguccaugaccaagaccagcguggacugcaccauguacaucugcggcgauuccaccgagugcuccaaccugcugcugcaguacggcagcuucugcacccagcugaauagagcccugacagggaucgccguggaacaggacaagaacacccaagagguguucgcccaagugaagcaaaucuacaagaccccuccuaucaaggacuucggcggcuucaauuucagccagauucugcccgauccuagcaagcccagcaagcggagcuucaucgaggaccugcuguucaacaaagugacacuggccgacgccggcuucaucaagcaguauggcgauugucugggcgacauugccgccagggaucugauuugcgcccagaaguuuaacggacugacagugcugccuccucugcugaccgaugagaugaucgcccaguacacaucugcccugcuggccggcacaaucacaagcggcuggacauuuggagcuggcgccgcucugcagauccccuuugcuaugcagauggccuaccgguucaacggcaucggagugacccagaaugugcuguacgagaaccagaagcugaucgccaaccaguucaacagcgccaucggcaagauccaggacagccugagcagcacagcaagcgcccugggaaagcugcaggacguggucaaccagaaugcccaggcacugaacacccuggucaagcagcuguccuccaacuucggcgccaucagcucugugcugaacgauauccugagcagacuggacccuccugaggccgaggugcagaucgacagacugaucacaggcagacugcagagccuccagacauacgugacccagcagcugaucagagccgccgagauuagagccucugccaaucuggccgccaccaagaugucugagugugugcugggccagagcaagagaguggacuuuugcggcaagggcuaccaccugaugagcuucccucagucugccccucacggcgugguguuucugcacgugacauaugugcccgcucaagagaagaauuucaccaccgcuccagccaucugccacgacggcaaagcccacuuuccuagagaaggcguguucguguccaacggcacccauugguucgugacacagcggaacuucuacgagccccagaucaucaccaccgacaacaccuucgugucuggcaacugcgacguugugaucggcauugugaacaauaccguguacgacccucugcagcccgagcuggacagcuucaaagaggaacuggacaaguacuuuaagaaccacacaagccccgacguggaccugggcgauaucagcggaaucaaugccagcgucgugaacauccagaaagagaucgaccggcugaacgagguggccaagaaucugaacgagagccugaucgaccugcaagaacuggggaaguacgagcaguacaucaaguggcccugguacaucuggcugggcuuuaucgccggacugauugccaucgugauggucacaaucaugcuguguugcaugaccagcugcuguagcugccugaagggcuguuguagcuguggcagcugcugcaaguucgacgaggacgauucugagcccgugcugaagggcgugaaacugcacuacaccugaggacuaguguccaccugucccuccugggcugcuggauugucucguuuuccugccaaauaaacaggaucagcgcuuuacagaucucaaaggcucuuuucagagccaccaaaaaaaaaaaaaaaaaaaaaaaaaaaaaaaaaaaaaaaaaaaaaaaaaaaaaaaaaaaaaaaaaaaaaaaaaaaaaaaaaaaaaaaaaaaaaaaaaaaaa

SEQ ID NO: 24037 - RNA, 4129 nt, Artificial Sequence
  SARS-CoV-2/Wuhan/WIV05/2019__EPI_ISL_402128 spike protein mRNA gc mod (1-1273)(K986P_V987P_D614G_I692V)
aggagacccgugacccggaaguuguacggcuacgcgacuuucccucccacaaacccucgcgcccuuccuuuccuacuugggcccggcagaaagcuuaccauguucguguuucuggugcugcugccccugguguccagccagugugugaaccugaccaccagaacacagcugccuccagccuacaccaacagcuucaccagaggcguguacuaccccgacaagguguucagauccagcgugcugcacucuacccaggaccuguuccugccuuucuucagcaacgugaccugguuccacgccauccacguguccggcaccaauggcaccaagagauucgacaaccccgugcugcccuucaacgacgggguguacuuugccagcaccgagaaguccaacaucaucagaggcuggaucuucggcaccacacuggacagcaagacccagagccugcugaucgugaacaacgccaccaacguggucaucaaagugugcgaguuccaguucugcaacgaccccuuccugggcgucuacuaccacaagaacaacaagagcuggauggaaagcgaguuccggguguacagcagcgccaacaacugcaccuucgaguacgugucccagccuuuccugauggaccuggaaggcaagcagggcaacuucaagaaccugcgcgaguucguguucaagaacaucgacggcuacuucaaaaucuacagcaagcacaccccuaucaaccucgugcgggaucugccucagggcuucucugcucuggaaccccugguggaucugcccaucggcaucaacaucacccgguuucagacacugcuggcccugcacagaagcuaccugacaccuggcgauagcagcagcggauggacagcuggugccgccgcuuacuaugugggcuaccugcagccuagaaccuuccugcugaaguacaacgagaacggcaccaucaccgacgccguggauugugcucuggauccucugagcgagacaaagugcacccugaaguccuucaccguggaaaagggcaucuaccagaccagcaacuuccgggugcagcccaccgaauccaucgugcgguuccccaauaucaccaaucugugccccuucggcgagguguucaaugccaccagauucgccucuguguacgccuggaaccggaagcggaucagcaauugcguggccgacuacuccgugcuguacaacuccgccagcuucagcaccuucaagugcuacggcguguccccuaccaagcugaacgaccugugcuucacaaacguguacgccgacagcuucgugauccggggagaugaagugcggcagauugccccuggacagacaggcaagaucgccgacuacaacuacaagcugcccgacgacuucaccggcugugugauugccuggaacagcaacaaccuggacuccaaagucggcggcaacuacaauuaccuguaccggcuguuccggaaguccaaucugaagcccuucgagcgggacaucagcaccgaaaucuaucaggccggcagcaccccuugcaacggcguggaaggcuucaacugcuacuucccacugcaguccuacggcuuucagcccacaaauggcgugggcuaucagcccuacagagugguggugcugagcuucgaacugcugcaugcuccugccacagugugcggcccuaagaaaagcaccaaucucgugaagaacaaaugcgugaacuucaacuucaacggccugaccggcaccggcgugcugacagagagcaacaagaaguuccugccauuccagcaguuuggccgggauaucgccgauaccacagacgccguuagagauccccagacacuggaaauccuggacaucaccccaugcagcuucggcggagugucugugaucaccccuggcaccaacaccagcaaucagguggcagugcuguaccagggcgugaacuguaccgaagugcccguggccauucacgccgaucagcugacaccuacauggcggguguacuccaccggcagcaauguguuucagaccagagccggcugucugaucggagccgagcacgugaacaauagcuacgagugcgacauccccaucggcgcuggcaucugugccagcuaccagacacagacaaacagccccagacgggcuagaagcguggccagccagagcgugauugccuacacaaugucucugggcgccgagaacagcguggccuacuccaacaacucuaucgcuauccccaccaacuucaccaucagcgugaccaccgagauccugccuguguccaugaccaagaccagcguggacugcaccauguacaucugcggcgauuccaccgagugcuccaaccugcugcugcaguacggcagcuucugcacccagcugaauagagcccugacagggaucgccguggaacaggacaagaacacccaagagguguucgcccaagugaagcaaaucuacaagaccccuccuaucaaggacuucggcggcuucaauuucagccagauucugcccgauccuagcaagcccagcaagcggagcuucaucgaggaccugcuguucaacaaagugacacuggccgacgccggcuucaucaagcaguauggcgauugucugggcgacauugccgccagggaucugauuugcgcccagaaguuuaacggacugacagugcugccuccucugcugaccgaugagaugaucgcccaguacacaucugcccugcuggccggcacaaucacaagcggcuggacauuuggagcuggcgccgcucugcagauccccuuugcuaugcagauggccuaccgguucaacggcaucggagugacccagaaugugcuguacgagaaccagaagcugaucgccaaccaguucaacagcgccaucggcaagauccaggacagccugagcagcacagcaagcgcccugggaaagcugcaggacguggucaaccagaaugcccaggcacugaacacccuggucaagcagcuguccuccaacuucggcgccaucagcucugugcugaacgauauccugagcagacuggacccuccugaggccgaggugcagaucgacagacugaucacaggcagacugcagagccuccagacauacgugacccagcagcugaucagagccgccgagauuagagccucugccaaucuggccgccaccaagaugucugagugugugcugggccagagcaagagaguggacuuuugcggcaagggcuaccaccugaugagcuucccucagucugccccucacggcgugguguuucugcacgugacauaugugcccgcucaagagaagaauuucaccaccgcuccagccaucugccacgacggcaaagcccacuuuccuagagaaggcguguucguguccaacggcacccauugguucgugacacagcggaacuucuacgagccccagaucaucaccaccgacaacaccuucgugucuggcaacugcgacguugugaucggcauugugaacaauaccguguacgacccucugcagcccgagcuggacagcuucaaagaggaacuggacaaguacuuuaagaaccacacaagccccgacguggaccugggcgauaucagcggaaucaaugccagcgucgugaacauccagaaagagaucgaccggcugaacgagguggccaagaaucugaacgagagccugaucgaccugcaagaacuggggaaguacgagcaguacaucaaguggcccugguacaucuggcugggcuuuaucgccggacugauugccaucgugauggucacaaucaugcuguguugcaugaccagcugcuguagcugccugaagggcuguuguagcuguggcagcugcugcaaguucgacgaggacgauucugagcccgugcugaagggcgugaaacugcacuacaccugaggacuaguguccaccugucccuccugggcugcuggauugucucguuuuccugccaaauaaacaggaucagcgcuuuacagaucucaaaggcucuuuucagagccaccaaaaaaaaaaaaaaaaaaaaaaaaaaaaaaaaaaaaaaaaaaaaaaaaaaaaaaaaaaaaaaaaaaaaaaaaaaaaaaaaaaaaaaaaaaaaaaaaaaaaa

SEQ ID NO: 24038 - RNA, 4129 nt, Artificial Sequence
  SARS-CoV-2/Wuhan/WIV05/2019__EPI_ISL_402128 spike protein mRNA gc mod (1-1273)(K986P_V987P_D614G_M1229I)
aggagacccgugacccggaaguuguacggcuacgcgacuuucccucccacaaacccucgcgcccuuccuuuccuacuugggcccggcagaaagcuuaccauguucguguuucuggugcugcugccccugguguccagccagugugugaaccugaccaccagaacacagcugccuccagccuacaccaacagcuucaccagaggcguguacuaccccgacaagguguucagauccagcgugcugcacucuacccaggaccuguuccugccuuucuucagcaacgugaccugguuccacgccauccacguguccggcaccaauggcaccaagagauucgacaaccccgugcugcccuucaacgacgggguguacuuugccagcaccgagaaguccaacaucaucagaggcuggaucuucggcaccacacuggacagcaagacccagagccugcugaucgugaacaacgccaccaacguggucaucaaagugugcgaguuccaguucugcaacgaccccuuccugggcgucuacuaccacaagaacaacaagagcuggauggaaagcgaguuccggguguacagcagcgccaacaacugcaccuucgaguacgugucccagccuuuccugauggaccuggaaggcaagcagggcaacuucaagaaccugcgcgaguucguguucaagaacaucgacggcuacuucaaaaucuacagcaagcacaccccuaucaaccucgugcgggaucugccucagggcuucucugcucuggaaccccugguggaucugcccaucggcaucaacaucacccgguuucagacacugcuggcccugcacagaagcuaccugacaccuggcgauagcagcagcggauggacagcuggugccgccgcuuacuaugugggcuaccugcagccuagaaccuuccugcugaaguacaacgagaacggcaccaucaccgacgccguggauugugcucuggauccucugagcgagacaaagugcacccugaaguccuucaccguggaaaagggcaucuaccagaccagcaacuuccgggugcagcccaccgaauccaucgugcgguuccccaauaucaccaaucugugccccuucggcgagguguucaaugccaccagauucgccucuguguacgccuggaaccggaagcggaucagcaauugcguggccgacuacuccgugcuguacaacuccgccagcuucagcaccuucaagugcuacggcguguccccuaccaagcugaacgaccugugcuucacaaacguguacgccgacagcuucgugauccggggagaugaagugcggcagauugccccuggacagacaggcaagaucgccgacuacaacuacaagcugcccgacgacuucaccggcugugugauugccuggaacagcaacaaccuggacuccaaagucggcggcaacuacaauuaccuguaccggcuguuccggaaguccaaucugaagcccuucgagcgggacaucagcaccgaaaucuaucaggccggcagcaccccuugcaacggcguggaaggcuucaacugcuacuucccacugcaguccuacggcuuucagcccacaaauggcgugggcuaucagcccuacagagugguggugcugagcuucgaacugcugcaugcuccugccacagugugcggcccuaagaaaagcaccaaucucgugaagaacaaaugcgugaacuucaacuucaacggccugaccggcaccggcgugcugacagagagcaacaagaaguuccugccauuccagcaguuuggccgggauaucgccgauaccacagacgccguuagagauccccagacacuggaaauccuggacaucaccccaugcagcuucggcggagugucugugaucaccccuggcaccaacaccagcaaucagguggcagugcuguaccagggcgugaacuguaccgaagugcccguggccauucacgccgaucagcugacaccuacauggcggguguacuccaccggcagcaauguguuucagaccagagccggcugucugaucggagccgagcacgugaacaauagcuacgagugcgacauccccaucggcgcuggcaucugugccagcuaccagacacagacaaacagccccagacgggcuagaagcguggccagccagagcaucauugccuacacaaugucucugggcgccgagaacagcguggccuacuccaacaacucuaucgcuauccccaccaacuucaccaucagcgugaccaccgagauccugccuguguccaugaccaagaccagcguggacugcaccauguacaucugcggcgauuccaccgagugcuccaaccugcugcugcaguacggcagcuucugcacccagcugaauagagcccugacagggaucgccguggaacaggacaagaacacccaagagguguucgcccaagugaagcaaaucuacaagaccccuccuaucaaggacuucggcggcuucaauuucagccagauucugcccgauccuagcaagcccagcaagcggagcuucaucgaggaccugcuguucaacaaagugacacuggccgacgccggcuucaucaagcaguauggcgauugucugggcgacauugccgccagggaucugauuugcgcccagaaguuuaacggacugacagugcugccuccucugcugaccgaugagaugaucgcccaguacacaucugcccugcuggccggcacaaucacaagcggcuggacauuuggagcuggcgccgcucugcagauccccuuugcuaugcagauggccuaccgguucaacggcaucggagugacccagaaugugcuguacgagaaccagaagcugaucgccaaccaguucaacagcgccaucggcaagauccaggacagccugagcagcacagcaagcgcccugggaaagcugcaggacguggucaaccagaaugcccaggcacugaacacccuggucaagcagcuguccuccaacuucggcgccaucagcucugugcugaacgauauccugagcagacuggacccuccugaggccgaggugcagaucgacagacugaucacaggcagacugcagagccuccagacauacgugacccagcagcugaucagagccgccgagauuagagccucugccaaucuggccgccaccaagaugucugagugugugcugggccagagcaagagaguggacuuuugcggcaagggcuaccaccugaugagcuucccucagucugccccucacggcgugguguuucugcacgugacauaugugcccgcucaagagaagaauuucaccaccgcuccagccaucugccacgacggcaaagcccacuuuccuagagaaggcguguucguguccaacggcacccauugguucgugacacagcggaacuucuacgagccccagaucaucaccaccgacaacaccuucgugucuggcaacugcgacguugugaucggcauugugaacaauaccguguacgacccucugcagcccgagcuggacagcuucaaagaggaacuggacaaguacuuuaagaaccacacaagccccgacguggaccugggcgauaucagcggaaucaaugccagcgucgugaacauccagaaagagaucgaccggcugaacgagguggccaagaaucugaacgagagccugaucgaccugcaagaacuggggaaguacgagcaguacaucaaguggcccugguacaucuggcugggcuuuaucgccggacugauugccaucgugaucgucacaaucaugcuguguugcaugaccagcugcuguagcugccugaagggcuguuguagcuguggcagcugcugcaaguucgacgaggacgauucugagcccgugcugaagggcgugaaacugcacuacaccugaggacuaguguccaccugucccuccugggcugcuggauugucucguuuuccugccaaauaaacaggaucagcgcuuuacagaucucaaaggcucuuuucagagccaccaaaaaaaaaaaaaaaaaaaaaaaaaaaaaaaaaaaaaaaaaaaaaaaaaaaaaaaaaaaaaaaaaaaaaaaaaaaaaaaaaaaaaaaaaaaaaaaaaaaaa

SEQ ID NO: 24039 - RNA, 4123 nt, Artificial Sequence
  SARS-CoV-2/Wuhan/WIV05/2019__EPI_ISL_402128 spike protein mRNA gc mod (1-1273)(K986P_V987P_H69del_V70del_A222V_Y453F_S477N_D614G_I692V)
aggagacccgugacccggaaguuguacggcuacgcgacuuucccucccacaaacccucgcgcccuuccuuuccuacuugggcccggcagaaagcuuaccauguucguguuucuggugcugcugccccugguguccagccagugugugaaccugaccaccagaacacagcugccuccagccuacaccaacagcuucaccagaggcguguacuaccccgacaagguguucagauccagcgugcugcacucuacccaggaccuguuccugccuuucuucagcaacgugaccugguuccacgccaucuccggcaccaauggcaccaagagauucgacaaccccgugcugcccuucaacgacgggguguacuuugccagcaccgagaaguccaacaucaucagaggcuggaucuucggcaccacacuggacagcaagacccagagccugcugaucgugaacaacgccaccaacguggucaucaaagugugcgaguuccaguucugcaacgaccccuuccugggcgucuacuaccacaagaacaacaagagcuggauggaaagcgaguuccggguguacagcagcgccaacaacugcaccuucgaguacgugucccagccuuuccugauggaccuggaaggcaagcagggcaacuucaagaaccugcgcgaguucguguucaagaacaucgacggcuacuucaaaaucuacagcaagcacaccccuaucaaccucgugcgggaucugccucagggcuucucugugcuggaaccccugguggaucugcccaucggcaucaacaucacccgguuucagacacugcuggcccugcacagaagcuaccugacaccuggcgauagcagcagcggauggacagcuggugccgccgcuuacuaugugggcuaccugcagccuagaaccuuccugcugaaguacaacgagaacggcaccaucaccgacgccguggauugugcucuggauccucugagcgagacaaagugcacccugaaguccuucaccguggaaaagggcaucuaccagaccagcaacuuccgggugcagcccaccgaauccaucgugcgguuccccaauaucaccaaucugugccccuucggcgagguguucaaugccaccagauucgccucuguguacgccuggaaccggaagcggaucagcaauugcguggccgacuacuccgugcuguacaacuccgccagcuucagcaccuucaagugcuacggcguguccccuaccaagcugaacgaccugugcuucacaaacguguacgccgacagcuucgugauccggggagaugaagugcggcagauugccccuggacagacaggcaagaucgccgacuacaacuacaagcugcccgacgacuucaccggcugugugauugccuggaacagcaacaaccuggacuccaaagucggcggcaacuacaauuaccuguuccggcuguuccggaaguccaaucugaagcccuucgagcgggacaucagcaccgaaaucuaucaggccggcaacaccccuugcaacggcguggaaggcuucaacugcuacuucccacugcaguccuacggcuuucagcccacaaauggcgugggcuaucagcccuacagagugguggugcugagcuucgaacugcugcaugcuccugccacagugugcggcccuaagaaaagcaccaaucucgugaagaacaaaugcgugaacuucaacuucaacggccugaccggcaccggcgugcugacagagagcaacaagaaguuccugccauuccagcaguuuggccgggauaucgccgauaccacagacgccguuagagauccccagacacuggaaauccuggacaucaccccaugcagcuucggcggagugucugugaucaccccuggcaccaacaccagcaaucagguggcagugcuguaccagggcgugaacuguaccgaagugcccguggccauucacgccgaucagcugacaccuacauggcggguguacuccaccggcagcaauguguuucagaccagagccggcugucugaucggagccgagcacgugaacaauagcuacgagugcgacauccccaucggcgcuggcaucugugccagcuaccagacacagacaaacagccccagacgggcuagaagcguggccagccagagcgugauugccuacacaaugucucugggcgccgagaacagcguggccuacuccaacaacucuaucgcuauccccaccaacuucaccaucagcgugaccaccgagauccugccuguguccaugaccaagaccagcguggacugcaccauguacaucugcggcgauuccaccgagugcuccaaccugcugcugcaguacggcagcuucugcacccagcugaauagagcccugacagggaucgccguggaacaggacaagaacacccaagagguguucgcccaagugaagcaaaucuacaagaccccuccuaucaaggacuucggcggcuucaauuucagccagauucugcccgauccuagcaagcccagcaagcggagcuucaucgaggaccugcuguucaacaaagugacacuggccgacgccggcuucaucaagcaguauggcgauugucugggcgacauugccgccagggaucugauuugcgcccagaaguuuaacggacugacagugcugccuccucugcugaccgaugagaugaucgcccaguacacaucugcccugcuggccggcacaaucacaagcggcuggacauuuggagcuggcgccgcucugcagauccccuuugcuaugcagauggccuaccgguucaacggcaucggagugacccagaaugugcuguacgagaaccagaagcugaucgccaaccaguucaacagcgccaucggcaagauccaggacagccugagcagcacagcaagcgcccugggaaagcugcaggacguggucaaccagaaugcccaggcacugaacacccuggucaagcagcuguccuccaacuucggcgccaucagcucugugcugaacgauauccugagcagacuggacccuccugaggccgaggugcagaucgacagacugaucacaggcagacugcagagccuccagacauacgugacccagcagcugaucagagccgccgagauuagagccucugccaaucuggccgccaccaagaugucugagugugugcugggccagagcaagagaguggacuuuugcggcaagggcuaccaccugaugagcuucccucagucugccccucacggcgugguguuucugcacgugacauaugugcccgcucaagagaagaauuucaccaccgcuccagccaucugccacgacggcaaagcccacuuuccuagagaaggcguguucguguccaacggcacccauugguucgugacacagcggaacuucuacgagccccagaucaucaccaccgacaacaccuucgugucuggcaacugcgacguugugaucggcauugugaacaauaccguguacgacccucugcagcccgagcuggacagcuucaaagaggaacuggacaaguacuuuaagaaccacacaagccccgacguggaccugggcgauaucagcggaaucaaugccagcgucgugaacauccagaaagagaucgaccggcugaacgagguggccaagaaucugaacgagagccugaucgaccugcaagaacuggggaaguacgagcaguacaucaaguggcccugguacaucuggcugggcuuuaucgccggacugauugccaucgugauggucacaaucaugcuguguugcaugaccagcugcuguagcugccugaagggcuguuguagcuguggcagcugcugcaaguucgacgaggacgauucugagcccgugcugaagggcgugaaacugcacuacaccugaggacuaguguccaccugucccuccugggcugcuggauugucucguuuuccugccaaauaaacaggaucagcgcuuuacagaucucaaaggcucuuuucagagccaccaaaaaaaaaaaaaaaaaaaaaaaaaaaaaaaaaaaaaaaaaaaaaaaaaaaaaaaaaaaaaaaaaaaaaaaaaaaaaaaaaaaaaaaaaaaaaaaaaaaaa

SEQ ID NO: 24040 - RNA, 4123 nt, Artificial Sequence
  SARS-CoV-2/Wuhan/WIV05/2019__EPI_ISL_402128 spike protein mRNA gc mod (1-1273)(K986P_V987P_H69del_V70del_Y453F_D614G_I692V_M1229I)
aggagacccgugacccggaaguuguacggcuacgcgacuuucccucccacaaacccucgcgcccuuccuuuccuacuugggcccggcagaaagcuuaccauguucguguuucuggugcugcugccccugguguccagccagugugugaaccugaccaccagaacacagcugccuccagccuacaccaacagcuucaccagaggcguguacuaccccgacaagguguucagauccagcgugcugcacucuacccaggaccuguuccugccuuucuucagcaacgugaccugguuccacgccaucuccggcaccaauggcaccaagagauucgacaaccccgugcugcccuucaacgacgggguguacuuugccagcaccgagaaguccaacaucaucagaggcuggaucuucggcaccacacuggacagcaagacccagagccugcugaucgugaacaacgccaccaacguggucaucaaagugugcgaguuccaguucugcaacgaccccuuccugggcgucuacuaccacaagaacaacaagagcuggauggaaagcgaguuccggguguacagcagcgccaacaacugcaccuucgaguacgugucccagccuuuccugauggaccuggaaggcaagcagggcaacuucaagaaccugcgcgaguucguguucaagaacaucgacggcuacuucaaaaucuacagcaagcacaccccuaucaaccucgugcgggaucugccucagggcuucucugcucuggaaccccugguggaucugcccaucggcaucaacaucacccgguuucagacacugcuggcccugcacagaagcuaccugacaccuggcgauagcagcagcggauggacagcuggugccgccgcuuacuaugugggcuaccugcagccuagaaccuuccugcugaaguacaacgagaacggcaccaucaccgacgccguggauugugcucuggauccucugagcgagacaaagugcacccugaaguccuucaccguggaaaagggcaucuaccagaccagcaacuuccgggugcagcccaccgaauccaucgugcgguuccccaauaucaccaaucugugccccuucggcgagguguucaaugccaccagauucgccucuguguacgccuggaaccggaagcggaucagcaauugcguggccgacuacuccgugcuguacaacuccgccagcuucagcaccuucaagugcuacggcguguccccuaccaagcugaacgaccugugcuucacaaacguguacgccgacagcuucgugauccggggagaugaagugcggcagauugccccuggacagacaggcaagaucgccgacuacaacuacaagcugcccgacgacuucaccggcugugugauugccuggaacagcaacaaccuggacuccaaagucggcggcaacuacaauuaccuguuccggcuguuccggaaguccaaucugaagcccuucgagcgggacaucagcaccgaaaucuaucaggccggcagcaccccuugcaacggcguggaaggcuucaacugcuacuucccacugcaguccuacggcuuucagcccacaaauggcgugggcuaucagcccuacagagugguggugcugagcuucgaacugcugcaugcuccugccacagugugcggcccuaagaaaagcaccaaucucgugaagaacaaaugcgugaacuucaacuucaacggccugaccggcaccggcgugcugacagagagcaacaagaaguuccugccauuccagcaguuuggccgggauaucgccgauaccacagacgccguuagagauccccagacacuggaaauccuggacaucaccccaugcagcuucggcggagugucugugaucaccccuggcaccaacaccagcaaucagguggcagugcuguaccagggcgugaacuguaccgaagugcccguggccauucacgccgaucagcugacaccuacauggcggguguacuccaccggcagcaauguguuucagaccagagccggcugucugaucggagccgagcacgugaacaauagcuacgagugcgacauccccaucggcgcuggcaucugugccagcuaccagacacagacaaacagccccagacgggcuagaagcguggccagccagagcgugauugccuacacaaugucucugggcgccgagaacagcguggccuacuccaacaacucuaucgcuauccccaccaacuucaccaucagcgugaccaccgagauccugccuguguccaugaccaagaccagcguggacugcaccauguacaucugcggcgauuccaccgagugcuccaaccugcugcugcaguacggcagcuucugcacccagcugaauagagcccugacagggaucgccguggaacaggacaagaacacccaagagguguucgcccaagugaagcaaaucuacaagaccccuccuaucaaggacuucggcggcuucaauuucagccagauucugcccgauccuagcaagcccagcaagcggagcuucaucgaggaccugcuguucaacaaagugacacuggccgacgccggcuucaucaagcaguauggcgauugucugggcgacauugccgccagggaucugauuugcgcccagaaguuuaacggacugacagugcugccuccucugcugaccgaugagaugaucgcccaguacacaucugcccugcuggccggcacaaucacaagcggcuggacauuuggagcuggcgccgcucugcagauccccuuugcuaugcagauggccuaccgguucaacggcaucggagugacccagaaugugcuguacgagaaccagaagcugaucgccaaccaguucaacagcgccaucggcaagauccaggacagccugagcagcacagcaagcgcccugggaaagcugcaggacguggucaaccagaaugcccaggcacugaacacccuggucaagcagcuguccuccaacuucggcgccaucagcucugugcugaacgauauccugagcagacuggacccuccugaggccgaggugcagaucgacagacugaucacaggcagacugcagagccuccagacauacgugacccagcagcugaucagagccgccgagauuagagccucugccaaucuggccgccaccaagaugucugagugugugcugggccagagcaagagaguggacuuuugcggcaagggcuaccaccugaugagcuucccucagucugccccucacggcgugguguuucugcacgugacauaugugcccgcucaagagaagaauuucaccaccgcuccagccaucugccacgacggcaaagcccacuuuccuagagaaggcguguucguguccaacggcacccauugguucgugacacagcggaacuucuacgagccccagaucaucaccaccgacaacaccuucgugucuggcaacugcgacguugugaucggcauugugaacaauaccguguacgacccucugcagcccgagcuggacagcuucaaagaggaacuggacaaguacuuuaagaaccacacaagccccgacguggaccugggcgauaucagcggaaucaaugccagcgucgugaacauccagaaagagaucgaccggcugaacgagguggccaagaaucugaacgagagccugaucgaccugcaagaacuggggaaguacgagcaguacaucaaguggcccugguacaucuggcugggcuuuaucgccggacugauugccaucgugaucgucacaaucaugcuguguugcaugaccagcugcuguagcugccugaagggcuguuguagcuguggcagcugcugcaaguucgacgaggacgauucugagcccgugcugaagggcgugaaacugcacuacaccugaggacuaguguccaccugucccuccugggcugcuggauugucucguuuuccugccaaauaaacaggaucagcgcuuuacagaucucaaaggcucuuuucagagccaccaaaaaaaaaaaaaaaaaaaaaaaaaaaaaaaaaaaaaaaaaaaaaaaaaaaaaaaaaaaaaaaaaaaaaaaaaaaaaaaaaaaaaaaaaaaaaaaaaaaaa

SEQ ID NO: 24041 - RNA, 4120 nt, Artificial Sequence
  SARS-CoV-2/Wuhan/WIV05/2019__EPI_ISL_402128 spike protein mRNA gc mod (1-1273)(K986P_V987P_K986P_V987P_H69del_V70del_Y144del_N501Y_A570 D_D614G_P681H_T716I_S982A_D1118H)
aggagacccgugacccggaaguuguacggcuacgcgacuuucccucccacaaacccucgcgcccuuccuuuccuacuugggcccggcagaaagcuuaccauguucguguuucuggugcugcugccccugguguccagccagugugugaaccugaccaccagaacacagcugccuccagccuacaccaacagcuucaccagaggcguguacuaccccgacaagguguucagauccagcgugcugcacucuacccaggaccuguuccugccuuucuucagcaacgugaccugguuccacgccaucuccggcaccaauggcaccaagagauucgacaaccccgugcugcccuucaacgacgggguguacuuugccagcaccgagaaguccaacaucaucagaggcuggaucuucggcaccacacuggacagcaagacccagagccugcugaucgugaacaacgccaccaacguggucaucaaagugugcgaguuccaguucugcaacgaccccuuccugggcgucuaccacaagaacaacaagagcuggauggaaagcgaguuccggguguacagcagcgccaacaacugcaccuucgaguacgugucccagccuuuccugauggaccuggaaggcaagcagggcaacuucaagaaccugcgcgaguucguguucaagaacaucgacggcuacuucaaaaucuacagcaagcacaccccuaucaaccucgugcgggaucugccucagggcuucucugcucuggaaccccugguggaucugcccaucggcaucaacaucacccgguuucagacacugcuggcccugcacagaagcuaccugacaccuggcgauagcagcagcggauggacagcuggugccgccgcuuacuaugugggcuaccugcagccuagaaccuuccugcugaaguacaacgagaacggcaccaucaccgacgccguggauugugcucuggauccucugagcgagacaaagugcacccugaaguccuucaccguggaaaagggcaucuaccagaccagcaacuuccgggugcagcccaccgaauccaucgugcgguuccccaauaucaccaaucugugccccuucggcgagguguucaaugccaccagauucgccucuguguacgccuggaaccggaagcggaucagcaauugcguggccgacuacuccgugcuguacaacuccgccagcuucagcaccuucaagugcuacggcguguccccuaccaagcugaacgaccugugcuucacaaacguguacgccgacagcuucgugauccggggagaugaagugcggcagauugccccuggacagacaggcaagaucgccgacuacaacuacaagcugcccgacgacuucaccggcugugugauugccuggaacagcaacaaccuggacuccaaagucggcggcaacuacaauuaccuguaccggcuguuccggaaguccaaucugaagcccuucgagcgggacaucagcaccgaaaucuaucaggccggcagcaccccuugcaacggcguggaaggcuucaacugcuacuucccacugcaguccuacggcuuucagcccacauacggcgugggcuaucagcccuacagagugguggugcugagcuucgaacugcugcaugcuccugccacagugugcggcccuaagaaaagcaccaaucucgugaagaacaaaugcgugaacuucaacuucaacggccugaccggcaccggcgugcugacagagagcaacaagaaguuccugccauuccagcaguuuggccgggauaucgacgauaccacagacgccguuagagauccccagacacuggaaauccuggacaucaccccaugcagcuucggcggagugucugugaucaccccuggcaccaacaccagcaaucagguggcagugcuguaccagggcgugaacuguaccgaagugcccguggccauucacgccgaucagcugacaccuacauggcggguguacuccaccggcagcaauguguuucagaccagagccggcugucugaucggagccgagcacgugaacaauagcuacgagugcgacauccccaucggcgcuggcaucugugccagcuaccagacacagacaaacagccacagacgggcuagaagcguggccagccagagcaucauugccuacacaaugucucugggcgccgagaacagcguggccuacuccaacaacucuaucgcuauccccaucaacuucaccaucagcgugaccaccgagauccugccuguguccaugaccaagaccagcguggacugcaccauguacaucugcggcgauuccaccgagugcuccaaccugcugcugcaguacggcagcuucugcacccagcugaauagagcccugacagggaucgccguggaacaggacaagaacacccaagagguguucgcccaagugaagcaaaucuacaagaccccuccuaucaaggacuucggcggcuucaauuucagccagauucugcccgauccuagcaagcccagcaagcggagcuucaucgaggaccugcuguucaacaaagugacacuggccgacgccggcuucaucaagcaguauggcgauugucugggcgacauugccgccagggaucugauuugcgcccagaaguuuaacggacugacagugcugccuccucugcugaccgaugagaugaucgcccaguacacaucugcccugcuggccggcacaaucacaagcggcuggacauuuggagcuggcgccgcucugcagauccccuuugcuaugcagauggccuaccgguucaacggcaucggagugacccagaaugugcuguacgagaaccagaagcugaucgccaaccaguucaacagcgccaucggcaagauccaggacagccugagcagcacagcaagcgcccugggaaagcugcaggacguggucaaccagaaugcccaggcacugaacacccuggucaagcagcuguccuccaacuucggcgccaucagcucugugcugaacgauauccuggccagacuggacccuccugaggccgaggugcagaucgacagacugaucacaggcagacugcagagccuccagacauacgugacccagcagcugaucagagccgccgagauuagagccucugccaaucuggccgccaccaagaugucugagugugugcugggccagagcaagagaguggacuuuugcggcaagggcuaccaccugaugagcuucccucagucugccccucacggcgugguguuucugcacgugacauaugugcccgcucaagagaagaauuucaccaccgcuccagccaucugccacgacggcaaagcccacuuuccuagagaaggcguguucguguccaacggcacccauugguucgugacacagcggaacuucuacgagccccagaucaucaccacccacaacaccuucgugucuggcaacugcgacguugugaucggcauugugaacaauaccguguacgacccucugcagcccgagcuggacagcuucaaagaggaacuggacaaguacuuuaagaaccacacaagccccgacguggaccugggcgauaucagcggaaucaaugccagcgucgugaacauccagaaagagaucgaccggcugaacgagguggccaagaaucugaacgagagccugaucgaccugcaagaacuggggaaguacgagcaguacaucaaguggcccugguacaucuggcugggcuuuaucgccggacugauugccaucgugauggucacaaucaugcuguguugcaugaccagcugcuguagcugccugaagggcuguuguagcuguggcagcugcugcaaguucgacgaggacgauucugagcccgugcugaagggcgugaaacugcacuacaccugaggacuaguguccaccugucccuccugggcugcuggauugucucguuuuccugccaaauaaacaggaucagcgcuuuacagaucucaaaggcucuuuucagagccaccaaaaaaaaaaaaaaaaaaaaaaaaaaaaaaaaaaaaaaaaaaaaaaaaaaaaaaaaaaaaaaaaaaaaaaaaaaaaaaaaaaaaaaaaaaaaaaaaaaaaa

SEQ ID NO: 24042 - RNA, 4129 nt, Artificial Sequence
  SARS-CoV-2/Wuhan/WIV05/2019__EPI_ISL_402128 spike protein mRNA gc mod (1-1273)(K986P_V987P_K986P_V987P_K417N_E484K_N501Y_D614G)
aggagacccgugacccggaaguuguacggcuacgcgacuuucccucccacaaacccucgcgcccuuccuuuccuacuugggcccggcagaaagcuuaccauguucguguuucuggugcugcugccccugguguccagccagugugugaaccugaccaccagaacacagcugccuccagccuacaccaacagcuucaccagaggcguguacuaccccgacaagguguucagauccagcgugcugcacucuacccaggaccuguuccugccuuucuucagcaacgugaccugguuccacgccauccacguguccggcaccaauggcaccaagagauucgacaaccccgugcugcccuucaacgacgggguguacuuugccagcaccgagaaguccaacaucaucagaggcuggaucuucggcaccacacuggacagcaagacccagagccugcugaucgugaacaacgccaccaacguggucaucaaagugugcgaguuccaguucugcaacgaccccuuccugggcgucuacuaccacaagaacaacaagagcuggauggaaagcgaguuccggguguacagcagcgccaacaacugcaccuucgaguacgugucccagccuuuccugauggaccuggaaggcaagcagggcaacuucaagaaccugcgcgaguucguguucaagaacaucgacggcuacuucaaaaucuacagcaagcacaccccuaucaaccucgugcgggaucugccucagggcuucucugcucuggaaccccugguggaucugcccaucggcaucaacaucacccgguuucagacacugcuggcccugcacagaagcuaccugacaccuggcgauagcagcagcggauggacagcuggugccgccgcuuacuaugugggcuaccugcagccuagaaccuuccugcugaaguacaacgagaacggcaccaucaccgacgccguggauugugcucuggauccucugagcgagacaaagugcacccugaaguccuucaccguggaaaagggcaucuaccagaccagcaacuuccgggugcagcccaccgaauccaucgugcgguuccccaauaucaccaaucugugccccuucggcgagguguucaaugccaccagauucgccucuguguacgccuggaaccggaagcggaucagcaauugcguggccgacuacuccgugcuguacaacuccgccagcuucagcaccuucaagugcuacggcguguccccuaccaagcugaacgaccugugcuucacaaacguguacgccgacagcuucgugauccggggagaugaagugcggcagauugccccuggacagacaggcaacaucgccgacuacaacuacaagcugcccgacgacuucaccggcugugugauugccuggaacagcaacaaccuggacuccaaagucggcggcaacuacaauuaccuguaccggcuguuccggaaguccaaucugaagcccuucgagcgggacaucagcaccgaaaucuaucaggccggcagcaccccuugcaacggcgugaagggcuucaacugcuacuucccacugcaguccuacggcuuucagcccacauacggcgugggcuaucagcccuacagagugguggugcugagcuucgaacugcugcaugcuccugccacagugugcggcccuaagaaaagcaccaaucucgugaagaacaaaugcgugaacuucaacuucaacggccugaccggcaccggcgugcugacagagagcaacaagaaguuccugccauuccagcaguuuggccgggauaucgccgauaccacagacgccguuagagauccccagacacuggaaauccuggacaucaccccaugcagcuucggcggagugucugugaucaccccuggcaccaacaccagcaaucagguggcagugcuguaccagggcgugaacuguaccgaagugcccguggccauucacgccgaucagcugacaccuacauggcggguguacuccaccggcagcaauguguuucagaccagagccggcugucugaucggagccgagcacgugaacaauagcuacgagugcgacauccccaucggcgcuggcaucugugccagcuaccagacacagacaaacagccccagacgggcuagaagcguggccagccagagcaucauugccuacacaaugucucugggcgccgagaacagcguggccuacuccaacaacucuaucgcuauccccaccaacuucaccaucagcgugaccaccgagauccugccuguguccaugaccaagaccagcguggacugcaccauguacaucugcggcgauuccaccgagugcuccaaccugcugcugcaguacggcagcuucugcacccagcugaauagagcccugacagggaucgccguggaacaggacaagaacacccaagagguguucgcccaagugaagcaaaucuacaagaccccuccuaucaaggacuucggcggcuucaauuucagccagauucugcccgauccuagcaagcccagcaagcggagcuucaucgaggaccugcuguucaacaaagugacacuggccgacgccggcuucaucaagcaguauggcgauugucugggcgacauugccgccagggaucugauuugcgcccagaaguuuaacggacugacagugcugccuccucugcugaccgaugagaugaucgcccaguacacaucugcccugcuggccggcacaaucacaagcggcuggacauuuggagcuggcgccgcucugcagauccccuuugcuaugcagauggccuaccgguucaacggcaucggagugacccagaaugugcuguacgagaaccagaagcugaucgccaaccaguucaacagcgccaucggcaagauccaggacagccugagcagcacagcaagcgcccugggaaagcugcaggacguggucaaccagaaugcccaggcacugaacacccuggucaagcagcuguccuccaacuucggcgccaucagcucugugcugaacgauauccugagcagacuggacccuccugaggccgaggugcagaucgacagacugaucacaggcagacugcagagccuccagacauacgugacccagcagcugaucagagccgccgagauuagagccucugccaaucuggccgccaccaagaugucugagugugugcugggccagagcaagagaguggacuuuugcggcaagggcuaccaccugaugagcuucccucagucugccccucacggcgugguguuucugcacgugacauaugugcccgcucaagagaagaauuucaccaccgcuccagccaucugccacgacggcaaagcccacuuuccuagagaaggcguguucguguccaacggcacccauugguucgugacacagcggaacuucuacgagccccagaucaucaccaccgacaacaccuucgugucuggcaacugcgacguugugaucggcauugugaacaauaccguguacgacccucugcagcccgagcuggacagcuucaaagaggaacuggacaaguacuuuaagaaccacacaagccccgacguggaccugggcgauaucagcggaaucaaugccagcgucgugaacauccagaaagagaucgaccggcugaacgagguggccaagaaucugaacgagagccugaucgaccugcaagaacuggggaaguacgagcaguacaucaaguggcccugguacaucuggcugggcuuuaucgccggacugauugccaucgugauggucacaaucaugcuguguugcaugaccagcugcuguagcugccugaagggcuguuguagcuguggcagcugcugcaaguucgacgaggacgauucugagcccgugcugaagggcgugaaacugcacuacaccugaggacuaguguccaccugucccuccugggcugcuggauugucucguuuuccugccaaauaaacaggaucagcgcuuuacagaucucaaaggcucuuuucagagccaccaaaaaaaaaaaaaaaaaaaaaaaaaaaaaaaaaaaaaaaaaaaaaaaaaaaaaaaaaaaaaaaaaaaaaaaaaaaaaaaaaaaaaaaaaaaaaaaaaaaaa

SEQ ID NO: 24043 - RNA, 4120 nt, Artificial Sequence
  SARS-CoV-2/Wuhan/WIV05/2019__EPI_ISL_402128 spike protein mRNA gc mod (1-1273)(K986P_V987P_K986P_V987P_L18F_D80A_D215G_L242del_A243del_ L244del_R246I_K417N_E484K_N501Y_D614G_A701V)
aggagacccgugacccggaaguuguacggcuacgcgacuuucccucccacaaacccucgcgcccuuccuuuccuacuugggcccggcagaaagcuuaccauguucguguuucuggugcugcugccccugguguccagccagugugugaacuucaccaccagaacacagcugccuccagccuacaccaacagcuucaccagaggcguguacuaccccgacaagguguucagauccagcgugcugcacucuacccaggaccuguuccugccuuucuucagcaacgugaccugguuccacgccauccacguguccggcaccaauggcaccaagagauucgccaaccccgugcugcccuucaacgacgggguguacuuugccagcaccgagaaguccaacaucaucagaggcuggaucuucggcaccacacuggacagcaagacccagagccugcugaucgugaacaacgccaccaacguggucaucaaagugugcgaguuccaguucugcaacgaccccuuccugggcgucuacuaccacaagaacaacaagagcuggauggaaagcgaguuccggguguacagcagcgccaacaacugcaccuucgaguacgugucccagccuuuccugauggaccuggaaggcaagcagggcaacuucaagaaccugcgcgaguucguguucaagaacaucgacggcuacuucaaaaucuacagcaagcacaccccuaucaaccucgugcggggccugccucagggcuucucugcucuggaaccccugguggaucugcccaucggcaucaacaucacccgguuucagacacugcacaucagcuaccugacaccuggcgauagcagcagcggauggacagcuggugccgccgcuuacuaugugggcuaccugcagccuagaaccuuccugcugaaguacaacgagaacggcaccaucaccgacgccguggauugugcucuggauccucugagcgagacaaagugcacccugaaguccuucaccguggaaaagggcaucuaccagaccagcaacuuccgggugcagcccaccgaauccaucgugcgguuccccaauaucaccaaucugugccccuucggcgagguguucaaugccaccagauucgccucuguguacgccuggaaccggaagcggaucagcaauugcguggccgacuacuccgugcuguacaacuccgccagcuucagcaccuucaagugcuacggcguguccccuaccaagcugaacgaccugugcuucacaaacguguacgccgacagcuucgugauccggggagaugaagugcggcagauugccccuggacagacaggcaacaucgccgacuacaacuacaagcugcccgacgacuucaccggcugugugauugccuggaacagcaacaaccuggacuccaaagucggcggcaacuacaauuaccuguaccggcuguuccggaaguccaaucugaagcccuucgagcgggacaucagcaccgaaaucuaucaggccggcagcaccccuugcaacggcgugaagggcuucaacugcuacuucccacugcaguccuacggcuuucagcccacauacggcgugggcuaucagcccuacagagugguggugcugagcuucgaacugcugcaugcuccugccacagugugcggcccuaagaaaagcaccaaucucgugaagaacaaaugcgugaacuucaacuucaacggccugaccggcaccggcgugcugacagagagcaacaagaaguuccugccauuccagcaguuuggccgggauaucgccgauaccacagacgccguuagagauccccagacacuggaaauccuggacaucaccccaugcagcuucggcggagugucugugaucaccccuggcaccaacaccagcaaucagguggcagugcuguaccagggcgugaacuguaccgaagugcccguggccauucacgccgaucagcugacaccuacauggcggguguacuccaccggcagcaauguguuucagaccagagccggcugucugaucggagccgagcacgugaacaauagcuacgagugcgacauccccaucggcgcuggcaucugugccagcuaccagacacagacaaacagccccagacgggcuagaagcguggccagccagagcaucauugccuacacaaugucucugggcguggagaacagcguggccuacuccaacaacucuaucgcuauccccaccaacuucaccaucagcgugaccaccgagauccugccuguguccaugaccaagaccagcguggacugcaccauguacaucugcggcgauuccaccgagugcuccaaccugcugcugcaguacggcagcuucugcacccagcugaauagagcccugacagggaucgccguggaacaggacaagaacacccaagagguguucgcccaagugaagcaaaucuacaagaccccuccuaucaaggacuucggcggcuucaauuucagccagauucugcccgauccuagcaagcccagcaagcggagcuucaucgaggaccugcuguucaacaaagugacacuggccgacgccggcuucaucaagcaguauggcgauugucugggcgacauugccgccagggaucugauuugcgcccagaaguuuaacggacugacagugcugccuccucugcugaccgaugagaugaucgcccaguacacaucugcccugcuggccggcacaaucacaagcggcuggacauuuggagcuggcgccgcucugcagauccccuuugcuaugcagauggccuaccgguucaacggcaucggagugacccagaaugugcuguacgagaaccagaagcugaucgccaaccaguucaacagcgccaucggcaagauccaggacagccugagcagcacagcaagcgcccugggaaagcugcaggacguggucaaccagaaugcccaggcacugaacacccuggucaagcagcuguccuccaacuucggcgccaucagcucugugcugaacgauauccugagcagacuggacccuccugaggccgaggugcagaucgacagacugaucacaggcagacugcagagccuccagacauacgugacccagcagcugaucagagccgccgagauuagagccucugccaaucuggccgccaccaagaugucugagugugugcugggccagagcaagagaguggacuuuugcggcaagggcuaccaccugaugagcuucccucagucugccccucacggcgugguguuucugcacgugacauaugugcccgcucaagagaagaauuucaccaccgcuccagccaucugccacgacggcaaagcccacuuuccuagagaaggcguguucguguccaacggcacccauugguucgugacacagcggaacuucuacgagccccagaucaucaccaccgacaacaccuucgugucuggcaacugcgacguugugaucggcauugugaacaauaccguguacgacccucugcagcccgagcuggacagcuucaaagaggaacuggacaaguacuuuaagaaccacacaagccccgacguggaccugggcgauaucagcggaaucaaugccagcgucgugaacauccagaaagagaucgaccggcugaacgagguggccaagaaucugaacgagagccugaucgaccugcaagaacuggggaaguacgagcaguacaucaaguggcccugguacaucuggcugggcuuuaucgccggacugauugccaucgugauggucacaaucaugcuguguugcaugaccagcugcuguagcugccugaagggcuguuguagcuguggcagcugcugcaaguucgacgaggacgauucugagcccgugcugaagggcgugaaacugcacuacaccugaggacuaguguccaccugucccuccugggcugcuggauugucucguuuuccugccaaauaaacaggaucagcgcuuuacagaucucaaaggcucuuuucagagccaccaaaaaaaaaaaaaaaaaaaaaaaaaaaaaaaaaaaaaaaaaaaaaaaaaaaaaaaaaaaaaaaaaaaaaaaaaaaaaaaaaaaaaaaaaaaaaaaaaaaaa

SEQ ID NO: 24044 - RNA, 4129 nt, Artificial Sequence
  SARS-CoV-2/Wuhan/WIV05/2019__EPI_ISL_402128 spike protein mRNA gc mod (1-1273)(K986P_V987P_K986P_V987P_E484K_D614G)
aggagacccgugacccggaaguuguacggcuacgcgacuuucccucccacaaacccucgcgcccuuccuuuccuacuugggcccggcagaaagcuuaccauguucguguuucuggugcugcugccccugguguccagccagugugugaaccugaccaccagaacacagcugccuccagccuacaccaacagcuucaccagaggcguguacuaccccgacaagguguucagauccagcgugcugcacucuacccaggaccuguuccugccuuucuucagcaacgugaccugguuccacgccauccacguguccggcaccaauggcaccaagagauucgacaaccccgugcugcccuucaacgacgggguguacuuugccagcaccgagaaguccaacaucaucagaggcuggaucuucggcaccacacuggacagcaagacccagagccugcugaucgugaacaacgccaccaacguggucaucaaagugugcgaguuccaguucugcaacgaccccuuccugggcgucuacuaccacaagaacaacaagagcuggauggaaagcgaguuccggguguacagcagcgccaacaacugcaccuucgaguacgugucccagccuuuccugauggaccuggaaggcaagcagggcaacuucaagaaccugcgcgaguucguguucaagaacaucgacggcuacuucaaaaucuacagcaagcacaccccuaucaaccucgugcgggaucugccucagggcuucucugcucuggaaccccugguggaucugcccaucggcaucaacaucacccgguuucagacacugcuggcccugcacagaagcuaccugacaccuggcgauagcagcagcggauggacagcuggugccgccgcuuacuaugugggcuaccugcagccuagaaccuuccugcugaaguacaacgagaacggcaccaucaccgacgccguggauugugcucuggauccucugagcgagacaaagugcacccugaaguccuucaccguggaaaagggcaucuaccagaccagcaacuuccgggugcagcccaccgaauccaucgugcgguuccccaauaucaccaaucugugccccuucggcgagguguucaaugccaccagauucgccucuguguacgccuggaaccggaagcggaucagcaauugcguggccgacuacuccgugcuguacaacuccgccagcuucagcaccuucaagugcuacggcguguccccuaccaagcugaacgaccugugcuucacaaacguguacgccgacagcuucgugauccggggagaugaagugcggcagauugccccuggacagacaggcaagaucgccgacuacaacuacaagcugcccgacgacuucaccggcugugugauugccuggaacagcaacaaccuggacuccaaagucggcggcaacuacaauuaccuguaccggcuguuccggaaguccaaucugaagcccuucgagcgggacaucagcaccgaaaucuaucaggccggcagcaccccuugcaacggcgugaagggcuucaacugcuacuucccacugcaguccuacggcuuucagcccacaaauggcgugggcuaucagcccuacagagugguggugcugagcuucgaacugcugcaugcuccugccacagugugcggcccuaagaaaagcaccaaucucgugaagaacaaaugcgugaacuucaacuucaacggccugaccggcaccggcgugcugacagagagcaacaagaaguuccugccauuccagcaguuuggccgggauaucgccgauaccacagacgccguuagagauccccagacacuggaaauccuggacaucaccccaugcagcuucggcggagugucugugaucaccccuggcaccaacaccagcaaucagguggcagugcuguaccagggcgugaacuguaccgaagugcccguggccauucacgccgaucagcugacaccuacauggcggguguacuccaccggcagcaauguguuucagaccagagccggcugucugaucggagccgagcacgugaacaauagcuacgagugcgacauccccaucggcgcuggcaucugugccagcuaccagacacagacaaacagccccagacgggcuagaagcguggccagccagagcaucauugccuacacaaugucucugggcgccgagaacagcguggccuacuccaacaacucuaucgcuauccccaccaacuucaccaucagcgugaccaccgagauccugccuguguccaugaccaagaccagcguggacugcaccauguacaucugcggcgauuccaccgagugcuccaaccugcugcugcaguacggcagcuucugcacccagcugaauagagcccugacagggaucgccguggaacaggacaagaacacccaagagguguucgcccaagugaagcaaaucuacaagaccccuccuaucaaggacuucggcggcuucaauuucagccagauucugcccgauccuagcaagcccagcaagcggagcuucaucgaggaccugcuguucaacaaagugacacuggccgacgccggcuucaucaagcaguauggcgauugucugggcgacauugccgccagggaucugauuugcgcccagaaguuuaacggacugacagugcugccuccucugcugaccgaugagaugaucgcccaguacacaucugcccugcuggccggcacaaucacaagcggcuggacauuuggagcuggcgccgcucugcagauccccuuugcuaugcagauggccuaccgguucaacggcaucggagugacccagaaugugcuguacgagaaccagaagcugaucgccaaccaguucaacagcgccaucggcaagauccaggacagccugagcagcacagcaagcgcccugggaaagcugcaggacguggucaaccagaaugcccaggcacugaacacccuggucaagcagcuguccuccaacuucggcgccaucagcucugugcugaacgauauccugagcagacuggacccuccugaggccgaggugcagaucgacagacugaucacaggcagacugcagagccuccagacauacgugacccagcagcugaucagagccgccgagauuagagccucugccaaucuggccgccaccaagaugucugagugugugcugggccagagcaagagaguggacuuuugcggcaagggcuaccaccugaugagcuucccucagucugccccucacggcgugguguuucugcacgugacauaugugcccgcucaagagaagaauuucaccaccgcuccagccaucugccacgacggcaaagcccacuuuccuagagaaggcguguucguguccaacggcacccauugguucgugacacagcggaacuucuacgagccccagaucaucaccaccgacaacaccuucgugucuggcaacugcgacguugugaucggcauugugaacaauaccguguacgacccucugcagcccgagcuggacagcuucaaagaggaacuggacaaguacuuuaagaaccacacaagccccgacguggaccugggcgauaucagcggaaucaaugccagcgucgugaacauccagaaagagaucgaccggcugaacgagguggccaagaaucugaacgagagccugaucgaccugcaagaacuggggaaguacgagcaguacaucaaguggcccugguacaucuggcugggcuuuaucgccggacugauugccaucgugauggucacaaucaugcuguguugcaugaccagcugcuguagcugccugaagggcuguuguagcuguggcagcugcugcaaguucgacgaggacgauucugagcccgugcugaagggcgugaaacugcacuacaccugaggacuaguguccaccugucccuccugggcugcuggauugucucguuuuccugccaaauaaacaggaucagcgcuuuacagaucucaaaggcucuuuucagagccaccaaaaaaaaaaaaaaaaaaaaaaaaaaaaaaaaaaaaaaaaaaaaaaaaaaaaaaaaaaaaaaaaaaaaaaaaaaaaaaaaaaaaaaaaaaaaaaaaaaaaa

SEQ ID NO: 24045 - RNA, 4129 nt, Artificial Sequence
  SARS-CoV-2/Wuhan/WIV05/2019__EPI_ISL_402128 spike protein mRNA gc mod (1-1273)(K986P_V987P_K986P_V987P_L18F_T20N_P26S_D138Y_R190S_K417T _E484K_N501Y_D614G_H655Y_T1027I)
aggagacccgugacccggaaguuguacggcuacgcgacuuucccucccacaaacccucgcgcccuuccuuuccuacuugggcccggcagaaagcuuaccauguucguguuucuggugcugcugccccugguguccagccagugugugaacuucaccaacagaacacagcugccuagcgccuacaccaacagcuucaccagaggcguguacuaccccgacaagguguucagauccagcgugcugcacucuacccaggaccuguuccugccuuucuucagcaacgugaccugguuccacgccauccacguguccggcaccaauggcaccaagagauucgacaaccccgugcugcccuucaacgacgggguguacuuugccagcaccgagaaguccaacaucaucagaggcuggaucuucggcaccacacuggacagcaagacccagagccugcugaucgugaacaacgccaccaacguggucaucaaagugugcgaguuccaguucugcaacuaccccuuccugggcgucuacuaccacaagaacaacaagagcuggauggaaagcgaguuccggguguacagcagcgccaacaacugcaccuucgaguacgugucccagccuuuccugauggaccuggaaggcaagcagggcaacuucaagaaccugagcgaguucguguucaagaacaucgacggcuacuucaaaaucuacagcaagcacaccccuaucaaccucgugcgggaucugccucagggcuucucugcucuggaaccccugguggaucugcccaucggcaucaacaucacccgguuucagacacugcuggcccugcacagaagcuaccugacaccuggcgauagcagcagcggauggacagcuggugccgccgcuuacuaugugggcuaccugcagccuagaaccuuccugcugaaguacaacgagaacggcaccaucaccgacgccguggauugugcucuggauccucugagcgagacaaagugcacccugaaguccuucaccguggaaaagggcaucuaccagaccagcaacuuccgggugcagcccaccgaauccaucgugcgguuccccaauaucaccaaucugugccccuucggcgagguguucaaugccaccagauucgccucuguguacgccuggaaccggaagcggaucagcaauugcguggccgacuacuccgugcuguacaacuccgccagcuucagcaccuucaagugcuacggcguguccccuaccaagcugaacgaccugugcuucacaaacguguacgccgacagcuucgugauccggggagaugaagugcggcagauugccccuggacagacaggcaccaucgccgacuacaacuacaagcugcccgacgacuucaccggcugugugauugccuggaacagcaacaaccuggacuccaaagucggcggcaacuacaauuaccuguaccggcuguuccggaaguccaaucugaagcccuucgagcgggacaucagcaccgaaaucuaucaggccggcagcaccccuugcaacggcgugaagggcuucaacugcuacuucccacugcaguccuacggcuuucagcccacauacggcgugggcuaucagcccuacagagugguggugcugagcuucgaacugcugcaugcuccugccacagugugcggcccuaagaaaagcaccaaucucgugaagaacaaaugcgugaacuucaacuucaacggccugaccggcaccggcgugcugacagagagcaacaagaaguuccugccauuccagcaguuuggccgggauaucgccgauaccacagacgccguuagagauccccagacacuggaaauccuggacaucaccccaugcagcuucggcggagugucugugaucaccccuggcaccaacaccagcaaucagguggcagugcuguaccagggcgugaacuguaccgaagugcccguggccauucacgccgaucagcugacaccuacauggcggguguacuccaccggcagcaauguguuucagaccagagccggcugucugaucggagccgaguacgugaacaauagcuacgagugcgacauccccaucggcgcuggcaucugugccagcuaccagacacagacaaacagccccagacgggcuagaagcguggccagccagagcaucauugccuacacaaugucucugggcgccgagaacagcguggccuacuccaacaacucuaucgcuauccccaccaacuucaccaucagcgugaccaccgagauccugccuguguccaugaccaagaccagcguggacugcaccauguacaucugcggcgauuccaccgagugcuccaaccugcugcugcaguacggcagcuucugcacccagcugaauagagcccugacagggaucgccguggaacaggacaagaacacccaagagguguucgcccaagugaagcaaaucuacaagaccccuccuaucaaggacuucggcggcuucaauuucagccagauucugcccgauccuagcaagcccagcaagcggagcuucaucgaggaccugcuguucaacaaagugacacuggccgacgccggcuucaucaagcaguauggcgauugucugggcgacauugccgccagggaucugauuugcgcccagaaguuuaacggacugacagugcugccuccucugcugaccgaugagaugaucgcccaguacacaucugcccugcuggccggcacaaucacaagcggcuggacauuuggagcuggcgccgcucugcagauccccuuugcuaugcagauggccuaccgguucaacggcaucggagugacccagaaugugcuguacgagaaccagaagcugaucgccaaccaguucaacagcgccaucggcaagauccaggacagccugagcagcacagcaagcgcccugggaaagcugcaggacguggucaaccagaaugcccaggcacugaacacccuggucaagcagcuguccuccaacuucggcgccaucagcucugugcugaacgauauccugagcagacuggacccuccugaggccgaggugcagaucgacagacugaucacaggcagacugcagagccuccagacauacgugacccagcagcugaucagagccgccgagauuagagccucugccaaucuggccgccaucaagaugucugagugugugcugggccagagcaagagaguggacuuuugcggcaagggcuaccaccugaugagcuucccucagucugccccucacggcgugguguuucugcacgugacauaugugcccgcucaagagaagaauuucaccaccgcuccagccaucugccacgacggcaaagcccacuuuccuagagaaggcguguucguguccaacggcacccauugguucgugacacagcggaacuucuacgagccccagaucaucaccaccgacaacaccuucgugucuggcaacugcgacguugugaucggcauugugaacaauaccguguacgacccucugcagcccgagcuggacagcuucaaagaggaacuggacaaguacuuuaagaaccacacaagccccgacguggaccugggcgauaucagcggaaucaaugccagcgucgugaacauccagaaagagaucgaccggcugaacgagguggccaagaaucugaacgagagccugaucgaccugcaagaacuggggaaguacgagcaguacaucaaguggcccugguacaucuggcugggcuuuaucgccggacugauugccaucgugauggucacaaucaugcuguguugcaugaccagcugcuguagcugccugaagggcuguuguagcuguggcagcugcugcaaguucgacgaggacgauucugagcccgugcugaagggcgugaaacugcacuacaccugaggacuaguguccaccugucccuccugggcugcuggauugucucguuuuccugccaaauaaacaggaucagcgcuuuacagaucucaaaggcucuuuucagagccaccaaaaaaaaaaaaaaaaaaaaaaaaaaaaaaaaaaaaaaaaaaaaaaaaaaaaaaaaaaaaaaaaaaaaaaaaaaaaaaaaaaaaaaaaaaaaaaaaaaaaa

SEQ ID NO: 24046 - RNA, 4129 nt, Artificial Sequence
  SARS-CoV-2/Wuhan/WIV05/2019__EPI_ISL_402128 spike protein mRNA gc mod (1-1273)(K986P_V987P_K986P_V987P_S13I_W152C_L452R_D614G)
aggagacccgugacccggaaguuguacggcuacgcgacuuucccucccacaaacccucgcgcccuuccuuuccuacuugggcccggcagaaagcuuaccauguucguguuucuggugcugcugccccugguguccauccagugugugaaccugaccaccagaacacagcugccuccagccuacaccaacagcuucaccagaggcguguacuaccccgacaagguguucagauccagcgugcugcacucuacccaggaccuguuccugccuuucuucagcaacgugaccugguuccacgccauccacguguccggcaccaauggcaccaagagauucgacaaccccgugcugcccuucaacgacgggguguacuuugccagcaccgagaaguccaacaucaucagaggcuggaucuucggcaccacacuggacagcaagacccagagccugcugaucgugaacaacgccaccaacguggucaucaaagugugcgaguuccaguucugcaacgaccccuuccugggcgucuacuaccacaagaacaacaagagcugcauggaaagcgaguuccggguguacagcagcgccaacaacugcaccuucgaguacgugucccagccuuuccugauggaccuggaaggcaagcagggcaacuucaagaaccugcgcgaguucguguucaagaacaucgacggcuacuucaaaaucuacagcaagcacaccccuaucaaccucgugcgggaucugccucagggcuucucugcucuggaaccccugguggaucugcccaucggcaucaacaucacccgguuucagacacugcuggcccugcacagaagcuaccugacaccuggcgauagcagcagcggauggacagcuggugccgccgcuuacuaugugggcuaccugcagccuagaaccuuccugcugaaguacaacgagaacggcaccaucaccgacgccguggauugugcucuggauccucugagcgagacaaagugcacccugaaguccuucaccguggaaaagggcaucuaccagaccagcaacuuccgggugcagcccaccgaauccaucgugcgguuccccaauaucaccaaucugugccccuucggcgagguguucaaugccaccagauucgccucuguguacgccuggaaccggaagcggaucagcaauugcguggccgacuacuccgugcuguacaacuccgccagcuucagcaccuucaagugcuacggcguguccccuaccaagcugaacgaccugugcuucacaaacguguacgccgacagcuucgugauccggggagaugaagugcggcagauugccccuggacagacaggcaagaucgccgacuacaacuacaagcugcccgacgacuucaccggcugugugauugccuggaacagcaacaaccuggacuccaaagucggcggcaacuacaauuaccgcuaccggcuguuccggaaguccaaucugaagcccuucgagcgggacaucagcaccgaaaucuaucaggccggcagcaccccuugcaacggcguggaaggcuucaacugcuacuucccacugcaguccuacggcuuucagcccacaaauggcgugggcuaucagcccuacagagugguggugcugagcuucgaacugcugcaugcuccugccacagugugcggcccuaagaaaagcaccaaucucgugaagaacaaaugcgugaacuucaacuucaacggccugaccggcaccggcgugcugacagagagcaacaagaaguuccugccauuccagcaguuuggccgggauaucgccgauaccacagacgccguuagagauccccagacacuggaaauccuggacaucaccccaugcagcuucggcggagugucugugaucaccccuggcaccaacaccagcaaucagguggcagugcuguaccagggcgugaacuguaccgaagugcccguggccauucacgccgaucagcugacaccuacauggcggguguacuccaccggcagcaauguguuucagaccagagccggcugucugaucggagccgagcacgugaacaauagcuacgagugcgacauccccaucggcgcuggcaucugugccagcuaccagacacagacaaacagccccagacgggcuagaagcguggccagccagagcaucauugccuacacaaugucucugggcgccgagaacagcguggccuacuccaacaacucuaucgcuauccccaccaacuucaccaucagcgugaccaccgagauccugccuguguccaugaccaagaccagcguggacugcaccauguacaucugcggcgauuccaccgagugcuccaaccugcugcugcaguacggcagcuucugcacccagcugaauagagcccugacagggaucgccguggaacaggacaagaacacccaagagguguucgcccaagugaagcaaaucuacaagaccccuccuaucaaggacuucggcggcuucaauuucagccagauucugcccgauccuagcaagcccagcaagcggagcuucaucgaggaccugcuguucaacaaagugacacuggccgacgccggcuucaucaagcaguauggcgauugucugggcgacauugccgccagggaucugauuugcgcccagaaguuuaacggacugacagugcugccuccucugcugaccgaugagaugaucgcccaguacacaucugcccugcuggccggcacaaucacaagcggcuggacauuuggagcuggcgccgcucugcagauccccuuugcuaugcagauggccuaccgguucaacggcaucggagugacccagaaugugcuguacgagaaccagaagcugaucgccaaccaguucaacagcgccaucggcaagauccaggacagccugagcagcacagcaagcgcccugggaaagcugcaggacguggucaaccagaaugcccaggcacugaacacccuggucaagcagcuguccuccaacuucggcgccaucagcucugugcugaacgauauccugagcagacuggacccuccugaggccgaggugcagaucgacagacugaucacaggcagacugcagagccuccagacauacgugacccagcagcugaucagagccgccgagauuagagccucugccaaucuggccgccaccaagaugucugagugugugcugggccagagcaagagaguggacuuuugcggcaagggcuaccaccugaugagcuucccucagucugccccucacggcgugguguuucugcacgugacauaugugcccgcucaagagaagaauuucaccaccgcuccagccaucugccacgacggcaaagcccacuuuccuagagaaggcguguucguguccaacggcacccauugguucgugacacagcggaacuucuacgagccccagaucaucaccaccgacaacaccuucgugucuggcaacugcgacguugugaucggcauugugaacaauaccguguacgacccucugcagcccgagcuggacagcuucaaagaggaacuggacaaguacuuuaagaaccacacaagccccgacguggaccugggcgauaucagcggaaucaaugccagcgucgugaacauccagaaagagaucgaccggcugaacgagguggccaagaaucugaacgagagccugaucgaccugcaagaacuggggaaguacgagcaguacaucaaguggcccugguacaucuggcugggcuuuaucgccggacugauugccaucgugauggucacaaucaugcuguguugcaugaccagcugcuguagcugccugaagggcuguuguagcuguggcagcugcugcaaguucgacgaggacgauucugagcccgugcugaagggcgugaaacugcacuacaccugaggacuaguguccaccugucccuccugggcugcuggauugucucguuuuccugccaaauaaacaggaucagcgcuuuacagaucucaaaggcucuuuucagagccaccaaaaaaaaaaaaaaaaaaaaaaaaaaaaaaaaaaaaaaaaaaaaaaaaaaaaaaaaaaaaaaaaaaaaaaaaaaaaaaaaaaaaaaaaaaaaaaaaaaaaa

SEQ ID NO: 24047 - RNA, 4129 nt, Artificial Sequence
  SARS-CoV-2/Wuhan/WIV05/2019__EPI_ISL_402128 spike protein mRNA gc mod (1-1273)(K986P_V987P)
aggagacccgugacccggaaguuguacggcuacgcgacuuucccucccacaaacccucgcgcccuuccuuuccuacuugggcccggcagaaagcuuaccauguucguguuccuggugcugcugccucugguguccagccagugugugaaccugaccaccagaacacagcugccuccagccuacaccaacagcuuuaccagaggcguguacuaccccgacaagguguucagauccagcgugcugcacucuacccaggaccuguuccugccuuucuucagcaacgugaccugguuccacgccauccacguguccggcaccaauggcaccaagagauucgacaaccccgugcugcccuucaacgacgggguguacuuugccagcaccgagaaguccaacaucaucagaggcuggaucuucggcaccacacuggacagcaagacccagagccugcugaucgugaacaacgccaccaacguggucaucaaagugugcgaguuccaguucugcaacgaccccuuccugggcgucuacuaccacaagaacaacaagagcuggauggaaagcgaguuccggguguacagcagcgccaacaacugcaccuucgaguacgugucccagccuuuccugauggaccuggaaggcaagcagggcaacuucaagaaccugcgcgaguucguguuuaagaacaucgacggcuacuucaagaucuacagcaagcacaccccuaucaaccucgugcgggaucugccucagggcuucucugcucuggaaccccugguggaucugcccaucggcaucaacaucacccgguuucagacacugcuggcccugcacagaagcuaccugacaccuggcgauagcagcagcggauggacagcuggugccgccgcuuacuaugugggcuaccugcagccuagaaccuuccugcugaaguacaacgagaacggcaccaucaccgacgccguggauugugcucuggauccucugagcgagacaaagugcacccugaaguccuucaccguggaaaagggcaucuaccagaccagcaacuuccgggugcagcccaccgaauccaucgugcgguuccccaauaucaccaaucugugccccuucggcgagguguucaaugccaccagauucgccucuguguacgccuggaaccggaagcggaucagcaauugcguggccgacuacuccgugcuguacaacuccgccagcuucagcaccuucaagugcuacggcguguccccuaccaagcugaacgaccugugcuucacaaacguguacgccgacagcuucgugauccggggagaugaagugcggcagauugccccuggacagacaggcaagaucgccgacuacaacuacaagcugcccgacgacuucaccggcugugugauugccuggaacagcaacaaccuggacuccaaagucggcggcaacuacaauuaccuguaccggcuguuccggaaguccaaucugaagcccuucgagcgggacaucuccaccgagaucuaucaggccggcagcaccccuuguaacggcguggaaggcuucaacugcuacuucccacugcaguccuacggcuuucagcccacaaauggcgugggcuaucagcccuacagagugguggugcugagcuucgaacugcugcaugccccugccacagugugcggcccuaagaaaagcaccaaucucgugaagaacaaaugcgugaacuucaacuucaacggccugaccggcaccggcgugcugacagagagcaacaagaaguuccugccauuccagcaguuuggccgggauaucgccgauaccacagacgccguuagagauccccagacacuggaaauccuggacaucaccccuugcagcuucggcggagugucugugaucaccccuggcaccaacaccagcaaucagguggcagugcuguaccaggacgugaacuguaccgaagugcccguggccauucacgccgaucagcugacaccuacauggcggguguacuccaccggcagcaauguguuucagaccagagccggcugucugaucggagccgagcacgugaacaauagcuacgagugcgacauccccaucggcgcuggaaucugcgccagcuaccagacacagacaaacagcccucggagagccagaagcguggccagccagagcaucauugccuacacaaugucucugggcgccgagaacagcguggccuacuccaacaacucuaucgcuauccccaccaacuucaccaucagcgugaccacagagauccugccuguguccaugaccaagaccagcguggacugcaccauguacaucugcggcgauuccaccgagugcuccaaccugcugcugcaguacggcagcuucugcacccagcugaauagagcccugacagggaucgccguggaacaggacaagaacacccaagagguguucgcccaagugaagcagaucuacaagaccccuccuaucaaggacuucggcggcuucaauuucagccagauucugcccgauccuagcaagcccagcaagcggagcuucaucgaggaccugcuguucaacaaagugacacuggccgacgccggcuucaucaagcaguauggcgauugucugggcgacauugccgccagggaucugauuugcgcccagaaguuuaacggacugacagugcugccuccucugcugaccgaugagaugaucgcccaguacacaucugcccugcuggccggcacaaucacaagcggcuggacauuuggagcaggcgccgcucugcagauccccuuugcuaugcagauggccuaccgguucaacggcaucggagugacccagaaugugcuguacgagaaccagaagcugaucgccaaccaguucaacagcgccaucggcaagauccaggacagccugagcagcacagcaagcgcccugggaaagcugcaggacguggucaaccagaaugcccaggcacugaacacccuggucaagcagcuguccuccaacuucggcgccaucagcucugugcugaacgauauccugagcagacuggacccuccugaggccgaggugcagaucgacagacugaucacaggcagacugcagagccuccagacauacgugacccagcagcugaucagagccgccgagauuagagccucugccaaucuggccgccaccaagaugucugagugugugcugggccagagcaagagaguggacuuuugcggcaagggcuaccaccugaugagcuucccucagucugccccucacggcgugguguuucugcacgugacauaugugcccgcucaagagaagaauuucaccaccgcuccagccaucugccacgacggcaaagcccacuuuccuagagaaggcguguucguguccaacggcacccauugguucgugacacagcggaacuucuacgagccccagaucaucaccaccgacaacaccuucgugucuggcaacugcgacgucgugaucggcauugugaacaauaccguguacgacccucugcagcccgagcuggacagcuucaaagaggaacuggacaaguacuuuaagaaccacacaagccccgacguggaccugggcgauaucagcggaaucaaugccagcgucgugaacauccagaaagagaucgaccggcugaacgagguggccaagaaucugaacgagagccugaucgaccugcaagaacuggggaaguacgagcaguacaucaaguggcccugguacaucuggcugggcuuuaucgccggacugauugccaucgugauggucacaaucaugcuguguugcaugaccagcugcuguagcugccugaagggcuguuguagcuguggcagcugcugcaaguucgacgaggacgauucugagcccgugcugaagggcgugaaacugcacuacacaugaggacuaguguccaccugucccuccugggcugcuggauugucucguuuuccugccaaauaaacaggaucagcgcuuuacagaucucaaaggcucuuuucagagccaccaaaaaaaaaaaaaaaaaaaaaaaaaaaaaaaaaaaaaaaaaaaaaaaaaaaaaaaaaaaaaaaaaaaaaaaaaaaaaaaaaaaaaaaaaaaaaaaaaaaaa

SEQ ID NO: 24048 - RNA, 4129 nt, Artificial Sequence
  SARS-CoV-2/Wuhan/WIV05/2019__EPI_ISL_402128 spike protein mRNA gc mod (1-1273)(K986P_V987P_ D614G)
aggagacccgugacccggaaguuguacggcuacgcgacuuucccucccacaaacccucgcgcccuuccuuuccuacuugggcccggcagaaagcuuaccauguucguguuccuggugcugcugccucugguguccagccagugugugaaccugaccaccagaacacagcugccuccagccuacaccaacagcuuuaccagaggcguguacuaccccgacaagguguucagauccagcgugcugcacucuacccaggaccuguuccugccuuucuucagcaacgugaccugguuccacgccauccacguguccggcaccaauggcaccaagagauucgacaaccccgugcugcccuucaacgacgggguguacuuugccagcaccgagaaguccaacaucaucagaggcuggaucuucggcaccacacuggacagcaagacccagagccugcugaucgugaacaacgccaccaacguggucaucaaagugugcgaguuccaguucugcaacgaccccuuccugggcgucuacuaccacaagaacaacaagagcuggauggaaagcgaguuccggguguacagcagcgccaacaacugcaccuucgaguacgugucccagccuuuccugauggaccuggaaggcaagcagggcaacuucaagaaccugcgcgaguucguguuuaagaacaucgacggcuacuucaagaucuacagcaagcacaccccuaucaaccucgugcgggaucugccucagggcuucucugcucuggaaccccugguggaucugcccaucggcaucaacaucacccgguuucagacacugcuggcccugcacagaagcuaccugacaccuggcgauagcagcagcggauggacagcuggugccgccgcuuacuaugugggcuaccugcagccuagaaccuuccugcugaaguacaacgagaacggcaccaucaccgacgccguggauugugcucuggauccucugagcgagacaaagugcacccugaaguccuucaccguggaaaagggcaucuaccagaccagcaacuuccgggugcagcccaccgaauccaucgugcgguuccccaauaucaccaaucugugccccuucggcgagguguucaaugccaccagauucgccucuguguacgccuggaaccggaagcggaucagcaauugcguggccgacuacuccgugcuguacaacuccgccagcuucagcaccuucaagugcuacggcguguccccuaccaagcugaacgaccugugcuucacaaacguguacgccgacagcuucgugauccggggagaugaagugcggcagauugccccuggacagacaggcaagaucgccgacuacaacuacaagcugcccgacgacuucaccggcugugugauugccuggaacagcaacaaccuggacuccaaagucggcggcaacuacaauuaccuguaccggcuguuccggaaguccaaucugaagcccuucgagcgggacaucuccaccgagaucuaucaggccggcagcaccccuuguaacggcguggaaggcuucaacugcuacuucccacugcaguccuacggcuuucagcccacaaauggcgugggcuaucagcccuacagagugguggugcugagcuucgaacugcugcaugccccugccacagugugcggcccuaagaaaagcaccaaucucgugaagaacaaaugcgugaacuucaacuucaacggccugaccggcaccggcgugcugacagagagcaacaagaaguuccugccauuccagcaguuuggccgggauaucgccgauaccacagacgccguuagagauccccagacacuggaaauccuggacaucaccccuugcagcuucggcggagugucugugaucaccccuggcaccaacaccagcaaucagguggcagugcuguaccagggcgugaacuguaccgaagugcccguggccauucacgccgaucagcugacaccuacauggcggguguacuccaccggcagcaauguguuucagaccagagccggcugucugaucggagccgagcacgugaacaauagcuacgagugcgacauccccaucggcgcuggaaucugcgccagcuaccagacacagacaaacagcccucggagagccagaagcguggccagccagagcaucauugccuacacaaugucucugggcgccgagaacagcguggccuacuccaacaacucuaucgcuauccccaccaacuucaccaucagcgugaccacagagauccugccuguguccaugaccaagaccagcguggacugcaccauguacaucugcggcgauuccaccgagugcuccaaccugcugcugcaguacggcagcuucugcacccagcugaauagagcccugacagggaucgccguggaacaggacaagaacacccaagagguguucgcccaagugaagcagaucuacaagaccccuccuaucaaggacuucggcggcuucaauuucagccagauucugcccgauccuagcaagcccagcaagcggagcuucaucgaggaccugcuguucaacaaagugacacuggccgacgccggcuucaucaagcaguauggcgauugucugggcgacauugccgccagggaucugauuugcgcccagaaguuuaacggacugacagugcugccuccucugcugaccgaugagaugaucgcccaguacacaucugcccugcuggccggcacaaucacaagcggcuggacauuuggagcaggcgccgcucugcagauccccuuugcuaugcagauggccuaccgguucaacggcaucggagugacccagaaugugcuguacgagaaccagaagcugaucgccaaccaguucaacagcgccaucggcaagauccaggacagccugagcagcacagcaagcgcccugggaaagcugcaggacguggucaaccagaaugcccaggcacugaacacccuggucaagcagcuguccuccaacuucggcgccaucagcucugugcugaacgauauccugagcagacuggacccuccugaggccgaggugcagaucgacagacugaucacaggcagacugcagagccuccagacauacgugacccagcagcugaucagagccgccgagauuagagccucugccaaucuggccgccaccaagaugucugagugugugcugggccagagcaagagaguggacuuuugcggcaagggcuaccaccugaugagcuucccucagucugccccucacggcgugguguuucugcacgugacauaugugcccgcucaagagaagaauuucaccaccgcuccagccaucugccacgacggcaaagcccacuuuccuagagaaggcguguucguguccaacggcacccauugguucgugacacagcggaacuucuacgagccccagaucaucaccaccgacaacaccuucgugucuggcaacugcgacgucgugaucggcauugugaacaauaccguguacgacccucugcagcccgagcuggacagcuucaaagaggaacuggacaaguacuuuaagaaccacacaagccccgacguggaccugggcgauaucagcggaaucaaugccagcgucgugaacauccagaaagagaucgaccggcugaacgagguggccaagaaucugaacgagagccugaucgaccugcaagaacuggggaaguacgagcaguacaucaaguggcccugguacaucuggcugggcuuuaucgccggacugauugccaucgugauggucacaaucaugcuguguugcaugaccagcugcuguagcugccugaagggcuguuguagcuguggcagcugcugcaaguucgacgaggacgauucugagcccgugcugaagggcgugaaacugcacuacacaugaggacuaguguccaccugucccuccugggcugcuggauugucucguuuuccugccaaauaaacaggaucagcgcuuuacagaucucaaaggcucuuuucagagccaccaaaaaaaaaaaaaaaaaaaaaaaaaaaaaaaaaaaaaaaaaaaaaaaaaaaaaaaaaaaaaaaaaaaaaaaaaaaaaaaaaaaaaaaaaaaaaaaaaaaaa

SEQ ID NO: 24049 - RNA, 4129 nt, Artificial Sequence
  SARS-CoV-2/Wuhan/WIV05/2019__EPI_ISL_402128 spike protein mRNA gc mod (1-1273)(K986P_V987P_A222V_D614G)
aggagacccgugacccggaaguuguacggcuacgcgacuuucccucccacaaacccucgcgcccuuccuuuccuacuugggcccggcagaaagcuuaccauguucguguuccuggugcugcugccucugguguccagccagugugugaaccugaccaccagaacacagcugccuccagccuacaccaacagcuuuaccagaggcguguacuaccccgacaagguguucagauccagcgugcugcacucuacccaggaccuguuccugccuuucuucagcaacgugaccugguuccacgccauccacguguccggcaccaauggcaccaagagauucgacaaccccgugcugcccuucaacgacgggguguacuuugccagcaccgagaaguccaacaucaucagaggcuggaucuucggcaccacacuggacagcaagacccagagccugcugaucgugaacaacgccaccaacguggucaucaaagugugcgaguuccaguucugcaacgaccccuuccugggcgucuacuaccacaagaacaacaagagcuggauggaaagcgaguuccggguguacagcagcgccaacaacugcaccuucgaguacgugucccagccuuuccugauggaccuggaaggcaagcagggcaacuucaagaaccugcgcgaguucguguuuaagaacaucgacggcuacuucaagaucuacagcaagcacaccccuaucaaccucgugcgggaucugccucagggcuucucugugcuggaaccccugguggaucugcccaucggcaucaacaucacccgguuucagacacugcuggcccugcacagaagcuaccugacaccuggcgauagcagcagcggauggacagcuggugccgccgcuuacuaugugggcuaccugcagccuagaaccuuccugcugaaguacaacgagaacggcaccaucaccgacgccguggauugugcucuggauccucugagcgagacaaagugcacccugaaguccuucaccguggaaaagggcaucuaccagaccagcaacuuccgggugcagcccaccgaauccaucgugcgguuccccaauaucaccaaucugugccccuucggcgagguguucaaugccaccagauucgccucuguguacgccuggaaccggaagcggaucagcaauugcguggccgacuacuccgugcuguacaacuccgccagcuucagcaccuucaagugcuacggcguguccccuaccaagcugaacgaccugugcuucacaaacguguacgccgacagcuucgugauccggggagaugaagugcggcagauugccccuggacagacaggcaagaucgccgacuacaacuacaagcugcccgacgacuucaccggcugugugauugccuggaacagcaacaaccuggacuccaaagucggcggcaacuacaauuaccuguaccggcuguuccggaaguccaaucugaagcccuucgagcgggacaucuccaccgagaucuaucaggccggcagcaccccuuguaacggcguggaaggcuucaacugcuacuucccacugcaguccuacggcuuucagcccacaaauggcgugggcuaucagcccuacagagugguggugcugagcuucgaacugcugcaugccccugccacagugugcggcccuaagaaaagcaccaaucucgugaagaacaaaugcgugaacuucaacuucaacggccugaccggcaccggcgugcugacagagagcaacaagaaguuccugccauuccagcaguuuggccgggauaucgccgauaccacagacgccguuagagauccccagacacuggaaauccuggacaucaccccuugcagcuucggcggagugucugugaucaccccuggcaccaacaccagcaaucagguggcagugcuguaccagggcgugaacuguaccgaagugcccguggccauucacgccgaucagcugacaccuacauggcggguguacuccaccggcagcaauguguuucagaccagagccggcugucugaucggagccgagcacgugaacaauagcuacgagugcgacauccccaucggcgcuggaaucugcgccagcuaccagacacagacaaacagcccucggagagccagaagcguggccagccagagcaucauugccuacacaaugucucugggcgccgagaacagcguggccuacuccaacaacucuaucgcuauccccaccaacuucaccaucagcgugaccacagagauccugccuguguccaugaccaagaccagcguggacugcaccauguacaucugcggcgauuccaccgagugcuccaaccugcugcugcaguacggcagcuucugcacccagcugaauagagcccugacagggaucgccguggaacaggacaagaacacccaagagguguucgcccaagugaagcagaucuacaagaccccuccuaucaaggacuucggcggcuucaauuucagccagauucugcccgauccuagcaagcccagcaagcggagcuucaucgaggaccugcuguucaacaaagugacacuggccgacgccggcuucaucaagcaguauggcgauugucugggcgacauugccgccagggaucugauuugcgcccagaaguuuaacggacugacagugcugccuccucugcugaccgaugagaugaucgcccaguacacaucugcccugcuggccggcacaaucacaagcggcuggacauuuggagcaggcgccgcucugcagauccccuuugcuaugcagauggccuaccgguucaacggcaucggagugacccagaaugugcuguacgagaaccagaagcugaucgccaaccaguucaacagcgccaucggcaagauccaggacagccugagcagcacagcaagcgcccugggaaagcugcaggacguggucaaccagaaugcccaggcacugaacacccuggucaagcagcuguccuccaacuucggcgccaucagcucugugcugaacgauauccugagcagacuggacccuccugaggccgaggugcagaucgacagacugaucacaggcagacugcagagccuccagacauacgugacccagcagcugaucagagccgccgagauuagagccucugccaaucuggccgccaccaagaugucugagugugugcugggccagagcaagagaguggacuuuugcggcaagggcuaccaccugaugagcuucccucagucugccccucacggcgugguguuucugcacgugacauaugugcccgcucaagagaagaauuucaccaccgcuccagccaucugccacgacggcaaagcccacuuuccuagagaaggcguguucguguccaacggcacccauugguucgugacacagcggaacuucuacgagccccagaucaucaccaccgacaacaccuucgugucuggcaacugcgacgucgugaucggcauugugaacaauaccguguacgacccucugcagcccgagcuggacagcuucaaagaggaacuggacaaguacuuuaagaaccacacaagccccgacguggaccugggcgauaucagcggaaucaaugccagcgucgugaacauccagaaagagaucgaccggcugaacgagguggccaagaaucugaacgagagccugaucgaccugcaagaacuggggaaguacgagcaguacaucaaguggcccugguacaucuggcugggcuuuaucgccggacugauugccaucgugauggucacaaucaugcuguguugcaugaccagcugcuguagcugccugaagggcuguuguagcuguggcagcugcugcaaguucgacgaggacgauucugagcccgugcugaagggcgugaaacugcacuacacaugaggacuaguguccaccugucccuccugggcugcuggauugucucguuuuccugccaaauaaacaggaucagcgcuuuacagaucucaaaggcucuuuucagagccaccaaaaaaaaaaaaaaaaaaaaaaaaaaaaaaaaaaaaaaaaaaaaaaaaaaaaaaaaaaaaaaaaaaaaaaaaaaaaaaaaaaaaaaaaaaaaaaaaaaaaa

SEQ ID NO: 24050 - RNA, 4129 nt, Artificial Sequence
  SARS-CoV-2/Wuhan/WIV05/2019__EPI_ISL_402128 spike protein mRNA gc mod (1-1273)(K986P_V987P_N439K_D614G)
aggagacccgugacccggaaguuguacggcuacgcgacuuucccucccacaaacccucgcgcccuuccuuuccuacuugggcccggcagaaagcuuaccauguucguguuccuggugcugcugccucugguguccagccagugugugaaccugaccaccagaacacagcugccuccagccuacaccaacagcuuuaccagaggcguguacuaccccgacaagguguucagauccagcgugcugcacucuacccaggaccuguuccugccuuucuucagcaacgugaccugguuccacgccauccacguguccggcaccaauggcaccaagagauucgacaaccccgugcugcccuucaacgacgggguguacuuugccagcaccgagaaguccaacaucaucagaggcuggaucuucggcaccacacuggacagcaagacccagagccugcugaucgugaacaacgccaccaacguggucaucaaagugugcgaguuccaguucugcaacgaccccuuccugggcgucuacuaccacaagaacaacaagagcuggauggaaagcgaguuccggguguacagcagcgccaacaacugcaccuucgaguacgugucccagccuuuccugauggaccuggaaggcaagcagggcaacuucaagaaccugcgcgaguucguguuuaagaacaucgacggcuacuucaagaucuacagcaagcacaccccuaucaaccucgugcgggaucugccucagggcuucucugcucuggaaccccugguggaucugcccaucggcaucaacaucacccgguuucagacacugcuggcccugcacagaagcuaccugacaccuggcgauagcagcagcggauggacagcuggugccgccgcuuacuaugugggcuaccugcagccuagaaccuuccugcugaaguacaacgagaacggcaccaucaccgacgccguggauugugcucuggauccucugagcgagacaaagugcacccugaaguccuucaccguggaaaagggcaucuaccagaccagcaacuuccgggugcagcccaccgaauccaucgugcgguuccccaauaucaccaaucugugccccuucggcgagguguucaaugccaccagauucgccucuguguacgccuggaaccggaagcggaucagcaauugcguggccgacuacuccgugcuguacaacuccgccagcuucagcaccuucaagugcuacggcguguccccuaccaagcugaacgaccugugcuucacaaacguguacgccgacagcuucgugauccggggagaugaagugcggcagauugccccuggacagacaggcaagaucgccgacuacaacuacaagcugcccgacgacuucaccggcugugugauugccuggaacagcaagaaccuggacuccaaagucggcggcaacuacaauuaccuguaccggcuguuccggaaguccaaucugaagcccuucgagcgggacaucuccaccgagaucuaucaggccggcagcaccccuuguaacggcguggaaggcuucaacugcuacuucccacugcaguccuacggcuuucagcccacaaauggcgugggcuaucagcccuacagagugguggugcugagcuucgaacugcugcaugccccugccacagugugcggcccuaagaaaagcaccaaucucgugaagaacaaaugcgugaacuucaacuucaacggccugaccggcaccggcgugcugacagagagcaacaagaaguuccugccauuccagcaguuuggccgggauaucgccgauaccacagacgccguuagagauccccagacacuggaaauccuggacaucaccccuugcagcuucggcggagugucugugaucaccccuggcaccaacaccagcaaucagguggcagugcuguaccagggcgugaacuguaccgaagugcccguggccauucacgccgaucagcugacaccuacauggcggguguacuccaccggcagcaauguguuucagaccagagccggcugucugaucggagccgagcacgugaacaauagcuacgagugcgacauccccaucggcgcuggaaucugcgccagcuaccagacacagacaaacagcccucggagagccagaagcguggccagccagagcaucauugccuacacaaugucucugggcgccgagaacagcguggccuacuccaacaacucuaucgcuauccccaccaacuucaccaucagcgugaccacagagauccugccuguguccaugaccaagaccagcguggacugcaccauguacaucugcggcgauuccaccgagugcuccaaccugcugcugcaguacggcagcuucugcacccagcugaauagagcccugacagggaucgccguggaacaggacaagaacacccaagagguguucgcccaagugaagcagaucuacaagaccccuccuaucaaggacuucggcggcuucaauuucagccagauucugcccgauccuagcaagcccagcaagcggagcuucaucgaggaccugcuguucaacaaagugacacuggccgacgccggcuucaucaagcaguauggcgauugucugggcgacauugccgccagggaucugauuugcgcccagaaguuuaacggacugacagugcugccuccucugcugaccgaugagaugaucgcccaguacacaucugcccugcuggccggcacaaucacaagcggcuggacauuuggagcaggcgccgcucugcagauccccuuugcuaugcagauggccuaccgguucaacggcaucggagugacccagaaugugcuguacgagaaccagaagcugaucgccaaccaguucaacagcgccaucggcaagauccaggacagccugagcagcacagcaagcgcccugggaaagcugcaggacguggucaaccagaaugcccaggcacugaacacccuggucaagcagcuguccuccaacuucggcgccaucagcucugugcugaacgauauccugagcagacuggacccuccugaggccgaggugcagaucgacagacugaucacaggcagacugcagagccuccagacauacgugacccagcagcugaucagagccgccgagauuagagccucugccaaucuggccgccaccaagaugucugagugugugcugggccagagcaagagaguggacuuuugcggcaagggcuaccaccugaugagcuucccucagucugccccucacggcgugguguuucugcacgugacauaugugcccgcucaagagaagaauuucaccaccgcuccagccaucugccacgacggcaaagcccacuuuccuagagaaggcguguucguguccaacggcacccauugguucgugacacagcggaacuucuacgagccccagaucaucaccaccgacaacaccuucgugucuggcaacugcgacgucgugaucggcauugugaacaauaccguguacgacccucugcagcccgagcuggacagcuucaaagaggaacuggacaaguacuuuaagaaccacacaagccccgacguggaccugggcgauaucagcggaaucaaugccagcgucgugaacauccagaaagagaucgaccggcugaacgagguggccaagaaucugaacgagagccugaucgaccugcaagaacuggggaaguacgagcaguacaucaaguggcccugguacaucuggcugggcuuuaucgccggacugauugccaucgugauggucacaaucaugcuguguugcaugaccagcugcuguagcugccugaagggcuguuguagcuguggcagcugcugcaaguucgacgaggacgauucugagcccgugcugaagggcgugaaacugcacuacacaugaggacuaguguccaccugucccuccugggcugcuggauugucucguuuuccugccaaauaaacaggaucagcgcuuuacagaucucaaaggcucuuuucagagccaccaaaaaaaaaaaaaaaaaaaaaaaaaaaaaaaaaaaaaaaaaaaaaaaaaaaaaaaaaaaaaaaaaaaaaaaaaaaaaaaaaaaaaaaaaaaaaaaaaaaaa

SEQ ID NO: 24051 - RNA, 4129 nt, Artificial Sequence
  SARS-CoV-2/Wuhan/WIV05/2019__EPI_ISL_402128 spike protein mRNA gc mod (1-1273)(K986P_V987P_S477N_D614G)
aggagacccgugacccggaaguuguacggcuacgcgacuuucccucccacaaacccucgcgcccuuccuuuccuacuugggcccggcagaaagcuuaccauguucguguuccuggugcugcugccucugguguccagccagugugugaaccugaccaccagaacacagcugccuccagccuacaccaacagcuuuaccagaggcguguacuaccccgacaagguguucagauccagcgugcugcacucuacccaggaccuguuccugccuuucuucagcaacgugaccugguuccacgccauccacguguccggcaccaauggcaccaagagauucgacaaccccgugcugcccuucaacgacgggguguacuuugccagcaccgagaaguccaacaucaucagaggcuggaucuucggcaccacacuggacagcaagacccagagccugcugaucgugaacaacgccaccaacguggucaucaaagugugcgaguuccaguucugcaacgaccccuuccugggcgucuacuaccacaagaacaacaagagcuggauggaaagcgaguuccggguguacagcagcgccaacaacugcaccuucgaguacgugucccagccuuuccugauggaccuggaaggcaagcagggcaacuucaagaaccugcgcgaguucguguuuaagaacaucgacggcuacuucaagaucuacagcaagcacaccccuaucaaccucgugcgggaucugccucagggcuucucugcucuggaaccccugguggaucugcccaucggcaucaacaucacccgguuucagacacugcuggcccugcacagaagcuaccugacaccuggcgauagcagcagcggauggacagcuggugccgccgcuuacuaugugggcuaccugcagccuagaaccuuccugcugaaguacaacgagaacggcaccaucaccgacgccguggauugugcucuggauccucugagcgagacaaagugcacccugaaguccuucaccguggaaaagggcaucuaccagaccagcaacuuccgggugcagcccaccgaauccaucgugcgguuccccaauaucaccaaucugugccccuucggcgagguguucaaugccaccagauucgccucuguguacgccuggaaccggaagcggaucagcaauugcguggccgacuacuccgugcuguacaacuccgccagcuucagcaccuucaagugcuacggcguguccccuaccaagcugaacgaccugugcuucacaaacguguacgccgacagcuucgugauccggggagaugaagugcggcagauugccccuggacagacaggcaagaucgccgacuacaacuacaagcugcccgacgacuucaccggcugugugauugccuggaacagcaacaaccuggacuccaaagucggcggcaacuacaauuaccuguaccggcuguuccggaaguccaaucugaagcccuucgagcgggacaucuccaccgagaucuaucaggccggcaacaccccuuguaacggcguggaaggcuucaacugcuacuucccacugcaguccuacggcuuucagcccacaaauggcgugggcuaucagcccuacagagugguggugcugagcuucgaacugcugcaugccccugccacagugugcggcccuaagaaaagcaccaaucucgugaagaacaaaugcgugaacuucaacuucaacggccugaccggcaccggcgugcugacagagagcaacaagaaguuccugccauuccagcaguuuggccgggauaucgccgauaccacagacgccguuagagauccccagacacuggaaauccuggacaucaccccuugcagcuucggcggagugucugugaucaccccuggcaccaacaccagcaaucagguggcagugcuguaccagggcgugaacuguaccgaagugcccguggccauucacgccgaucagcugacaccuacauggcggguguacuccaccggcagcaauguguuucagaccagagccggcugucugaucggagccgagcacgugaacaauagcuacgagugcgacauccccaucggcgcuggaaucugcgccagcuaccagacacagacaaacagcccucggagagccagaagcguggccagccagagcaucauugccuacacaaugucucugggcgccgagaacagcguggccuacuccaacaacucuaucgcuauccccaccaacuucaccaucagcgugaccacagagauccugccuguguccaugaccaagaccagcguggacugcaccauguacaucugcggcgauuccaccgagugcuccaaccugcugcugcaguacggcagcuucugcacccagcugaauagagcccugacagggaucgccguggaacaggacaagaacacccaagagguguucgcccaagugaagcagaucuacaagaccccuccuaucaaggacuucggcggcuucaauuucagccagauucugcccgauccuagcaagcccagcaagcggagcuucaucgaggaccugcuguucaacaaagugacacuggccgacgccggcuucaucaagcaguauggcgauugucugggcgacauugccgccagggaucugauuugcgcccagaaguuuaacggacugacagugcugccuccucugcugaccgaugagaugaucgcccaguacacaucugcccugcuggccggcacaaucacaagcggcuggacauuuggagcaggcgccgcucugcagauccccuuugcuaugcagauggccuaccgguucaacggcaucggagugacccagaaugugcuguacgagaaccagaagcugaucgccaaccaguucaacagcgccaucggcaagauccaggacagccugagcagcacagcaagcgcccugggaaagcugcaggacguggucaaccagaaugcccaggcacugaacacccuggucaagcagcuguccuccaacuucggcgccaucagcucugugcugaacgauauccugagcagacuggacccuccugaggccgaggugcagaucgacagacugaucacaggcagacugcagagccuccagacauacgugacccagcagcugaucagagccgccgagauuagagccucugccaaucuggccgccaccaagaugucugagugugugcugggccagagcaagagaguggacuuuugcggcaagggcuaccaccugaugagcuucccucagucugccccucacggcgugguguuucugcacgugacauaugugcccgcucaagagaagaauuucaccaccgcuccagccaucugccacgacggcaaagcccacuuuccuagagaaggcguguucguguccaacggcacccauugguucgugacacagcggaacuucuacgagccccagaucaucaccaccgacaacaccuucgugucuggcaacugcgacgucgugaucggcauugugaacaauaccguguacgacccucugcagcccgagcuggacagcuucaaagaggaacuggacaaguacuuuaagaaccacacaagccccgacguggaccugggcgauaucagcggaaucaaugccagcgucgugaacauccagaaagagaucgaccggcugaacgagguggccaagaaucugaacgagagccugaucgaccugcaagaacuggggaaguacgagcaguacaucaaguggcccugguacaucuggcugggcuuuaucgccggacugauugccaucgugauggucacaaucaugcuguguugcaugaccagcugcuguagcugccugaagggcuguuguagcuguggcagcugcugcaaguucgacgaggacgauucugagcccgugcugaagggcgugaaacugcacuacacaugaggacuaguguccaccugucccuccugggcugcuggauugucucguuuuccugccaaauaaacaggaucagcgcuuuacagaucucaaaggcucuuuucagagccaccaaaaaaaaaaaaaaaaaaaaaaaaaaaaaaaaaaaaaaaaaaaaaaaaaaaaaaaaaaaaaaaaaaaaaaaaaaaaaaaaaaaaaaaaaaaaaaaaaaaaa

SEQ ID NO: 24052 - RNA, 4129 nt, Artificial Sequence
  SARS-CoV-2/Wuhan/WIV05/2019__EPI_ISL_402128 spike protein mRNA gc mod (1-1273)(K986P_V987P_N501Y_D614G)
aggagacccgugacccggaaguuguacggcuacgcgacuuucccucccacaaacccucgcgcccuuccuuuccuacuugggcccggcagaaagcuuaccauguucguguuccuggugcugcugccucugguguccagccagugugugaaccugaccaccagaacacagcugccuccagccuacaccaacagcuuuaccagaggcguguacuaccccgacaagguguucagauccagcgugcugcacucuacccaggaccuguuccugccuuucuucagcaacgugaccugguuccacgccauccacguguccggcaccaauggcaccaagagauucgacaaccccgugcugcccuucaacgacgggguguacuuugccagcaccgagaaguccaacaucaucagaggcuggaucuucggcaccacacuggacagcaagacccagagccugcugaucgugaacaacgccaccaacguggucaucaaagugugcgaguuccaguucugcaacgaccccuuccugggcgucuacuaccacaagaacaacaagagcuggauggaaagcgaguuccggguguacagcagcgccaacaacugcaccuucgaguacgugucccagccuuuccugauggaccuggaaggcaagcagggcaacuucaagaaccugcgcgaguucguguuuaagaacaucgacggcuacuucaagaucuacagcaagcacaccccuaucaaccucgugcgggaucugccucagggcuucucugcucuggaaccccugguggaucugcccaucggcaucaacaucacccgguuucagacacugcuggcccugcacagaagcuaccugacaccuggcgauagcagcagcggauggacagcuggugccgccgcuuacuaugugggcuaccugcagccuagaaccuuccugcugaaguacaacgagaacggcaccaucaccgacgccguggauugugcucuggauccucugagcgagacaaagugcacccugaaguccuucaccguggaaaagggcaucuaccagaccagcaacuuccgggugcagcccaccgaauccaucgugcgguuccccaauaucaccaaucugugccccuucggcgagguguucaaugccaccagauucgccucuguguacgccuggaaccggaagcggaucagcaauugcguggccgacuacuccgugcuguacaacuccgccagcuucagcaccuucaagugcuacggcguguccccuaccaagcugaacgaccugugcuucacaaacguguacgccgacagcuucgugauccggggagaugaagugcggcagauugccccuggacagacaggcaagaucgccgacuacaacuacaagcugcccgacgacuucaccggcugugugauugccuggaacagcaacaaccuggacuccaaagucggcggcaacuacaauuaccuguaccggcuguuccggaaguccaaucugaagcccuucgagcgggacaucuccaccgagaucuaucaggccggcagcaccccuuguaacggcguggaaggcuucaacugcuacuucccacugcaguccuacggcuuucagcccacauacggcgugggcuaucagcccuacagagugguggugcugagcuucgaacugcugcaugccccugccacagugugcggcccuaagaaaagcaccaaucucgugaagaacaaaugcgugaacuucaacuucaacggccugaccggcaccggcgugcugacagagagcaacaagaaguuccugccauuccagcaguuuggccgggauaucgccgauaccacagacgccguuagagauccccagacacuggaaauccuggacaucaccccuugcagcuucggcggagugucugugaucaccccuggcaccaacaccagcaaucagguggcagugcuguaccagggcgugaacuguaccgaagugcccguggccauucacgccgaucagcugacaccuacauggcggguguacuccaccggcagcaauguguuucagaccagagccggcugucugaucggagccgagcacgugaacaauagcuacgagugcgacauccccaucggcgcuggaaucugcgccagcuaccagacacagacaaacagcccucggagagccagaagcguggccagccagagcaucauugccuacacaaugucucugggcgccgagaacagcguggccuacuccaacaacucuaucgcuauccccaccaacuucaccaucagcgugaccacagagauccugccuguguccaugaccaagaccagcguggacugcaccauguacaucugcggcgauuccaccgagugcuccaaccugcugcugcaguacggcagcuucugcacccagcugaauagagcccugacagggaucgccguggaacaggacaagaacacccaagagguguucgcccaagugaagcagaucuacaagaccccuccuaucaaggacuucggcggcuucaauuucagccagauucugcccgauccuagcaagcccagcaagcggagcuucaucgaggaccugcuguucaacaaagugacacuggccgacgccggcuucaucaagcaguauggcgauugucugggcgacauugccgccagggaucugauuugcgcccagaaguuuaacggacugacagugcugccuccucugcugaccgaugagaugaucgcccaguacacaucugcccugcuggccggcacaaucacaagcggcuggacauuuggagcaggcgccgcucugcagauccccuuugcuaugcagauggccuaccgguucaacggcaucggagugacccagaaugugcuguacgagaaccagaagcugaucgccaaccaguucaacagcgccaucggcaagauccaggacagccugagcagcacagcaagcgcccugggaaagcugcaggacguggucaaccagaaugcccaggcacugaacacccuggucaagcagcuguccuccaacuucggcgccaucagcucugugcugaacgauauccugagcagacuggacccuccugaggccgaggugcagaucgacagacugaucacaggcagacugcagagccuccagacauacgugacccagcagcugaucagagccgccgagauuagagccucugccaaucuggccgccaccaagaugucugagugugugcugggccagagcaagagaguggacuuuugcggcaagggcuaccaccugaugagcuucccucagucugccccucacggcgugguguuucugcacgugacauaugugcccgcucaagagaagaauuucaccaccgcuccagccaucugccacgacggcaaagcccacuuuccuagagaaggcguguucguguccaacggcacccauugguucgugacacagcggaacuucuacgagccccagaucaucaccaccgacaacaccuucgugucuggcaacugcgacgucgugaucggcauugugaacaauaccguguacgacccucugcagcccgagcuggacagcuucaaagaggaacuggacaaguacuuuaagaaccacacaagccccgacguggaccugggcgauaucagcggaaucaaugccagcgucgugaacauccagaaagagaucgaccggcugaacgagguggccaagaaucugaacgagagccugaucgaccugcaagaacuggggaaguacgagcaguacaucaaguggcccugguacaucuggcugggcuuuaucgccggacugauugccaucgugauggucacaaucaugcuguguugcaugaccagcugcuguagcugccugaagggcuguuguagcuguggcagcugcugcaaguucgacgaggacgauucugagcccgugcugaagggcgugaaacugcacuacacaugaggacuaguguccaccugucccuccugggcugcuggauugucucguuuuccugccaaauaaacaggaucagcgcuuuacagaucucaaaggcucuuuucagagccaccaaaaaaaaaaaaaaaaaaaaaaaaaaaaaaaaaaaaaaaaaaaaaaaaaaaaaaaaaaaaaaaaaaaaaaaaaaaaaaaaaaaaaaaaaaaaaaaaaaaaa

SEQ ID NO: 24053 - RNA, 4123 nt, Artificial Sequence
  SARS-CoV-2/Wuhan/WIV05/2019__EPI_ISL_402128 spike protein mRNA gc mod (1-1273)(K986P_V987P_H69del_V70del_D614G)
aggagacccgugacccggaaguuguacggcuacgcgacuuucccucccacaaacccucgcgcccuuccuuuccuacuugggcccggcagaaagcuuaccauguucguguuccuggugcugcugccucugguguccagccagugugugaaccugaccaccagaacacagcugccuccagccuacaccaacagcuuuaccagaggcguguacuaccccgacaagguguucagauccagcgugcugcacucuacccaggaccuguuccugccuuucuucagcaacgugaccugguuccacgccaucuccggcaccaauggcaccaagagauucgacaaccccgugcugcccuucaacgacgggguguacuuugccagcaccgagaaguccaacaucaucagaggcuggaucuucggcaccacacuggacagcaagacccagagccugcugaucgugaacaacgccaccaacguggucaucaaagugugcgaguuccaguucugcaacgaccccuuccugggcgucuacuaccacaagaacaacaagagcuggauggaaagcgaguuccggguguacagcagcgccaacaacugcaccuucgaguacgugucccagccuuuccugauggaccuggaaggcaagcagggcaacuucaagaaccugcgcgaguucguguuuaagaacaucgacggcuacuucaagaucuacagcaagcacaccccuaucaaccucgugcgggaucugccucagggcuucucugcucuggaaccccugguggaucugcccaucggcaucaacaucacccgguuucagacacugcuggcccugcacagaagcuaccugacaccuggcgauagcagcagcggauggacagcuggugccgccgcuuacuaugugggcuaccugcagccuagaaccuuccugcugaaguacaacgagaacggcaccaucaccgacgccguggauugugcucuggauccucugagcgagacaaagugcacccugaaguccuucaccguggaaaagggcaucuaccagaccagcaacuuccgggugcagcccaccgaauccaucgugcgguuccccaauaucaccaaucugugccccuucggcgagguguucaaugccaccagauucgccucuguguacgccuggaaccggaagcggaucagcaauugcguggccgacuacuccgugcuguacaacuccgccagcuucagcaccuucaagugcuacggcguguccccuaccaagcugaacgaccugugcuucacaaacguguacgccgacagcuucgugauccggggagaugaagugcggcagauugccccuggacagacaggcaagaucgccgacuacaacuacaagcugcccgacgacuucaccggcugugugauugccuggaacagcaacaaccuggacuccaaagucggcggcaacuacaauuaccuguaccggcuguuccggaaguccaaucugaagcccuucgagcgggacaucuccaccgagaucuaucaggccggcagcaccccuuguaacggcguggaaggcuucaacugcuacuucccacugcaguccuacggcuuucagcccacaaauggcgugggcuaucagcccuacagagugguggugcugagcuucgaacugcugcaugccccugccacagugugcggcccuaagaaaagcaccaaucucgugaagaacaaaugcgugaacuucaacuucaacggccugaccggcaccggcgugcugacagagagcaacaagaaguuccugccauuccagcaguuuggccgggauaucgccgauaccacagacgccguuagagauccccagacacuggaaauccuggacaucaccccuugcagcuucggcggagugucugugaucaccccuggcaccaacaccagcaaucagguggcagugcuguaccagggcgugaacuguaccgaagugcccguggccauucacgccgaucagcugacaccuacauggcggguguacuccaccggcagcaauguguuucagaccagagccggcugucugaucggagccgagcacgugaacaauagcuacgagugcgacauccccaucggcgcuggaaucugcgccagcuaccagacacagacaaacagcccucggagagccagaagcguggccagccagagcaucauugccuacacaaugucucugggcgccgagaacagcguggccuacuccaacaacucuaucgcuauccccaccaacuucaccaucagcgugaccacagagauccugccuguguccaugaccaagaccagcguggacugcaccauguacaucugcggcgauuccaccgagugcuccaaccugcugcugcaguacggcagcuucugcacccagcugaauagagcccugacagggaucgccguggaacaggacaagaacacccaagagguguucgcccaagugaagcagaucuacaagaccccuccuaucaaggacuucggcggcuucaauuucagccagauucugcccgauccuagcaagcccagcaagcggagcuucaucgaggaccugcuguucaacaaagugacacuggccgacgccggcuucaucaagcaguauggcgauugucugggcgacauugccgccagggaucugauuugcgcccagaaguuuaacggacugacagugcugccuccucugcugaccgaugagaugaucgcccaguacacaucugcccugcuggccggcacaaucacaagcggcuggacauuuggagcaggcgccgcucugcagauccccuuugcuaugcagauggccuaccgguucaacggcaucggagugacccagaaugugcuguacgagaaccagaagcugaucgccaaccaguucaacagcgccaucggcaagauccaggacagccugagcagcacagcaagcgcccugggaaagcugcaggacguggucaaccagaaugcccaggcacugaacacccuggucaagcagcuguccuccaacuucggcgccaucagcucugugcugaacgauauccugagcagacuggacccuccugaggccgaggugcagaucgacagacugaucacaggcagacugcagagccuccagacauacgugacccagcagcugaucagagccgccgagauuagagccucugccaaucuggccgccaccaagaugucugagugugugcugggccagagcaagagaguggacuuuugcggcaagggcuaccaccugaugagcuucccucagucugccccucacggcgugguguuucugcacgugacauaugugcccgcucaagagaagaauuucaccaccgcuccagccaucugccacgacggcaaagcccacuuuccuagagaaggcguguucguguccaacggcacccauugguucgugacacagcggaacuucuacgagccccagaucaucaccaccgacaacaccuucgugucuggcaacugcgacgucgugaucggcauugugaacaauaccguguacgacccucugcagcccgagcuggacagcuucaaagaggaacuggacaaguacuuuaagaaccacacaagccccgacguggaccugggcgauaucagcggaaucaaugccagcgucgugaacauccagaaagagaucgaccggcugaacgagguggccaagaaucugaacgagagccugaucgaccugcaagaacuggggaaguacgagcaguacaucaaguggcccugguacaucuggcugggcuuuaucgccggacugauugccaucgugauggucacaaucaugcuguguugcaugaccagcugcuguagcugccugaagggcuguuguagcuguggcagcugcugcaaguucgacgaggacgauucugagcccgugcugaagggcgugaaacugcacuacacaugaggacuaguguccaccugucccuccugggcugcuggauugucucguuuuccugccaaauaaacaggaucagcgcuuuacagaucucaaaggcucuuuucagagccaccaaaaaaaaaaaaaaaaaaaaaaaaaaaaaaaaaaaaaaaaaaaaaaaaaaaaaaaaaaaaaaaaaaaaaaaaaaaaaaaaaaaaaaaaaaaaaaaaaaaaa

SEQ ID NO: 24054 - RNA, 4129 nt, Artificial Sequence
  SARS-CoV-2/Wuhan/WIV05/2019__EPI_ISL_402128 spike protein mRNA gc mod (1-1273)(K986P_V987P_Y453F_D614G)
aggagacccgugacccggaaguuguacggcuacgcgacuuucccucccacaaacccucgcgcccuuccuuuccuacuugggcccggcagaaagcuuaccauguucguguuccuggugcugcugccucugguguccagccagugugugaaccugaccaccagaacacagcugccuccagccuacaccaacagcuuuaccagaggcguguacuaccccgacaagguguucagauccagcgugcugcacucuacccaggaccuguuccugccuuucuucagcaacgugaccugguuccacgccauccacguguccggcaccaauggcaccaagagauucgacaaccccgugcugcccuucaacgacgggguguacuuugccagcaccgagaaguccaacaucaucagaggcuggaucuucggcaccacacuggacagcaagacccagagccugcugaucgugaacaacgccaccaacguggucaucaaagugugcgaguuccaguucugcaacgaccccuuccugggcgucuacuaccacaagaacaacaagagcuggauggaaagcgaguuccggguguacagcagcgccaacaacugcaccuucgaguacgugucccagccuuuccugauggaccuggaaggcaagcagggcaacuucaagaaccugcgcgaguucguguuuaagaacaucgacggcuacuucaagaucuacagcaagcacaccccuaucaaccucgugcgggaucugccucagggcuucucugcucuggaaccccugguggaucugcccaucggcaucaacaucacccgguuucagacacugcuggcccugcacagaagcuaccugacaccuggcgauagcagcagcggauggacagcuggugccgccgcuuacuaugugggcuaccugcagccuagaaccuuccugcugaaguacaacgagaacggcaccaucaccgacgccguggauugugcucuggauccucugagcgagacaaagugcacccugaaguccuucaccguggaaaagggcaucuaccagaccagcaacuuccgggugcagcccaccgaauccaucgugcgguuccccaauaucaccaaucugugccccuucggcgagguguucaaugccaccagauucgccucuguguacgccuggaaccggaagcggaucagcaauugcguggccgacuacuccgugcuguacaacuccgccagcuucagcaccuucaagugcuacggcguguccccuaccaagcugaacgaccugugcuucacaaacguguacgccgacagcuucgugauccggggagaugaagugcggcagauugccccuggacagacaggcaagaucgccgacuacaacuacaagcugcccgacgacuucaccggcugugugauugccuggaacagcaacaaccuggacuccaaagucggcggcaacuacaauuaccuguuccggcuguuccggaaguccaaucugaagcccuucgagcgggacaucuccaccgagaucuaucaggccggcagcaccccuuguaacggcguggaaggcuucaacugcuacuucccacugcaguccuacggcuuucagcccacaaauggcgugggcuaucagcccuacagagugguggugcugagcuucgaacugcugcaugccccugccacagugugcggcccuaagaaaagcaccaaucucgugaagaacaaaugcgugaacuucaacuucaacggccugaccggcaccggcgugcugacagagagcaacaagaaguuccugccauuccagcaguuuggccgggauaucgccgauaccacagacgccguuagagauccccagacacuggaaauccuggacaucaccccuugcagcuucggcggagugucugugaucaccccuggcaccaacaccagcaaucagguggcagugcuguaccagggcgugaacuguaccgaagugcccguggccauucacgccgaucagcugacaccuacauggcggguguacuccaccggcagcaauguguuucagaccagagccggcugucugaucggagccgagcacgugaacaauagcuacgagugcgacauccccaucggcgcuggaaucugcgccagcuaccagacacagacaaacagcccucggagagccagaagcguggccagccagagcaucauugccuacacaaugucucugggcgccgagaacagcguggccuacuccaacaacucuaucgcuauccccaccaacuucaccaucagcgugaccacagagauccugccuguguccaugaccaagaccagcguggacugcaccauguacaucugcggcgauuccaccgagugcuccaaccugcugcugcaguacggcagcuucugcacccagcugaauagagcccugacagggaucgccguggaacaggacaagaacacccaagagguguucgcccaagugaagcagaucuacaagaccccuccuaucaaggacuucggcggcuucaauuucagccagauucugcccgauccuagcaagcccagcaagcggagcuucaucgaggaccugcuguucaacaaagugacacuggccgacgccggcuucaucaagcaguauggcgauugucugggcgacauugccgccagggaucugauuugcgcccagaaguuuaacggacugacagugcugccuccucugcugaccgaugagaugaucgcccaguacacaucugcccugcuggccggcacaaucacaagcggcuggacauuuggagcaggcgccgcucugcagauccccuuugcuaugcagauggccuaccgguucaacggcaucggagugacccagaaugugcuguacgagaaccagaagcugaucgccaaccaguucaacagcgccaucggcaagauccaggacagccugagcagcacagcaagcgcccugggaaagcugcaggacguggucaaccagaaugcccaggcacugaacacccuggucaagcagcuguccuccaacuucggcgccaucagcucugugcugaacgauauccugagcagacuggacccuccugaggccgaggugcagaucgacagacugaucacaggcagacugcagagccuccagacauacgugacccagcagcugaucagagccgccgagauuagagccucugccaaucuggccgccaccaagaugucugagugugugcugggccagagcaagagaguggacuuuugcggcaagggcuaccaccugaugagcuucccucagucugccccucacggcgugguguuucugcacgugacauaugugcccgcucaagagaagaauuucaccaccgcuccagccaucugccacgacggcaaagcccacuuuccuagagaaggcguguucguguccaacggcacccauugguucgugacacagcggaacuucuacgagccccagaucaucaccaccgacaacaccuucgugucuggcaacugcgacgucgugaucggcauugugaacaauaccguguacgacccucugcagcccgagcuggacagcuucaaagaggaacuggacaaguacuuuaagaaccacacaagccccgacguggaccugggcgauaucagcggaaucaaugccagcgucgugaacauccagaaagagaucgaccggcugaacgagguggccaagaaucugaacgagagccugaucgaccugcaagaacuggggaaguacgagcaguacaucaaguggcccugguacaucuggcugggcuuuaucgccggacugauugccaucgugauggucacaaucaugcuguguugcaugaccagcugcuguagcugccugaagggcuguuguagcuguggcagcugcugcaaguucgacgaggacgauucugagcccgugcugaagggcgugaaacugcacuacacaugaggacuaguguccaccugucccuccugggcugcuggauugucucguuuuccugccaaauaaacaggaucagcgcuuuacagaucucaaaggcucuuuucagagccaccaaaaaaaaaaaaaaaaaaaaaaaaaaaaaaaaaaaaaaaaaaaaaaaaaaaaaaaaaaaaaaaaaaaaaaaaaaaaaaaaaaaaaaaaaaaaaaaaaaaaa

SEQ ID NO: 24055 - RNA, 4129 nt, Artificial Sequence
  SARS-CoV-2/Wuhan/WIV05/2019__EPI_ISL_402128 spike protein mRNA gc mod (1-1273)(K986P_V987P_D614G_I692V)
aggagacccgugacccggaaguuguacggcuacgcgacuuucccucccacaaacccucgcgcccuuccuuuccuacuugggcccggcagaaagcuuaccauguucguguuccuggugcugcugccucugguguccagccagugugugaaccugaccaccagaacacagcugccuccagccuacaccaacagcuuuaccagaggcguguacuaccccgacaagguguucagauccagcgugcugcacucuacccaggaccuguuccugccuuucuucagcaacgugaccugguuccacgccauccacguguccggcaccaauggcaccaagagauucgacaaccccgugcugcccuucaacgacgggguguacuuugccagcaccgagaaguccaacaucaucagaggcuggaucuucggcaccacacuggacagcaagacccagagccugcugaucgugaacaacgccaccaacguggucaucaaagugugcgaguuccaguucugcaacgaccccuuccugggcgucuacuaccacaagaacaacaagagcuggauggaaagcgaguuccggguguacagcagcgccaacaacugcaccuucgaguacgugucccagccuuuccugauggaccuggaaggcaagcagggcaacuucaagaaccugcgcgaguucguguuuaagaacaucgacggcuacuucaagaucuacagcaagcacaccccuaucaaccucgugcgggaucugccucagggcuucucugcucuggaaccccugguggaucugcccaucggcaucaacaucacccgguuucagacacugcuggcccugcacagaagcuaccugacaccuggcgauagcagcagcggauggacagcuggugccgccgcuuacuaugugggcuaccugcagccuagaaccuuccugcugaaguacaacgagaacggcaccaucaccgacgccguggauugugcucuggauccucugagcgagacaaagugcacccugaaguccuucaccguggaaaagggcaucuaccagaccagcaacuuccgggugcagcccaccgaauccaucgugcgguuccccaauaucaccaaucugugccccuucggcgagguguucaaugccaccagauucgccucuguguacgccuggaaccggaagcggaucagcaauugcguggccgacuacuccgugcuguacaacuccgccagcuucagcaccuucaagugcuacggcguguccccuaccaagcugaacgaccugugcuucacaaacguguacgccgacagcuucgugauccggggagaugaagugcggcagauugccccuggacagacaggcaagaucgccgacuacaacuacaagcugcccgacgacuucaccggcugugugauugccuggaacagcaacaaccuggacuccaaagucggcggcaacuacaauuaccuguaccggcuguuccggaaguccaaucugaagcccuucgagcgggacaucuccaccgagaucuaucaggccggcagcaccccuuguaacggcguggaaggcuucaacugcuacuucccacugcaguccuacggcuuucagcccacaaauggcgugggcuaucagcccuacagagugguggugcugagcuucgaacugcugcaugccccugccacagugugcggcccuaagaaaagcaccaaucucgugaagaacaaaugcgugaacuucaacuucaacggccugaccggcaccggcgugcugacagagagcaacaagaaguuccugccauuccagcaguuuggccgggauaucgccgauaccacagacgccguuagagauccccagacacuggaaauccuggacaucaccccuugcagcuucggcggagugucugugaucaccccuggcaccaacaccagcaaucagguggcagugcuguaccagggcgugaacuguaccgaagugcccguggccauucacgccgaucagcugacaccuacauggcggguguacuccaccggcagcaauguguuucagaccagagccggcugucugaucggagccgagcacgugaacaauagcuacgagugcgacauccccaucggcgcuggaaucugcgccagcuaccagacacagacaaacagcccucggagagccagaagcguggccagccagagcgugauugccuacacaaugucucugggcgccgagaacagcguggccuacuccaacaacucuaucgcuauccccaccaacuucaccaucagcgugaccacagagauccugccuguguccaugaccaagaccagcguggacugcaccauguacaucugcggcgauuccaccgagugcuccaaccugcugcugcaguacggcagcuucugcacccagcugaauagagcccugacagggaucgccguggaacaggacaagaacacccaagagguguucgcccaagugaagcagaucuacaagaccccuccuaucaaggacuucggcggcuucaauuucagccagauucugcccgauccuagcaagcccagcaagcggagcuucaucgaggaccugcuguucaacaaagugacacuggccgacgccggcuucaucaagcaguauggcgauugucugggcgacauugccgccagggaucugauuugcgcccagaaguuuaacggacugacagugcugccuccucugcugaccgaugagaugaucgcccaguacacaucugcccugcuggccggcacaaucacaagcggcuggacauuuggagcaggcgccgcucugcagauccccuuugcuaugcagauggccuaccgguucaacggcaucggagugacccagaaugugcuguacgagaaccagaagcugaucgccaaccaguucaacagcgccaucggcaagauccaggacagccugagcagcacagcaagcgcccugggaaagcugcaggacguggucaaccagaaugcccaggcacugaacacccuggucaagcagcuguccuccaacuucggcgccaucagcucugugcugaacgauauccugagcagacuggacccuccugaggccgaggugcagaucgacagacugaucacaggcagacugcagagccuccagacauacgugacccagcagcugaucagagccgccgagauuagagccucugccaaucuggccgccaccaagaugucugagugugugcugggccagagcaagagaguggacuuuugcggcaagggcuaccaccugaugagcuucccucagucugccccucacggcgugguguuucugcacgugacauaugugcccgcucaagagaagaauuucaccaccgcuccagccaucugccacgacggcaaagcccacuuuccuagagaaggcguguucguguccaacggcacccauugguucgugacacagcggaacuucuacgagccccagaucaucaccaccgacaacaccuucgugucuggcaacugcgacgucgugaucggcauugugaacaauaccguguacgacccucugcagcccgagcuggacagcuucaaagaggaacuggacaaguacuuuaagaaccacacaagccccgacguggaccugggcgauaucagcggaaucaaugccagcgucgugaacauccagaaagagaucgaccggcugaacgagguggccaagaaucugaacgagagccugaucgaccugcaagaacuggggaaguacgagcaguacaucaaguggcccugguacaucuggcugggcuuuaucgccggacugauugccaucgugauggucacaaucaugcuguguugcaugaccagcugcuguagcugccugaagggcuguuguagcuguggcagcugcugcaaguucgacgaggacgauucugagcccgugcugaagggcgugaaacugcacuacacaugaggacuaguguccaccugucccuccugggcugcuggauugucucguuuuccugccaaauaaacaggaucagcgcuuuacagaucucaaaggcucuuuucagagccaccaaaaaaaaaaaaaaaaaaaaaaaaaaaaaaaaaaaaaaaaaaaaaaaaaaaaaaaaaaaaaaaaaaaaaaaaaaaaaaaaaaaaaaaaaaaaaaaaaaaaa

SEQ ID NO: 24056 - RNA, 4129 nt, Artificial Sequence
  SARS-CoV-2/Wuhan/WIV05/2019__EPI_ISL_402128 spike protein mRNA gc mod (1-1273)(K986P_V987P_D614G_M1229I)
aggagacccgugacccggaaguuguacggcuacgcgacuuucccucccacaaacccucgcgcccuuccuuuccuacuugggcccggcagaaagcuuaccauguucguguuccuggugcugcugccucugguguccagccagugugugaaccugaccaccagaacacagcugccuccagccuacaccaacagcuuuaccagaggcguguacuaccccgacaagguguucagauccagcgugcugcacucuacccaggaccuguuccugccuuucuucagcaacgugaccugguuccacgccauccacguguccggcaccaauggcaccaagagauucgacaaccccgugcugcccuucaacgacgggguguacuuugccagcaccgagaaguccaacaucaucagaggcuggaucuucggcaccacacuggacagcaagacccagagccugcugaucgugaacaacgccaccaacguggucaucaaagugugcgaguuccaguucugcaacgaccccuuccugggcgucuacuaccacaagaacaacaagagcuggauggaaagcgaguuccggguguacagcagcgccaacaacugcaccuucgaguacgugucccagccuuuccugauggaccuggaaggcaagcagggcaacuucaagaaccugcgcgaguucguguuuaagaacaucgacggcuacuucaagaucuacagcaagcacaccccuaucaaccucgugcgggaucugccucagggcuucucugcucuggaaccccugguggaucugcccaucggcaucaacaucacccgguuucagacacugcuggcccugcacagaagcuaccugacaccuggcgauagcagcagcggauggacagcuggugccgccgcuuacuaugugggcuaccugcagccuagaaccuuccugcugaaguacaacgagaacggcaccaucaccgacgccguggauugugcucuggauccucugagcgagacaaagugcacccugaaguccuucaccguggaaaagggcaucuaccagaccagcaacuuccgggugcagcccaccgaauccaucgugcgguuccccaauaucaccaaucugugccccuucggcgagguguucaaugccaccagauucgccucuguguacgccuggaaccggaagcggaucagcaauugcguggccgacuacuccgugcuguacaacuccgccagcuucagcaccuucaagugcuacggcguguccccuaccaagcugaacgaccugugcuucacaaacguguacgccgacagcuucgugauccggggagaugaagugcggcagauugccccuggacagacaggcaagaucgccgacuacaacuacaagcugcccgacgacuucaccggcugugugauugccuggaacagcaacaaccuggacuccaaagucggcggcaacuacaauuaccuguaccggcuguuccggaaguccaaucugaagcccuucgagcgggacaucuccaccgagaucuaucaggccggcagcaccccuuguaacggcguggaaggcuucaacugcuacuucccacugcaguccuacggcuuucagcccacaaauggcgugggcuaucagcccuacagagugguggugcugagcuucgaacugcugcaugccccugccacagugugcggcccuaagaaaagcaccaaucucgugaagaacaaaugcgugaacuucaacuucaacggccugaccggcaccggcgugcugacagagagcaacaagaaguuccugccauuccagcaguuuggccgggauaucgccgauaccacagacgccguuagagauccccagacacuggaaauccuggacaucaccccuugcagcuucggcggagugucugugaucaccccuggcaccaacaccagcaaucagguggcagugcuguaccagggcgugaacuguaccgaagugcccguggccauucacgccgaucagcugacaccuacauggcggguguacuccaccggcagcaauguguuucagaccagagccggcugucugaucggagccgagcacgugaacaauagcuacgagugcgacauccccaucggcgcuggaaucugcgccagcuaccagacacagacaaacagcccucggagagccagaagcguggccagccagagcaucauugccuacacaaugucucugggcgccgagaacagcguggccuacuccaacaacucuaucgcuauccccaccaacuucaccaucagcgugaccacagagauccugccuguguccaugaccaagaccagcguggacugcaccauguacaucugcggcgauuccaccgagugcuccaaccugcugcugcaguacggcagcuucugcacccagcugaauagagcccugacagggaucgccguggaacaggacaagaacacccaagagguguucgcccaagugaagcagaucuacaagaccccuccuaucaaggacuucggcggcuucaauuucagccagauucugcccgauccuagcaagcccagcaagcggagcuucaucgaggaccugcuguucaacaaagugacacuggccgacgccggcuucaucaagcaguauggcgauugucugggcgacauugccgccagggaucugauuugcgcccagaaguuuaacggacugacagugcugccuccucugcugaccgaugagaugaucgcccaguacacaucugcccugcuggccggcacaaucacaagcggcuggacauuuggagcaggcgccgcucugcagauccccuuugcuaugcagauggccuaccgguucaacggcaucggagugacccagaaugugcuguacgagaaccagaagcugaucgccaaccaguucaacagcgccaucggcaagauccaggacagccugagcagcacagcaagcgcccugggaaagcugcaggacguggucaaccagaaugcccaggcacugaacacccuggucaagcagcuguccuccaacuucggcgccaucagcucugugcugaacgauauccugagcagacuggacccuccugaggccgaggugcagaucgacagacugaucacaggcagacugcagagccuccagacauacgugacccagcagcugaucagagccgccgagauuagagccucugccaaucuggccgccaccaagaugucugagugugugcugggccagagcaagagaguggacuuuugcggcaagggcuaccaccugaugagcuucccucagucugccccucacggcgugguguuucugcacgugacauaugugcccgcucaagagaagaauuucaccaccgcuccagccaucugccacgacggcaaagcccacuuuccuagagaaggcguguucguguccaacggcacccauugguucgugacacagcggaacuucuacgagccccagaucaucaccaccgacaacaccuucgugucuggcaacugcgacgucgugaucggcauugugaacaauaccguguacgacccucugcagcccgagcuggacagcuucaaagaggaacuggacaaguacuuuaagaaccacacaagccccgacguggaccugggcgauaucagcggaaucaaugccagcgucgugaacauccagaaagagaucgaccggcugaacgagguggccaagaaucugaacgagagccugaucgaccugcaagaacuggggaaguacgagcaguacaucaaguggcccugguacaucuggcugggcuuuaucgccggacugauugccaucgugaucgucacaaucaugcuguguugcaugaccagcugcuguagcugccugaagggcuguuguagcuguggcagcugcugcaaguucgacgaggacgauucugagcccgugcugaagggcgugaaacugcacuacacaugaggacuaguguccaccugucccuccugggcugcuggauugucucguuuuccugccaaauaaacaggaucagcgcuuuacagaucucaaaggcucuuuucagagccaccaaaaaaaaaaaaaaaaaaaaaaaaaaaaaaaaaaaaaaaaaaaaaaaaaaaaaaaaaaaaaaaaaaaaaaaaaaaaaaaaaaaaaaaaaaaaaaaaaaaaa

SEQ ID NO: 24057 - RNA, 4123 nt, Artificial Sequence
  SARS-CoV-2/Wuhan/WIV05/2019__EPI_ISL_402128 spike protein mRNA gc mod (1-1273)(K986P_V987P_H69del_V70del_A222V_Y453F_S477N_D614G_I692V)
aggagacccgugacccggaaguuguacggcuacgcgacuuucccucccacaaacccucgcgcccuuccuuuccuacuugggcccggcagaaagcuuaccauguucguguuccuggugcugcugccucugguguccagccagugugugaaccugaccaccagaacacagcugccuccagccuacaccaacagcuuuaccagaggcguguacuaccccgacaagguguucagauccagcgugcugcacucuacccaggaccuguuccugccuuucuucagcaacgugaccugguuccacgccaucuccggcaccaauggcaccaagagauucgacaaccccgugcugcccuucaacgacgggguguacuuugccagcaccgagaaguccaacaucaucagaggcuggaucuucggcaccacacuggacagcaagacccagagccugcugaucgugaacaacgccaccaacguggucaucaaagugugcgaguuccaguucugcaacgaccccuuccugggcgucuacuaccacaagaacaacaagagcuggauggaaagcgaguuccggguguacagcagcgccaacaacugcaccuucgaguacgugucccagccuuuccugauggaccuggaaggcaagcagggcaacuucaagaaccugcgcgaguucguguuuaagaacaucgacggcuacuucaagaucuacagcaagcacaccccuaucaaccucgugcgggaucugccucagggcuucucugugcuggaaccccugguggaucugcccaucggcaucaacaucacccgguuucagacacugcuggcccugcacagaagcuaccugacaccuggcgauagcagcagcggauggacagcuggugccgccgcuuacuaugugggcuaccugcagccuagaaccuuccugcugaaguacaacgagaacggcaccaucaccgacgccguggauugugcucuggauccucugagcgagacaaagugcacccugaaguccuucaccguggaaaagggcaucuaccagaccagcaacuuccgggugcagcccaccgaauccaucgugcgguuccccaauaucaccaaucugugccccuucggcgagguguucaaugccaccagauucgccucuguguacgccuggaaccggaagcggaucagcaauugcguggccgacuacuccgugcuguacaacuccgccagcuucagcaccuucaagugcuacggcguguccccuaccaagcugaacgaccugugcuucacaaacguguacgccgacagcuucgugauccggggagaugaagugcggcagauugccccuggacagacaggcaagaucgccgacuacaacuacaagcugcccgacgacuucaccggcugugugauugccuggaacagcaacaaccuggacuccaaagucggcggcaacuacaauuaccuguuccggcuguuccggaaguccaaucugaagcccuucgagcgggacaucuccaccgagaucuaucaggccggcaacaccccuuguaacggcguggaaggcuucaacugcuacuucccacugcaguccuacggcuuucagcccacaaauggcgugggcuaucagcccuacagagugguggugcugagcuucgaacugcugcaugccccugccacagugugcggcccuaagaaaagcaccaaucucgugaagaacaaaugcgugaacuucaacuucaacggccugaccggcaccggcgugcugacagagagcaacaagaaguuccugccauuccagcaguuuggccgggauaucgccgauaccacagacgccguuagagauccccagacacuggaaauccuggacaucaccccuugcagcuucggcggagugucugugaucaccccuggcaccaacaccagcaaucagguggcagugcuguaccagggcgugaacuguaccgaagugcccguggccauucacgccgaucagcugacaccuacauggcggguguacuccaccggcagcaauguguuucagaccagagccggcugucugaucggagccgagcacgugaacaauagcuacgagugcgacauccccaucggcgcuggaaucugcgccagcuaccagacacagacaaacagcccucggagagccagaagcguggccagccagagcgugauugccuacacaaugucucugggcgccgagaacagcguggccuacuccaacaacucuaucgcuauccccaccaacuucaccaucagcgugaccacagagauccugccuguguccaugaccaagaccagcguggacugcaccauguacaucugcggcgauuccaccgagugcuccaaccugcugcugcaguacggcagcuucugcacccagcugaauagagcccugacagggaucgccguggaacaggacaagaacacccaagagguguucgcccaagugaagcagaucuacaagaccccuccuaucaaggacuucggcggcuucaauuucagccagauucugcccgauccuagcaagcccagcaagcggagcuucaucgaggaccugcuguucaacaaagugacacuggccgacgccggcuucaucaagcaguauggcgauugucugggcgacauugccgccagggaucugauuugcgcccagaaguuuaacggacugacagugcugccuccucugcugaccgaugagaugaucgcccaguacacaucugcccugcuggccggcacaaucacaagcggcuggacauuuggagcaggcgccgcucugcagauccccuuugcuaugcagauggccuaccgguucaacggcaucggagugacccagaaugugcuguacgagaaccagaagcugaucgccaaccaguucaacagcgccaucggcaagauccaggacagccugagcagcacagcaagcgcccugggaaagcugcaggacguggucaaccagaaugcccaggcacugaacacccuggucaagcagcuguccuccaacuucggcgccaucagcucugugcugaacgauauccugagcagacuggacccuccugaggccgaggugcagaucgacagacugaucacaggcagacugcagagccuccagacauacgugacccagcagcugaucagagccgccgagauuagagccucugccaaucuggccgccaccaagaugucugagugugugcugggccagagcaagagaguggacuuuugcggcaagggcuaccaccugaugagcuucccucagucugccccucacggcgugguguuucugcacgugacauaugugcccgcucaagagaagaauuucaccaccgcuccagccaucugccacgacggcaaagcccacuuuccuagagaaggcguguucguguccaacggcacccauugguucgugacacagcggaacuucuacgagccccagaucaucaccaccgacaacaccuucgugucuggcaacugcgacgucgugaucggcauugugaacaauaccguguacgacccucugcagcccgagcuggacagcuucaaagaggaacuggacaaguacuuuaagaaccacacaagccccgacguggaccugggcgauaucagcggaaucaaugccagcgucgugaacauccagaaagagaucgaccggcugaacgagguggccaagaaucugaacgagagccugaucgaccugcaagaacuggggaaguacgagcaguacaucaaguggcccugguacaucuggcugggcuuuaucgccggacugauugccaucgugauggucacaaucaugcuguguugcaugaccagcugcuguagcugccugaagggcuguuguagcuguggcagcugcugcaaguucgacgaggacgauucugagcccgugcugaagggcgugaaacugcacuacacaugaggacuaguguccaccugucccuccugggcugcuggauugucucguuuuccugccaaauaaacaggaucagcgcuuuacagaucucaaaggcucuuuucagagccaccaaaaaaaaaaaaaaaaaaaaaaaaaaaaaaaaaaaaaaaaaaaaaaaaaaaaaaaaaaaaaaaaaaaaaaaaaaaaaaaaaaaaaaaaaaaaaaaaaaaaa

SEQ ID NO: 24058 - RNA, 4123 nt, Artificial Sequence
  SARS-CoV-2/Wuhan/WIV05/2019__EPI_ISL_402128 spike protein mRNA gc mod (1-1273)(K986P_V987P_H69del_V70del_Y453F_D614G_I692V_M1229I)
aggagacccgugacccggaaguuguacggcuacgcgacuuucccucccacaaacccucgcgcccuuccuuuccuacuugggcccggcagaaagcuuaccauguucguguuccuggugcugcugccucugguguccagccagugugugaaccugaccaccagaacacagcugccuccagccuacaccaacagcuuuaccagaggcguguacuaccccgacaagguguucagauccagcgugcugcacucuacccaggaccuguuccugccuuucuucagcaacgugaccugguuccacgccaucuccggcaccaauggcaccaagagauucgacaaccccgugcugcccuucaacgacgggguguacuuugccagcaccgagaaguccaacaucaucagaggcuggaucuucggcaccacacuggacagcaagacccagagccugcugaucgugaacaacgccaccaacguggucaucaaagugugcgaguuccaguucugcaacgaccccuuccugggcgucuacuaccacaagaacaacaagagcuggauggaaagcgaguuccggguguacagcagcgccaacaacugcaccuucgaguacgugucccagccuuuccugauggaccuggaaggcaagcagggcaacuucaagaaccugcgcgaguucguguuuaagaacaucgacggcuacuucaagaucuacagcaagcacaccccuaucaaccucgugcgggaucugccucagggcuucucugcucuggaaccccugguggaucugcccaucggcaucaacaucacccgguuucagacacugcuggcccugcacagaagcuaccugacaccuggcgauagcagcagcggauggacagcuggugccgccgcuuacuaugugggcuaccugcagccuagaaccuuccugcugaaguacaacgagaacggcaccaucaccgacgccguggauugugcucuggauccucugagcgagacaaagugcacccugaaguccuucaccguggaaaagggcaucuaccagaccagcaacuuccgggugcagcccaccgaauccaucgugcgguuccccaauaucaccaaucugugccccuucggcgagguguucaaugccaccagauucgccucuguguacgccuggaaccggaagcggaucagcaauugcguggccgacuacuccgugcuguacaacuccgccagcuucagcaccuucaagugcuacggcguguccccuaccaagcugaacgaccugugcuucacaaacguguacgccgacagcuucgugauccggggagaugaagugcggcagauugccccuggacagacaggcaagaucgccgacuacaacuacaagcugcccgacgacuucaccggcugugugauugccuggaacagcaacaaccuggacuccaaagucggcggcaacuacaauuaccuguuccggcuguuccggaaguccaaucugaagcccuucgagcgggacaucuccaccgagaucuaucaggccggcagcaccccuuguaacggcguggaaggcuucaacugcuacuucccacugcaguccuacggcuuucagcccacaaauggcgugggcuaucagcccuacagagugguggugcugagcuucgaacugcugcaugccccugccacagugugcggcccuaagaaaagcaccaaucucgugaagaacaaaugcgugaacuucaacuucaacggccugaccggcaccggcgugcugacagagagcaacaagaaguuccugccauuccagcaguuuggccgggauaucgccgauaccacagacgccguuagagauccccagacacuggaaauccuggacaucaccccuugcagcuucggcggagugucugugaucaccccuggcaccaacaccagcaaucagguggcagugcuguaccagggcgugaacuguaccgaagugcccguggccauucacgccgaucagcugacaccuacauggcggguguacuccaccggcagcaauguguuucagaccagagccggcugucugaucggagccgagcacgugaacaauagcuacgagugcgacauccccaucggcgcuggaaucugcgccagcuaccagacacagacaaacagcccucggagagccagaagcguggccagccagagcgugauugccuacacaaugucucugggcgccgagaacagcguggccuacuccaacaacucuaucgcuauccccaccaacuucaccaucagcgugaccacagagauccugccuguguccaugaccaagaccagcguggacugcaccauguacaucugcggcgauuccaccgagugcuccaaccugcugcugcaguacggcagcuucugcacccagcugaauagagcccugacagggaucgccguggaacaggacaagaacacccaagagguguucgcccaagugaagcagaucuacaagaccccuccuaucaaggacuucggcggcuucaauuucagccagauucugcccgauccuagcaagcccagcaagcggagcuucaucgaggaccugcuguucaacaaagugacacuggccgacgccggcuucaucaagcaguauggcgauugucugggcgacauugccgccagggaucugauuugcgcccagaaguuuaacggacugacagugcugccuccucugcugaccgaugagaugaucgcccaguacacaucugcccugcuggccggcacaaucacaagcggcuggacauuuggagcaggcgccgcucugcagauccccuuugcuaugcagauggccuaccgguucaacggcaucggagugacccagaaugugcuguacgagaaccagaagcugaucgccaaccaguucaacagcgccaucggcaagauccaggacagccugagcagcacagcaagcgcccugggaaagcugcaggacguggucaaccagaaugcccaggcacugaacacccuggucaagcagcuguccuccaacuucggcgccaucagcucugugcugaacgauauccugagcagacuggacccuccugaggccgaggugcagaucgacagacugaucacaggcagacugcagagccuccagacauacgugacccagcagcugaucagagccgccgagauuagagccucugccaaucuggccgccaccaagaugucugagugugugcugggccagagcaagagaguggacuuuugcggcaagggcuaccaccugaugagcuucccucagucugccccucacggcgugguguuucugcacgugacauaugugcccgcucaagagaagaauuucaccaccgcuccagccaucugccacgacggcaaagcccacuuuccuagagaaggcguguucguguccaacggcacccauugguucgugacacagcggaacuucuacgagccccagaucaucaccaccgacaacaccuucgugucuggcaacugcgacgucgugaucggcauugugaacaauaccguguacgacccucugcagcccgagcuggacagcuucaaagaggaacuggacaaguacuuuaagaaccacacaagccccgacguggaccugggcgauaucagcggaaucaaugccagcgucgugaacauccagaaagagaucgaccggcugaacgagguggccaagaaucugaacgagagccugaucgaccugcaagaacuggggaaguacgagcaguacaucaaguggcccugguacaucuggcugggcuuuaucgccggacugauugccaucgugaucgucacaaucaugcuguguugcaugaccagcugcuguagcugccugaagggcuguuguagcuguggcagcugcugcaaguucgacgaggacgauucugagcccgugcugaagggcgugaaacugcacuacacaugaggacuaguguccaccugucccuccugggcugcuggauugucucguuuuccugccaaauaaacaggaucagcgcuuuacagaucucaaaggcucuuuucagagccaccaaaaaaaaaaaaaaaaaaaaaaaaaaaaaaaaaaaaaaaaaaaaaaaaaaaaaaaaaaaaaaaaaaaaaaaaaaaaaaaaaaaaaaaaaaaaaaaaaaaaa

SEQ ID NO: 24059 - RNA, 4120 nt, Artificial Sequence
  SARS-CoV-2/Wuhan/WIV05/2019__EPI_ISL_402128 spike protein mRNA gc mod (1-1273)(K986P_V987P_K986P_V987P_H69del_V70del_Y144del_N501Y_A570 D_D614G_P681H_T716I_S982A_D1118H)
aggagacccgugacccggaaguuguacggcuacgcgacuuucccucccacaaacccucgcgcccuuccuuuccuacuugggcccggcagaaagcuuaccauguucguguuccuggugcugcugccucugguguccagccagugugugaaccugaccaccagaacacagcugccuccagccuacaccaacagcuuuaccagaggcguguacuaccccgacaagguguucagauccagcgugcugcacucuacccaggaccuguuccugccuuucuucagcaacgugaccugguuccacgccaucuccggcaccaauggcaccaagagauucgacaaccccgugcugcccuucaacgacgggguguacuuugccagcaccgagaaguccaacaucaucagaggcuggaucuucggcaccacacuggacagcaagacccagagccugcugaucgugaacaacgccaccaacguggucaucaaagugugcgaguuccaguucugcaacgaccccuuccugggcgucuaccacaagaacaacaagagcuggauggaaagcgaguuccggguguacagcagcgccaacaacugcaccuucgaguacgugucccagccuuuccugauggaccuggaaggcaagcagggcaacuucaagaaccugcgcgaguucguguuuaagaacaucgacggcuacuucaagaucuacagcaagcacaccccuaucaaccucgugcgggaucugccucagggcuucucugcucuggaaccccugguggaucugcccaucggcaucaacaucacccgguuucagacacugcuggcccugcacagaagcuaccugacaccuggcgauagcagcagcggauggacagcuggugccgccgcuuacuaugugggcuaccugcagccuagaaccuuccugcugaaguacaacgagaacggcaccaucaccgacgccguggauugugcucuggauccucugagcgagacaaagugcacccugaaguccuucaccguggaaaagggcaucuaccagaccagcaacuuccgggugcagcccaccgaauccaucgugcgguuccccaauaucaccaaucugugccccuucggcgagguguucaaugccaccagauucgccucuguguacgccuggaaccggaagcggaucagcaauugcguggccgacuacuccgugcuguacaacuccgccagcuucagcaccuucaagugcuacggcguguccccuaccaagcugaacgaccugugcuucacaaacguguacgccgacagcuucgugauccggggagaugaagugcggcagauugccccuggacagacaggcaagaucgccgacuacaacuacaagcugcccgacgacuucaccggcugugugauugccuggaacagcaacaaccuggacuccaaagucggcggcaacuacaauuaccuguaccggcuguuccggaaguccaaucugaagcccuucgagcgggacaucuccaccgagaucuaucaggccggcagcaccccuuguaacggcguggaaggcuucaacugcuacuucccacugcaguccuacggcuuucagcccacauacggcgugggcuaucagcccuacagagugguggugcugagcuucgaacugcugcaugccccugccacagugugcggcccuaagaaaagcaccaaucucgugaagaacaaaugcgugaacuucaacuucaacggccugaccggcaccggcgugcugacagagagcaacaagaaguuccugccauuccagcaguuuggccgggauaucgacgauaccacagacgccguuagagauccccagacacuggaaauccuggacaucaccccuugcagcuucggcggagugucugugaucaccccuggcaccaacaccagcaaucagguggcagugcuguaccagggcgugaacuguaccgaagugcccguggccauucacgccgaucagcugacaccuacauggcggguguacuccaccggcagcaauguguuucagaccagagccggcugucugaucggagccgagcacgugaacaauagcuacgagugcgacauccccaucggcgcuggaaucugcgccagcuaccagacacagacaaacagccaccggagagccagaagcguggccagccagagcaucauugccuacacaaugucucugggcgccgagaacagcguggccuacuccaacaacucuaucgcuauccccaucaacuucaccaucagcgugaccacagagauccugccuguguccaugaccaagaccagcguggacugcaccauguacaucugcggcgauuccaccgagugcuccaaccugcugcugcaguacggcagcuucugcacccagcugaauagagcccugacagggaucgccguggaacaggacaagaacacccaagagguguucgcccaagugaagcagaucuacaagaccccuccuaucaaggacuucggcggcuucaauuucagccagauucugcccgauccuagcaagcccagcaagcggagcuucaucgaggaccugcuguucaacaaagugacacuggccgacgccggcuucaucaagcaguauggcgauugucugggcgacauugccgccagggaucugauuugcgcccagaaguuuaacggacugacagugcugccuccucugcugaccgaugagaugaucgcccaguacacaucugcccugcuggccggcacaaucacaagcggcuggacauuuggagcaggcgccgcucugcagauccccuuugcuaugcagauggccuaccgguucaacggcaucggagugacccagaaugugcuguacgagaaccagaagcugaucgccaaccaguucaacagcgccaucggcaagauccaggacagccugagcagcacagcaagcgcccugggaaagcugcaggacguggucaaccagaaugcccaggcacugaacacccuggucaagcagcuguccuccaacuucggcgccaucagcucugugcugaacgauauccuggccagacuggacccuccugaggccgaggugcagaucgacagacugaucacaggcagacugcagagccuccagacauacgugacccagcagcugaucagagccgccgagauuagagccucugccaaucuggccgccaccaagaugucugagugugugcugggccagagcaagagaguggacuuuugcggcaagggcuaccaccugaugagcuucccucagucugccccucacggcgugguguuucugcacgugacauaugugcccgcucaagagaagaauuucaccaccgcuccagccaucugccacgacggcaaagcccacuuuccuagagaaggcguguucguguccaacggcacccauugguucgugacacagcggaacuucuacgagccccagaucaucaccacccacaacaccuucgugucuggcaacugcgacgucgugaucggcauugugaacaauaccguguacgacccucugcagcccgagcuggacagcuucaaagaggaacuggacaaguacuuuaagaaccacacaagccccgacguggaccugggcgauaucagcggaaucaaugccagcgucgugaacauccagaaagagaucgaccggcugaacgagguggccaagaaucugaacgagagccugaucgaccugcaagaacuggggaaguacgagcaguacaucaaguggcccugguacaucuggcugggcuuuaucgccggacugauugccaucgugauggucacaaucaugcuguguugcaugaccagcugcuguagcugccugaagggcuguuguagcuguggcagcugcugcaaguucgacgaggacgauucugagcccgugcugaagggcgugaaacugcacuacacaugaggacuaguguccaccugucccuccugggcugcuggauugucucguuuuccugccaaauaaacaggaucagcgcuuuacagaucucaaaggcucuuuucagagccaccaaaaaaaaaaaaaaaaaaaaaaaaaaaaaaaaaaaaaaaaaaaaaaaaaaaaaaaaaaaaaaaaaaaaaaaaaaaaaaaaaaaaaaaaaaaaaaaaaaaaa

SEQ ID NO: 24060 - RNA, 4129 nt, Artificial Sequence
  SARS-CoV-2/Wuhan/WIV05/2019__EPI_ISL_402128 spike protein mRNA gc mod (1-1273)(K986P_V987P_K986P_V987P_K417N_E484K_N501Y_D614G)
aggagacccgugacccggaaguuguacggcuacgcgacuuucccucccacaaacccucgcgcccuuccuuuccuacuugggcccggcagaaagcuuaccauguucguguuccuggugcugcugccucugguguccagccagugugugaaccugaccaccagaacacagcugccuccagccuacaccaacagcuuuaccagaggcguguacuaccccgacaagguguucagauccagcgugcugcacucuacccaggaccuguuccugccuuucuucagcaacgugaccugguuccacgccauccacguguccggcaccaauggcaccaagagauucgacaaccccgugcugcccuucaacgacgggguguacuuugccagcaccgagaaguccaacaucaucagaggcuggaucuucggcaccacacuggacagcaagacccagagccugcugaucgugaacaacgccaccaacguggucaucaaagugugcgaguuccaguucugcaacgaccccuuccugggcgucuacuaccacaagaacaacaagagcuggauggaaagcgaguuccggguguacagcagcgccaacaacugcaccuucgaguacgugucccagccuuuccugauggaccuggaaggcaagcagggcaacuucaagaaccugcgcgaguucguguuuaagaacaucgacggcuacuucaagaucuacagcaagcacaccccuaucaaccucgugcgggaucugccucagggcuucucugcucuggaaccccugguggaucugcccaucggcaucaacaucacccgguuucagacacugcuggcccugcacagaagcuaccugacaccuggcgauagcagcagcggauggacagcuggugccgccgcuuacuaugugggcuaccugcagccuagaaccuuccugcugaaguacaacgagaacggcaccaucaccgacgccguggauugugcucuggauccucugagcgagacaaagugcacccugaaguccuucaccguggaaaagggcaucuaccagaccagcaacuuccgggugcagcccaccgaauccaucgugcgguuccccaauaucaccaaucugugccccuucggcgagguguucaaugccaccagauucgccucuguguacgccuggaaccggaagcggaucagcaauugcguggccgacuacuccgugcuguacaacuccgccagcuucagcaccuucaagugcuacggcguguccccuaccaagcugaacgaccugugcuucacaaacguguacgccgacagcuucgugauccggggagaugaagugcggcagauugccccuggacagacaggcaacaucgccgacuacaacuacaagcugcccgacgacuucaccggcugugugauugccuggaacagcaacaaccuggacuccaaagucggcggcaacuacaauuaccuguaccggcuguuccggaaguccaaucugaagcccuucgagcgggacaucuccaccgagaucuaucaggccggcagcaccccuuguaacggcgugaagggcuucaacugcuacuucccacugcaguccuacggcuuucagcccacauacggcgugggcuaucagcccuacagagugguggugcugagcuucgaacugcugcaugccccugccacagugugcggcccuaagaaaagcaccaaucucgugaagaacaaaugcgugaacuucaacuucaacggccugaccggcaccggcgugcugacagagagcaacaagaaguuccugccauuccagcaguuuggccgggauaucgccgauaccacagacgccguuagagauccccagacacuggaaauccuggacaucaccccuugcagcuucggcggagugucugugaucaccccuggcaccaacaccagcaaucagguggcagugcuguaccagggcgugaacuguaccgaagugcccguggccauucacgccgaucagcugacaccuacauggcggguguacuccaccggcagcaauguguuucagaccagagccggcugucugaucggagccgagcacgugaacaauagcuacgagugcgacauccccaucggcgcuggaaucugcgccagcuaccagacacagacaaacagcccucggagagccagaagcguggccagccagagcaucauugccuacacaaugucucugggcgccgagaacagcguggccuacuccaacaacucuaucgcuauccccaccaacuucaccaucagcgugaccacagagauccugccuguguccaugaccaagaccagcguggacugcaccauguacaucugcggcgauuccaccgagugcuccaaccugcugcugcaguacggcagcuucugcacccagcugaauagagcccugacagggaucgccguggaacaggacaagaacacccaagagguguucgcccaagugaagcagaucuacaagaccccuccuaucaaggacuucggcggcuucaauuucagccagauucugcccgauccuagcaagcccagcaagcggagcuucaucgaggaccugcuguucaacaaagugacacuggccgacgccggcuucaucaagcaguauggcgauugucugggcgacauugccgccagggaucugauuugcgcccagaaguuuaacggacugacagugcugccuccucugcugaccgaugagaugaucgcccaguacacaucugcccugcuggccggcacaaucacaagcggcuggacauuuggagcaggcgccgcucugcagauccccuuugcuaugcagauggccuaccgguucaacggcaucggagugacccagaaugugcuguacgagaaccagaagcugaucgccaaccaguucaacagcgccaucggcaagauccaggacagccugagcagcacagcaagcgcccugggaaagcugcaggacguggucaaccagaaugcccaggcacugaacacccuggucaagcagcuguccuccaacuucggcgccaucagcucugugcugaacgauauccugagcagacuggacccuccugaggccgaggugcagaucgacagacugaucacaggcagacugcagagccuccagacauacgugacccagcagcugaucagagccgccgagauuagagccucugccaaucuggccgccaccaagaugucugagugugugcugggccagagcaagagaguggacuuuugcggcaagggcuaccaccugaugagcuucccucagucugccccucacggcgugguguuucugcacgugacauaugugcccgcucaagagaagaauuucaccaccgcuccagccaucugccacgacggcaaagcccacuuuccuagagaaggcguguucguguccaacggcacccauugguucgugacacagcggaacuucuacgagccccagaucaucaccaccgacaacaccuucgugucuggcaacugcgacgucgugaucggcauugugaacaauaccguguacgacccucugcagcccgagcuggacagcuucaaagaggaacuggacaaguacuuuaagaaccacacaagccccgacguggaccugggcgauaucagcggaaucaaugccagcgucgugaacauccagaaagagaucgaccggcugaacgagguggccaagaaucugaacgagagccugaucgaccugcaagaacuggggaaguacgagcaguacaucaaguggcccugguacaucuggcugggcuuuaucgccggacugauugccaucgugauggucacaaucaugcuguguugcaugaccagcugcuguagcugccugaagggcuguuguagcuguggcagcugcugcaaguucgacgaggacgauucugagcccgugcugaagggcgugaaacugcacuacacaugaggacuaguguccaccugucccuccugggcugcuggauugucucguuuuccugccaaauaaacaggaucagcgcuuuacagaucucaaaggcucuuuucagagccaccaaaaaaaaaaaaaaaaaaaaaaaaaaaaaaaaaaaaaaaaaaaaaaaaaaaaaaaaaaaaaaaaaaaaaaaaaaaaaaaaaaaaaaaaaaaaaaaaaaaaa

SEQ ID NO: 24061 - RNA, 4120 nt, Artificial Sequence
  SARS-CoV-2/Wuhan/WIV05/2019__EPI_ISL_402128 spike protein mRNA gc mod (1-1273)(K986P_V987P_K986P_V987P_L18F_D80A_D215G_L242del_A243del_ L244del_R246I_K417N_E484K_N501Y_D614G_A701V)
aggagacccgugacccggaaguuguacggcuacgcgacuuucccucccacaaacccucgcgcccuuccuuuccuacuugggcccggcagaaagcuuaccauguucguguuccuggugcugcugccucugguguccagccagugugugaacuucaccaccagaacacagcugccuccagccuacaccaacagcuuuaccagaggcguguacuaccccgacaagguguucagauccagcgugcugcacucuacccaggaccuguuccugccuuucuucagcaacgugaccugguuccacgccauccacguguccggcaccaauggcaccaagagauucgccaaccccgugcugcccuucaacgacgggguguacuuugccagcaccgagaaguccaacaucaucagaggcuggaucuucggcaccacacuggacagcaagacccagagccugcugaucgugaacaacgccaccaacguggucaucaaagugugcgaguuccaguucugcaacgaccccuuccugggcgucuacuaccacaagaacaacaagagcuggauggaaagcgaguuccggguguacagcagcgccaacaacugcaccuucgaguacgugucccagccuuuccugauggaccuggaaggcaagcagggcaacuucaagaaccugcgcgaguucguguuuaagaacaucgacggcuacuucaagaucuacagcaagcacaccccuaucaaccucgugcggggccugccucagggcuucucugcucuggaaccccugguggaucugcccaucggcaucaacaucacccgguuucagacacugcacaucagcuaccugacaccuggcgauagcagcagcggauggacagcuggugccgccgcuuacuaugugggcuaccugcagccuagaaccuuccugcugaaguacaacgagaacggcaccaucaccgacgccguggauugugcucuggauccucugagcgagacaaagugcacccugaaguccuucaccguggaaaagggcaucuaccagaccagcaacuuccgggugcagcccaccgaauccaucgugcgguuccccaauaucaccaaucugugccccuucggcgagguguucaaugccaccagauucgccucuguguacgccuggaaccggaagcggaucagcaauugcguggccgacuacuccgugcuguacaacuccgccagcuucagcaccuucaagugcuacggcguguccccuaccaagcugaacgaccugugcuucacaaacguguacgccgacagcuucgugauccggggagaugaagugcggcagauugccccuggacagacaggcaacaucgccgacuacaacuacaagcugcccgacgacuucaccggcugugugauugccuggaacagcaacaaccuggacuccaaagucggcggcaacuacaauuaccuguaccggcuguuccggaaguccaaucugaagcccuucgagcgggacaucuccaccgagaucuaucaggccggcagcaccccuuguaacggcgugaagggcuucaacugcuacuucccacugcaguccuacggcuuucagcccacauacggcgugggcuaucagcccuacagagugguggugcugagcuucgaacugcugcaugccccugccacagugugcggcccuaagaaaagcaccaaucucgugaagaacaaaugcgugaacuucaacuucaacggccugaccggcaccggcgugcugacagagagcaacaagaaguuccugccauuccagcaguuuggccgggauaucgccgauaccacagacgccguuagagauccccagacacuggaaauccuggacaucaccccuugcagcuucggcggagugucugugaucaccccuggcaccaacaccagcaaucagguggcagugcuguaccagggcgugaacuguaccgaagugcccguggccauucacgccgaucagcugacaccuacauggcggguguacuccaccggcagcaauguguuucagaccagagccggcugucugaucggagccgagcacgugaacaauagcuacgagugcgacauccccaucggcgcuggaaucugcgccagcuaccagacacagacaaacagcccucggagagccagaagcguggccagccagagcaucauugccuacacaaugucucugggcguggagaacagcguggccuacuccaacaacucuaucgcuauccccaccaacuucaccaucagcgugaccacagagauccugccuguguccaugaccaagaccagcguggacugcaccauguacaucugcggcgauuccaccgagugcuccaaccugcugcugcaguacggcagcuucugcacccagcugaauagagcccugacagggaucgccguggaacaggacaagaacacccaagagguguucgcccaagugaagcagaucuacaagaccccuccuaucaaggacuucggcggcuucaauuucagccagauucugcccgauccuagcaagcccagcaagcggagcuucaucgaggaccugcuguucaacaaagugacacuggccgacgccggcuucaucaagcaguauggcgauugucugggcgacauugccgccagggaucugauuugcgcccagaaguuuaacggacugacagugcugccuccucugcugaccgaugagaugaucgcccaguacacaucugcccugcuggccggcacaaucacaagcggcuggacauuuggagcaggcgccgcucugcagauccccuuugcuaugcagauggccuaccgguucaacggcaucggagugacccagaaugugcuguacgagaaccagaagcugaucgccaaccaguucaacagcgccaucggcaagauccaggacagccugagcagcacagcaagcgcccugggaaagcugcaggacguggucaaccagaaugcccaggcacugaacacccuggucaagcagcuguccuccaacuucggcgccaucagcucugugcugaacgauauccugagcagacuggacccuccugaggccgaggugcagaucgacagacugaucacaggcagacugcagagccuccagacauacgugacccagcagcugaucagagccgccgagauuagagccucugccaaucuggccgccaccaagaugucugagugugugcugggccagagcaagagaguggacuuuugcggcaagggcuaccaccugaugagcuucccucagucugccccucacggcgugguguuucugcacgugacauaugugcccgcucaagagaagaauuucaccaccgcuccagccaucugccacgacggcaaagcccacuuuccuagagaaggcguguucguguccaacggcacccauugguucgugacacagcggaacuucuacgagccccagaucaucaccaccgacaacaccuucgugucuggcaacugcgacgucgugaucggcauugugaacaauaccguguacgacccucugcagcccgagcuggacagcuucaaagaggaacuggacaaguacuuuaagaaccacacaagccccgacguggaccugggcgauaucagcggaaucaaugccagcgucgugaacauccagaaagagaucgaccggcugaacgagguggccaagaaucugaacgagagccugaucgaccugcaagaacuggggaaguacgagcaguacaucaaguggcccugguacaucuggcugggcuuuaucgccggacugauugccaucgugauggucacaaucaugcuguguugcaugaccagcugcuguagcugccugaagggcuguuguagcuguggcagcugcugcaaguucgacgaggacgauucugagcccgugcugaagggcgugaaacugcacuacacaugaggacuaguguccaccugucccuccugggcugcuggauugucucguuuuccugccaaauaaacaggaucagcgcuuuacagaucucaaaggcucuuuucagagccaccaaaaaaaaaaaaaaaaaaaaaaaaaaaaaaaaaaaaaaaaaaaaaaaaaaaaaaaaaaaaaaaaaaaaaaaaaaaaaaaaaaaaaaaaaaaaaaaaaaaaa

SEQ ID NO: 24062 - RNA, 4129 nt, Artificial Sequence
  SARS-CoV-2/Wuhan/WIV05/2019__EPI_ISL_402128 spike protein mRNA gc mod (1-1273)(K986P_V987P_K986P_V987P_E484K_D614G)
aggagacccgugacccggaaguuguacggcuacgcgacuuucccucccacaaacccucgcgcccuuccuuuccuacuugggcccggcagaaagcuuaccauguucguguuccuggugcugcugccucugguguccagccagugugugaaccugaccaccagaacacagcugccuccagccuacaccaacagcuuuaccagaggcguguacuaccccgacaagguguucagauccagcgugcugcacucuacccaggaccuguuccugccuuucuucagcaacgugaccugguuccacgccauccacguguccggcaccaauggcaccaagagauucgacaaccccgugcugcccuucaacgacgggguguacuuugccagcaccgagaaguccaacaucaucagaggcuggaucuucggcaccacacuggacagcaagacccagagccugcugaucgugaacaacgccaccaacguggucaucaaagugugcgaguuccaguucugcaacgaccccuuccugggcgucuacuaccacaagaacaacaagagcuggauggaaagcgaguuccggguguacagcagcgccaacaacugcaccuucgaguacgugucccagccuuuccugauggaccuggaaggcaagcagggcaacuucaagaaccugcgcgaguucguguuuaagaacaucgacggcuacuucaagaucuacagcaagcacaccccuaucaaccucgugcgggaucugccucagggcuucucugcucuggaaccccugguggaucugcccaucggcaucaacaucacccgguuucagacacugcuggcccugcacagaagcuaccugacaccuggcgauagcagcagcggauggacagcuggugccgccgcuuacuaugugggcuaccugcagccuagaaccuuccugcugaaguacaacgagaacggcaccaucaccgacgccguggauugugcucuggauccucugagcgagacaaagugcacccugaaguccuucaccguggaaaagggcaucuaccagaccagcaacuuccgggugcagcccaccgaauccaucgugcgguuccccaauaucaccaaucugugccccuucggcgagguguucaaugccaccagauucgccucuguguacgccuggaaccggaagcggaucagcaauugcguggccgacuacuccgugcuguacaacuccgccagcuucagcaccuucaagugcuacggcguguccccuaccaagcugaacgaccugugcuucacaaacguguacgccgacagcuucgugauccggggagaugaagugcggcagauugccccuggacagacaggcaagaucgccgacuacaacuacaagcugcccgacgacuucaccggcugugugauugccuggaacagcaacaaccuggacuccaaagucggcggcaacuacaauuaccuguaccggcuguuccggaaguccaaucugaagcccuucgagcgggacaucuccaccgagaucuaucaggccggcagcaccccuuguaacggcgugaagggcuucaacugcuacuucccacugcaguccuacggcuuucagcccacaaauggcgugggcuaucagcccuacagagugguggugcugagcuucgaacugcugcaugccccugccacagugugcggcccuaagaaaagcaccaaucucgugaagaacaaaugcgugaacuucaacuucaacggccugaccggcaccggcgugcugacagagagcaacaagaaguuccugccauuccagcaguuuggccgggauaucgccgauaccacagacgccguuagagauccccagacacuggaaauccuggacaucaccccuugcagcuucggcggagugucugugaucaccccuggcaccaacaccagcaaucagguggcagugcuguaccagggcgugaacuguaccgaagugcccguggccauucacgccgaucagcugacaccuacauggcggguguacuccaccggcagcaauguguuucagaccagagccggcugucugaucggagccgagcacgugaacaauagcuacgagugcgacauccccaucggcgcuggaaucugcgccagcuaccagacacagacaaacagcccucggagagccagaagcguggccagccagagcaucauugccuacacaaugucucugggcgccgagaacagcguggccuacuccaacaacucuaucgcuauccccaccaacuucaccaucagcgugaccacagagauccugccuguguccaugaccaagaccagcguggacugcaccauguacaucugcggcgauuccaccgagugcuccaaccugcugcugcaguacggcagcuucugcacccagcugaauagagcccugacagggaucgccguggaacaggacaagaacacccaagagguguucgcccaagugaagcagaucuacaagaccccuccuaucaaggacuucggcggcuucaauuucagccagauucugcccgauccuagcaagcccagcaagcggagcuucaucgaggaccugcuguucaacaaagugacacuggccgacgccggcuucaucaagcaguauggcgauugucugggcgacauugccgccagggaucugauuugcgcccagaaguuuaacggacugacagugcugccuccucugcugaccgaugagaugaucgcccaguacacaucugcccugcuggccggcacaaucacaagcggcuggacauuuggagcaggcgccgcucugcagauccccuuugcuaugcagauggccuaccgguucaacggcaucggagugacccagaaugugcuguacgagaaccagaagcugaucgccaaccaguucaacagcgccaucggcaagauccaggacagccugagcagcacagcaagcgcccugggaaagcugcaggacguggucaaccagaaugcccaggcacugaacacccuggucaagcagcuguccuccaacuucggcgccaucagcucugugcugaacgauauccugagcagacuggacccuccugaggccgaggugcagaucgacagacugaucacaggcagacugcagagccuccagacauacgugacccagcagcugaucagagccgccgagauuagagccucugccaaucuggccgccaccaagaugucugagugugugcugggccagagcaagagaguggacuuuugcggcaagggcuaccaccugaugagcuucccucagucugccccucacggcgugguguuucugcacgugacauaugugcccgcucaagagaagaauuucaccaccgcuccagccaucugccacgacggcaaagcccacuuuccuagagaaggcguguucguguccaacggcacccauugguucgugacacagcggaacuucuacgagccccagaucaucaccaccgacaacaccuucgugucuggcaacugcgacgucgugaucggcauugugaacaauaccguguacgacccucugcagcccgagcuggacagcuucaaagaggaacuggacaaguacuuuaagaaccacacaagccccgacguggaccugggcgauaucagcggaaucaaugccagcgucgugaacauccagaaagagaucgaccggcugaacgagguggccaagaaucugaacgagagccugaucgaccugcaagaacuggggaaguacgagcaguacaucaaguggcccugguacaucuggcugggcuuuaucgccggacugauugccaucgugauggucacaaucaugcuguguugcaugaccagcugcuguagcugccugaagggcuguuguagcuguggcagcugcugcaaguucgacgaggacgauucugagcccgugcugaagggcgugaaacugcacuacacaugaggacuaguguccaccugucccuccugggcugcuggauugucucguuuuccugccaaauaaacaggaucagcgcuuuacagaucucaaaggcucuuuucagagccaccaaaaaaaaaaaaaaaaaaaaaaaaaaaaaaaaaaaaaaaaaaaaaaaaaaaaaaaaaaaaaaaaaaaaaaaaaaaaaaaaaaaaaaaaaaaaaaaaaaaaa

SEQ ID NO: 24063 - RNA, 4129 nt, Artificial Sequence
  SARS-CoV-2/Wuhan/WIV05/2019__EPI_ISL_402128 spike protein mRNA gc mod (1-1273)(K986P_V987P_K986P_V987P_L18F_T20N_P26S_D138Y_R190S_K417T _E484K_N501Y_D614G_H655Y_T1027I)
aggagacccgugacccggaaguuguacggcuacgcgacuuucccucccacaaacccucgcgcccuuccuuuccuacuugggcccggcagaaagcuuaccauguucguguuccuggugcugcugccucugguguccagccagugugugaacuucaccaacagaacacagcugccuagcgccuacaccaacagcuuuaccagaggcguguacuaccccgacaagguguucagauccagcgugcugcacucuacccaggaccuguuccugccuuucuucagcaacgugaccugguuccacgccauccacguguccggcaccaauggcaccaagagauucgacaaccccgugcugcccuucaacgacgggguguacuuugccagcaccgagaaguccaacaucaucagaggcuggaucuucggcaccacacuggacagcaagacccagagccugcugaucgugaacaacgccaccaacguggucaucaaagugugcgaguuccaguucugcaacuaccccuuccugggcgucuacuaccacaagaacaacaagagcuggauggaaagcgaguuccggguguacagcagcgccaacaacugcaccuucgaguacgugucccagccuuuccugauggaccuggaaggcaagcagggcaacuucaagaaccugagcgaguucguguuuaagaacaucgacggcuacuucaagaucuacagcaagcacaccccuaucaaccucgugcgggaucugccucagggcuucucugcucuggaaccccugguggaucugcccaucggcaucaacaucacccgguuucagacacugcuggcccugcacagaagcuaccugacaccuggcgauagcagcagcggauggacagcuggugccgccgcuuacuaugugggcuaccugcagccuagaaccuuccugcugaaguacaacgagaacggcaccaucaccgacgccguggauugugcucuggauccucugagcgagacaaagugcacccugaaguccuucaccguggaaaagggcaucuaccagaccagcaacuuccgggugcagcccaccgaauccaucgugcgguuccccaauaucaccaaucugugccccuucggcgagguguucaaugccaccagauucgccucuguguacgccuggaaccggaagcggaucagcaauugcguggccgacuacuccgugcuguacaacuccgccagcuucagcaccuucaagugcuacggcguguccccuaccaagcugaacgaccugugcuucacaaacguguacgccgacagcuucgugauccggggagaugaagugcggcagauugccccuggacagacaggcaccaucgccgacuacaacuacaagcugcccgacgacuucaccggcugugugauugccuggaacagcaacaaccuggacuccaaagucggcggcaacuacaauuaccuguaccggcuguuccggaaguccaaucugaagcccuucgagcgggacaucuccaccgagaucuaucaggccggcagcaccccuuguaacggcgugaagggcuucaacugcuacuucccacugcaguccuacggcuuucagcccacauacggcgugggcuaucagcccuacagagugguggugcugagcuucgaacugcugcaugccccugccacagugugcggcccuaagaaaagcaccaaucucgugaagaacaaaugcgugaacuucaacuucaacggccugaccggcaccggcgugcugacagagagcaacaagaaguuccugccauuccagcaguuuggccgggauaucgccgauaccacagacgccguuagagauccccagacacuggaaauccuggacaucaccccuugcagcuucggcggagugucugugaucaccccuggcaccaacaccagcaaucagguggcagugcuguaccagggcgugaacuguaccgaagugcccguggccauucacgccgaucagcugacaccuacauggcggguguacuccaccggcagcaauguguuucagaccagagccggcugucugaucggagccgaguacgugaacaauagcuacgagugcgacauccccaucggcgcuggaaucugcgccagcuaccagacacagacaaacagcccucggagagccagaagcguggccagccagagcaucauugccuacacaaugucucugggcgccgagaacagcguggccuacuccaacaacucuaucgcuauccccaccaacuucaccaucagcgugaccacagagauccugccuguguccaugaccaagaccagcguggacugcaccauguacaucugcggcgauuccaccgagugcuccaaccugcugcugcaguacggcagcuucugcacccagcugaauagagcccugacagggaucgccguggaacaggacaagaacacccaagagguguucgcccaagugaagcagaucuacaagaccccuccuaucaaggacuucggcggcuucaauuucagccagauucugcccgauccuagcaagcccagcaagcggagcuucaucgaggaccugcuguucaacaaagugacacuggccgacgccggcuucaucaagcaguauggcgauugucugggcgacauugccgccagggaucugauuugcgcccagaaguuuaacggacugacagugcugccuccucugcugaccgaugagaugaucgcccaguacacaucugcccugcuggccggcacaaucacaagcggcuggacauuuggagcaggcgccgcucugcagauccccuuugcuaugcagauggccuaccgguucaacggcaucggagugacccagaaugugcuguacgagaaccagaagcugaucgccaaccaguucaacagcgccaucggcaagauccaggacagccugagcagcacagcaagcgcccugggaaagcugcaggacguggucaaccagaaugcccaggcacugaacacccuggucaagcagcuguccuccaacuucggcgccaucagcucugugcugaacgauauccugagcagacuggacccuccugaggccgaggugcagaucgacagacugaucacaggcagacugcagagccuccagacauacgugacccagcagcugaucagagccgccgagauuagagccucugccaaucuggccgccaucaagaugucugagugugugcugggccagagcaagagaguggacuuuugcggcaagggcuaccaccugaugagcuucccucagucugccccucacggcgugguguuucugcacgugacauaugugcccgcucaagagaagaauuucaccaccgcuccagccaucugccacgacggcaaagcccacuuuccuagagaaggcguguucguguccaacggcacccauugguucgugacacagcggaacuucuacgagccccagaucaucaccaccgacaacaccuucgugucuggcaacugcgacgucgugaucggcauugugaacaauaccguguacgacccucugcagcccgagcuggacagcuucaaagaggaacuggacaaguacuuuaagaaccacacaagccccgacguggaccugggcgauaucagcggaaucaaugccagcgucgugaacauccagaaagagaucgaccggcugaacgagguggccaagaaucugaacgagagccugaucgaccugcaagaacuggggaaguacgagcaguacaucaaguggcccugguacaucuggcugggcuuuaucgccggacugauugccaucgugauggucacaaucaugcuguguugcaugaccagcugcuguagcugccugaagggcuguuguagcuguggcagcugcugcaaguucgacgaggacgauucugagcccgugcugaagggcgugaaacugcacuacacaugaggacuaguguccaccugucccuccugggcugcuggauugucucguuuuccugccaaauaaacaggaucagcgcuuuacagaucucaaaggcucuuuucagagccaccaaaaaaaaaaaaaaaaaaaaaaaaaaaaaaaaaaaaaaaaaaaaaaaaaaaaaaaaaaaaaaaaaaaaaaaaaaaaaaaaaaaaaaaaaaaaaaaaaaaaa

SEQ ID NO: 24064 - RNA, 4129 nt, Artificial Sequence
  SARS-CoV-2/Wuhan/WIV05/2019__EPI_ISL_402128 spike protein mRNA gc mod (1-1273)(K986P_V987P_K986P_V987P_S13I_W152C_L452R_D614G)
aggagacccgugacccggaaguuguacggcuacgcgacuuucccucccacaaacccucgcgcccuuccuuuccuacuugggcccggcagaaagcuuaccauguucguguuccuggugcugcugccucugguguccauccagugugugaaccugaccaccagaacacagcugccuccagccuacaccaacagcuuuaccagaggcguguacuaccccgacaagguguucagauccagcgugcugcacucuacccaggaccuguuccugccuuucuucagcaacgugaccugguuccacgccauccacguguccggcaccaauggcaccaagagauucgacaaccccgugcugcccuucaacgacgggguguacuuugccagcaccgagaaguccaacaucaucagaggcuggaucuucggcaccacacuggacagcaagacccagagccugcugaucgugaacaacgccaccaacguggucaucaaagugugcgaguuccaguucugcaacgaccccuuccugggcgucuacuaccacaagaacaacaagagcugcauggaaagcgaguuccggguguacagcagcgccaacaacugcaccuucgaguacgugucccagccuuuccugauggaccuggaaggcaagcagggcaacuucaagaaccugcgcgaguucguguuuaagaacaucgacggcuacuucaagaucuacagcaagcacaccccuaucaaccucgugcgggaucugccucagggcuucucugcucuggaaccccugguggaucugcccaucggcaucaacaucacccgguuucagacacugcuggcccugcacagaagcuaccugacaccuggcgauagcagcagcggauggacagcuggugccgccgcuuacuaugugggcuaccugcagccuagaaccuuccugcugaaguacaacgagaacggcaccaucaccgacgccguggauugugcucuggauccucugagcgagacaaagugcacccugaaguccuucaccguggaaaagggcaucuaccagaccagcaacuuccgggugcagcccaccgaauccaucgugcgguuccccaauaucaccaaucugugccccuucggcgagguguucaaugccaccagauucgccucuguguacgccuggaaccggaagcggaucagcaauugcguggccgacuacuccgugcuguacaacuccgccagcuucagcaccuucaagugcuacggcguguccccuaccaagcugaacgaccugugcuucacaaacguguacgccgacagcuucgugauccggggagaugaagugcggcagauugccccuggacagacaggcaagaucgccgacuacaacuacaagcugcccgacgacuucaccggcugugugauugccuggaacagcaacaaccuggacuccaaagucggcggcaacuacaauuaccgcuaccggcuguuccggaaguccaaucugaagcccuucgagcgggacaucuccaccgagaucuaucaggccggcagcaccccuuguaacggcguggaaggcuucaacugcuacuucccacugcaguccuacggcuuucagcccacaaauggcgugggcuaucagcccuacagagugguggugcugagcuucgaacugcugcaugccccugccacagugugcggcccuaagaaaagcaccaaucucgugaagaacaaaugcgugaacuucaacuucaacggccugaccggcaccggcgugcugacagagagcaacaagaaguuccugccauuccagcaguuuggccgggauaucgccgauaccacagacgccguuagagauccccagacacuggaaauccuggacaucaccccuugcagcuucggcggagugucugugaucaccccuggcaccaacaccagcaaucagguggcagugcuguaccagggcgugaacuguaccgaagugcccguggccauucacgccgaucagcugacaccuacauggcggguguacuccaccggcagcaauguguuucagaccagagccggcugucugaucggagccgagcacgugaacaauagcuacgagugcgacauccccaucggcgcuggaaucugcgccagcuaccagacacagacaaacagcccucggagagccagaagcguggccagccagagcaucauugccuacacaaugucucugggcgccgagaacagcguggccuacuccaacaacucuaucgcuauccccaccaacuucaccaucagcgugaccacagagauccugccuguguccaugaccaagaccagcguggacugcaccauguacaucugcggcgauuccaccgagugcuccaaccugcugcugcaguacggcagcuucugcacccagcugaauagagcccugacagggaucgccguggaacaggacaagaacacccaagagguguucgcccaagugaagcagaucuacaagaccccuccuaucaaggacuucggcggcuucaauuucagccagauucugcccgauccuagcaagcccagcaagcggagcuucaucgaggaccugcuguucaacaaagugacacuggccgacgccggcuucaucaagcaguauggcgauugucugggcgacauugccgccagggaucugauuugcgcccagaaguuuaacggacugacagugcugccuccucugcugaccgaugagaugaucgcccaguacacaucugcccugcuggccggcacaaucacaagcggcuggacauuuggagcaggcgccgcucugcagauccccuuugcuaugcagauggccuaccgguucaacggcaucggagugacccagaaugugcuguacgagaaccagaagcugaucgccaaccaguucaacagcgccaucggcaagauccaggacagccugagcagcacagcaagcgcccugggaaagcugcaggacguggucaaccagaaugcccaggcacugaacacccuggucaagcagcuguccuccaacuucggcgccaucagcucugugcugaacgauauccugagcagacuggacccuccugaggccgaggugcagaucgacagacugaucacaggcagacugcagagccuccagacauacgugacccagcagcugaucagagccgccgagauuagagccucugccaaucuggccgccaccaagaugucugagugugugcugggccagagcaagagaguggacuuuugcggcaagggcuaccaccugaugagcuucccucagucugccccucacggcgugguguuucugcacgugacauaugugcccgcucaagagaagaauuucaccaccgcuccagccaucugccacgacggcaaagcccacuuuccuagagaaggcguguucguguccaacggcacccauugguucgugacacagcggaacuucuacgagccccagaucaucaccaccgacaacaccuucgugucuggcaacugcgacgucgugaucggcauugugaacaauaccguguacgacccucugcagcccgagcuggacagcuucaaagaggaacuggacaaguacuuuaagaaccacacaagccccgacguggaccugggcgauaucagcggaaucaaugccagcgucgugaacauccagaaagagaucgaccggcugaacgagguggccaagaaucugaacgagagccugaucgaccugcaagaacuggggaaguacgagcaguacaucaaguggcccugguacaucuggcugggcuuuaucgccggacugauugccaucgugauggucacaaucaugcuguguugcaugaccagcugcuguagcugccugaagggcuguuguagcuguggcagcugcugcaaguucgacgaggacgauucugagcccgugcugaagggcgugaaacugcacuacacaugaggacuaguguccaccugucccuccugggcugcuggauugucucguuuuccugccaaauaaacaggaucagcgcuuuacagaucucaaaggcucuuuucagagccaccaaaaaaaaaaaaaaaaaaaaaaaaaaaaaaaaaaaaaaaaaaaaaaaaaaaaaaaaaaaaaaaaaaaaaaaaaaaaaaaaaaaaaaaaaaaaaaaaaaaaa

SEQ ID NO: 24065 - RNA, 1365 nt, Artificial Sequence
  SARS-CoV-2/Wuhan/WIV05/2019__EPI_ISL_402128 spike protein mRNA gc (1-15,334-528) Ferritin construct
aggagaaagcuuaccauguucguguuccugguccuccugccccuggugagcucccagugcaaccugugccccuucggcgagguguucaacgccacccgguucgccagcgucuacgccuggaaccgcaagcggaucuccaacugcguggcggacuacagcgugcuguacaacuccgccagcuucuccacguucaagugcuacggcgucagccccaccaagcucaacgaccugugcuucaccaacguguacgccgacuccuucgugauccgcggggacgagguccggcagaucgcccccggccagaccgggaagaucgccgacuacaacuacaagcugccggacgacuucacgggcugcgugaucgcguggaacagcaacaaccucgacuccaaggucgggggcaacuacaacuaccuguaccgccuguuccgcaagagcaaccucaagcccuucgagcgggacaucuccaccgagaucuaccaggccggcagcacccccugcaacgggguggagggcuucaacugcuacuucccccugcaguccuacggguuccagccgaccaacggcgugggguaccagcccuaccggguggucgugcugagcuucgagcuccugcacgcccccgccacggugugcggccccaagggcggggguggaagcggcggggguggaagugacaucaucaagcuccugaacgagcaggucaacaaggagaugcaguccagcaaccuguacauguccaugagcuccuggugcuacacccacagccucgacggcgccgggcuguuccuguucgaccacgccgcggaggaguacgagcacgccaagaagcucaucaucuuccugaacgagaacaacgugcccgugcagcugaccuccaucagcgccccggagcacaaguucgagggccucacgcagaucuuccagaaggccuacgagcacgagcagcacaucuccgagagcaucaacaacaucguggaccacgccaucaaguccaaggaccacgcgaccuucaacuuccugcagugguacgucgccgagcagcacgaggaggaggugcuguucaaggacauccucgacaagaucgagcugaucgggaacgagaaccacggccuguaccucgccgaccaguacgugaaggggaucgccaagagccgcaaguccugaggacuaguuauaagacugacuagcccgaugggccucccaacgggcccuccuccccuccuugcaccgagauuaaucaaaggcucuuuucagagccaccaaaaaaaaaaaaaaaaaaaaaaaaaaaaaaaaaaaaaaaaaaaaaaaaaaaaaaaaaaaaaaaaaaaaaaaaaaaaaaaaaaaaaaaaaaaaaaaaaaaaa

SEQ ID NO: 24066 - RNA, 963 nt, Artificial Sequence
  SARS-CoV-2/Wuhan/WIV05/2019__EPI_ISL_402128 spike protein mRNA gc (334-528) Foldon construct
aggagaaagcuuaccaugcccaugggcagccugcagccgcucgccacccuguaccugcucgggaugcugguggccuccguccuggcgaaccugugccccuucggcgagguguucaacgccacccgguucgccagcgucuacgccuggaaccgcaagcggaucuccaacugcguggcggacuacagcgugcuguacaacuccgccagcuucuccacguucaagugcuacggcgucagccccaccaagcucaacgaccugugcuucaccaacguguacgccgacuccuucgugauccgcggggacgagguccggcagaucgcccccggccagaccgggaagaucgccgacuacaacuacaagcugccggacgacuucacgggcugcgugaucgcguggaacagcaacaaccucgacuccaaggucgggggcaacuacaacuaccuguaccgccuguuccgcaagagcaaccucaagcccuucgagcgggacaucuccaccgagaucuaccaggccggcagcacccccugcaacgggguggagggcuucaacugcuacuucccccugcaguccuacggguuccagccgaccaacggcgugggguaccagcccuaccggguggucgugcugagcuucgagcuccugcacgcccccgccacggugugcggccccaagggcagcggcggguacauccccgaggccccgcgcgacggccaggccuacgugcggaaggacggcgaguggguccugcugagcaccuuccucugaggacuaguuauaagacugacuagcccgaugggccucccaacgggcccuccuccccuccuugcaccgagauuaaucaaaggcucuuuucagagccaccaaaaaaaaaaaaaaaaaaaaaaaaaaaaaaaaaaaaaaaaaaaaaaaaaaaaaaaaaaaaaaaaaaaaaaaaaaaaaaaaaaaaaaaaaaaaaaaaaaaaa

SEQ ID NO: 24067 - RNA, 1341 nt, Artificial Sequence
  SARS-CoV-2/Wuhan/WIV05/2019__EPI_ISL_402128 spike protein mRNA gc (1-15,334-528) LumSynth construct
aggagaaagcuuaccauguucguguuccugguccuccugccccuggugagcucccagugcaaccugugccccuucggcgagguguucaacgccacccgguucgccagcgucuacgccuggaaccgcaagcggaucuccaacugcguggcggacuacagcgugcuguacaacuccgccagcuucuccacguucaagugcuacggcgucagccccaccaagcucaacgaccugugcuucaccaacguguacgccgacuccuucgugauccgcggggacgagguccggcagaucgcccccggccagaccgggaagaucgccgacuacaacuacaagcugccggacgacuucacgggcugcgugaucgcguggaacagcaacaaccucgacuccaaggucgggggcaacuacaacuaccuguaccgccuguuccgcaagagcaaccucaagcccuucgagcgggacaucuccaccgagaucuaccaggccggcagcacccccugcaacgggguggagggcuucaacugcuacuucccccugcaguccuacggguuccagccgaccaacggcgugggguaccagcccuaccggguggucgugcugagcuucgagcuccugcacgcccccgccacggugugcggccccaagggcggcggcggcuccggaggcggagguagcgggggacagaucuacgagggcaagcugaccgccgaggggcuccgcuucggcaucguggccagccgguucaaccacgcgcuggucgaccgccugguggagggggccaucgacgccaucgugcggcacggcgggcgcgaggaggacaucacccucguccgggugcccggcuccugggagaucccgguggccgccggcgagcuggcccgcaaggaggacaucgacgcggucaucgccaucggggugcugauccggggcgccacgccccacuucgacuacaucgccagcgagguguccaaggggcucgcggaccugagccuggagcuccgcaagcccaucaccuucggcgucaucaccgccgacacccuggagcaggccaucgagcgggccgggacgaagcacggcaacaagggcugggaggccgcgcuguccgccaucgagauggccaaccucuucaagagccugcgcugaggacuaguuauaagacugacuagcccgaugggccucccaacgggcccuccuccccuccuugcaccgagauuaaucaaaggcucuuuucagagccaccaaaaaaaaaaaaaaaaaaaaaaaaaaaaaaaaaaaaaaaaaaaaaaaaaaaaaaaaaaaaaaaaaaaaaaaaaaaaaaaaaaaaaaaaaaaaaaaaaaaaa

SEQ ID NO: 24068 - RNA, 1302 nt, Artificial Sequence
  SARS-CoV-2/Wuhan/WIV05/2019__EPI_ISL_402128 spike protein mRNA gc (334-528) LumSynth construct
aggagaaagcuuaccaugcagaucuacgagggcaagcugaccgccgaggggcuccgcuucggcaucguggccagccgguucaaccacgcgcuggucgaccgccugguggagggggccaucgacgccaucgugcggcacggcgggcgcgaggaggacaucacccucguccgggugcccggcuccugggagaucccgguggccgccggcgagcuggcccgcaaggaggacaucgacgcggucaucgccaucggggugcugauccggggcgccacgccccacuucgacuacaucgccagcgagguguccaaggggcucgcggaccugagccuggagcuccgcaagcccaucaccuucggcgucaucaccgccgacacccuggagcaggccaucgagcgggccgggacgaagcacggcaacaagggcugggaggccgcgcuguccgccaucgagauggccaaccucuucaagagccugcgcggcgggggcgggagcggcgggggcggcuccgggggcgggaaccugugccccuucggcgagguguucaacgccacccgguucgccagcgucuacgccuggaaccgcaagcggaucuccaacugcguggcggacuacagcgugcuguacaacuccgccagcuucuccacguucaagugcuacggcgucagccccaccaagcucaacgaccugugcuucaccaacguguacgccgacuccuucgugauccgcggggacgagguccggcagaucgcccccggccagaccgggaagaucgccgacuacaacuacaagcugccggacgacuucacgggcugcgugaucgcguggaacagcaacaaccucgacuccaaggucgggggcaacuacaacuaccuguaccgccuguuccgcaagagcaaccucaagcccuucgagcgggacaucuccaccgagaucuaccaggccggcagcacccccugcaacgggguggagggcuucaacugcuacuucccccugcaguccuacggguuccagccgaccaacggcgugggguaccagcccuaccggguggucgugcugagcuucgagcuccugcacgcccccgccacggugugcggccccaagugaggacuaguuauaagacugacuagcccgaugggccucccaacgggcccuccuccccuccuugcaccgagauuaaucaaaggcucuuuucagagccaccaaaaaaaaaaaaaaaaaaaaaaaaaaaaaaaaaaaaaaaaaaaaaaaaaaaaaaaaaaaaaaaaaaaaaaaaaaaaaaaaaaaaaaaaaaaaaaaaaaaaa

SEQ ID NO: 24069 - RNA, 4035 nt, Artificial Sequence
  SARS-CoV-2/Wuhan/WIV05/2019__EPI_ISL_402128 spike protein mRNA gc (1-1273)
aggagaaagcuuaccauguucguguuccugguccuccugccccuggugagcucccagugcgugaaccucaccacccgcacgcagcugccgcccgccuacaccaacagcuucacccggggcgucuacuaccccgacaagguguuccgcuccagcgugcugcacuccacccaggaccucuuccugcccuucuucagcaacgucacgugguuccacgccauccacguguccgggaccaacggcaccaagcgguucgacaacccggugcugcccuucaacgacggggucuacuucgcgagcaccgagaaguccaacaucauccgcggcuggaucuucgggacgacccucgacagcaagacccagucccugcugaucgugaacaacgccaccaacguggucaucaaggugugcgaguuccaguucugcaacgaccccuuccucggcguguacuaccacaagaacaacaagagcuggauggaguccgaguuccgggucuacagcuccgccaacaacugcacguucgaguacgugagccagcccuuccugauggaccuggagggcaagcaggggaacuucaagaaccuccgcgaguucguguucaagaacaucgacggcuacuucaagaucuacuccaagcacaccccgaucaaccugguccgggaccugccccagggguucagcgcccucgagccccugguggaccugcccaucggcaucaacaucacccgcuuccagacccuccuggcccugcaccgguccuaccucacgccgggggacagcagcuccggcuggaccgcgggcgccgccgccuacuacgugggguaccugcagccccgcaccuuccugcucaaguacaacgagaacggcaccaucacggacgcggucgacugcgcccuggacccccugagcgagaccaagugcacccucaaguccuucaccguggagaaggggaucuaccagacgagcaacuuccgggugcagcccaccgaguccaucguccgcuucccgaacaucaccaaccugugccccuucggcgagguguucaacgccacccgguucgccagcgucuacgccuggaaccgcaagcggaucuccaacugcguggcggacuacagcgugcuguacaacuccgccagcuucuccacguucaagugcuacggcgucagccccaccaagcucaacgaccugugcuucaccaacguguacgccgacuccuucgugauccgcggggacgagguccggcagaucgcccccggccagaccgggaagaucgccgacuacaacuacaagcugccggacgacuucacgggcugcgugaucgcguggaacagcaacaaccucgacuccaaggucgggggcaacuacaacuaccuguaccgccuguuccgcaagagcaaccucaagcccuucgagcgggacaucuccaccgagaucuaccaggccggcagcacccccugcaacgggguggagggcuucaacugcuacuucccccugcaguccuacggguuccagccgaccaacggcgugggguaccagcccuaccggguggucgugcugagcuucgagcuccugcacgcccccgccacggugugcggccccaagaaguccaccaaccuggucaagaacaagugcgugaacuucaacuucaacggccucaccgggaccggcgugcugaccgagagcaacaagaaguuccugccguuccagcaguucgggcgcgacaucgccgacacgaccgacgcgguccgcgacccccagacccuggagauccucgacaucacccccugcagcuucggcgggguguccgugaucacgccgggcaccaacaccagcaaccaggucgccgugcuguaccaggacgugaacugcaccgagguccccguggccauccacgccgaccagcugacgcccaccuggcggguguacuccaccggcagcaacgucuuccagacccgcgccgggugccucaucggcgcggagcacgugaacaacuccuacgagugcgacauccccaucggggccggcaucugcgccagcuaccagacgcagaccaacuccccgcggcgcgcccggagcguggcgucccagagcaucaucgccuacaccaugucccugggcgccgagaacagcgucgccuacuccaacaacagcaucgccauccccaccaacuucacgaucuccgugaccaccgagauccugcccgugagcaugaccaagacgagcgucgacugcaccauguacaucugcggggacuccaccgagugcagcaaccuccugcugcaguacggcuccuucugcacccagcucaaccgcgcgcugacggggaucgccguggagcaggacaagaacacccaggagguguucgcccaggucaagcagaucuacaagacgcccccgaucaaggacuucggcggguucaacuucagccagauccugcccgaccccuccaagcccagcaagcgguccuucaucgaggaccuccuguucaacaaggugacccuggccgacgccggcuucaucaagcaguacggcgacugccucggggacaucgcggcccgcgaccugaucugcgcccagaaguucaacggccugaccgugcucccgccccugcugaccgacgagaugaucgcccaguacaccagcgcccuccuggcggggaccaucacguccggcuggaccuucggggccggcgccgcccugcagauccccuucgcgaugcagauggccuaccgguucaacggcaucggggucacccagaacgugcucuacgagaaccagaagcugaucgccaaccaguucaacagcgccaucggcaagauccaggacucccugagcuccaccgccagcgcgcucgggaagcugcaggacguggucaaccagaacgcccaggcccugaacacgcucgugaagcagcuguccagcaacuucggcgccaucuccagcgugcugaacgacauccucucccgccuggacaaggucgaggccgaggugcagaucgaccggcugaucaccgggcgccuccagagccugcagaccuacgugacccagcagcugauccgggcggccgagauccgcgccagcgccaaccucgccgcgaccaagauguccgagugcguccugggccagagcaagcggguggacuucugcggcaagggguaccaccugauguccuucccccagagcgccccgcacggcguggucuuccuccacgugacguacguccccgcccaggagaagaacuucaccaccgcccccgcgaucugccacgacgggaaggcccacuucccccgcgagggcguguucguguccaacgggacccacugguucgucacgcagcggaacuucuacgagccgcagaucaucaccaccgacaacaccuucgugagcggcaacugcgacguggucaucggcaucgugaacaacacgguguacgacccccugcagcccgagcuggacuccuucaaggaggagcucgacaaguacuucaagaaccacaccagccccgacgucgaccugggggacaucuccggcaucaacgccagcguggugaacauccagaaggagaucgaccgccugaacgaggucgccaagaaccucaacgagucccugaucgaccugcaggagcucgggaaguacgagcaguacaucaaguggccgugguacaucuggcugggcuucaucgccggccugaucgcgaucgugauggugaccaucaugcucugcugcaugaccagcugcugcuccugccugaaggggugcugcagcugcggcuccugcugcaaguucgacgaggacgacagcgagcccguccugaagggggugaagcuccacuacacgugaggacuaguuauaagacugacuagcccgaugggccucccaacgggcccuccuccccuccuugcaccgagauuaaucaaaggcucuuuucagagccaccaaaaaaaaaaaaaaaaaaaaaaaaaaaaaaaaaaaaaaaaaaaaaaaaaaaaaaaaaaaaaaaaaaaaaaaaaaaaaaaaaaaaaaaaaaaaaaaaaaaaa

SEQ ID NO: 24070 - RNA, 4035 nt, Artificial Sequence
  SARS-CoV-2/Wuhan/WIV05/2019__EPI_ISL_402128 spike protein mRNA gc (1-1273)(D614G)
aggagaaagcuuaccauguucguguuccugguccuccugccccuggugagcucccagugcgugaaccucaccacccgcacgcagcugccgcccgccuacaccaacagcuucacccggggcgucuacuaccccgacaagguguuccgcuccagcgugcugcacuccacccaggaccucuuccugcccuucuucagcaacgucacgugguuccacgccauccacguguccgggaccaacggcaccaagcgguucgacaacccggugcugcccuucaacgacggggucuacuucgcgagcaccgagaaguccaacaucauccgcggcuggaucuucgggacgacccucgacagcaagacccagucccugcugaucgugaacaacgccaccaacguggucaucaaggugugcgaguuccaguucugcaacgaccccuuccucggcguguacuaccacaagaacaacaagagcuggauggaguccgaguuccgggucuacagcuccgccaacaacugcacguucgaguacgugagccagcccuuccugauggaccuggagggcaagcaggggaacuucaagaaccuccgcgaguucguguucaagaacaucgacggcuacuucaagaucuacuccaagcacaccccgaucaaccugguccgggaccugccccagggguucagcgcccucgagccccugguggaccugcccaucggcaucaacaucacccgcuuccagacccuccuggcccugcaccgguccuaccucacgccgggggacagcagcuccggcuggaccgcgggcgccgccgccuacuacgugggguaccugcagccccgcaccuuccugcucaaguacaacgagaacggcaccaucacggacgcggucgacugcgcccuggacccccugagcgagaccaagugcacccucaaguccuucaccguggagaaggggaucuaccagacgagcaacuuccgggugcagcccaccgaguccaucguccgcuucccgaacaucaccaaccugugccccuucggcgagguguucaacgccacccgguucgccagcgucuacgccuggaaccgcaagcggaucuccaacugcguggcggacuacagcgugcuguacaacuccgccagcuucuccacguucaagugcuacggcgucagccccaccaagcucaacgaccugugcuucaccaacguguacgccgacuccuucgugauccgcggggacgagguccggcagaucgcccccggccagaccgggaagaucgccgacuacaacuacaagcugccggacgacuucacgggcugcgugaucgcguggaacagcaacaaccucgacuccaaggucgggggcaacuacaacuaccuguaccgccuguuccgcaagagcaaccucaagcccuucgagcgggacaucuccaccgagaucuaccaggccggcagcacccccugcaacgggguggagggcuucaacugcuacuucccccugcaguccuacggguuccagccgaccaacggcgugggguaccagcccuaccggguggucgugcugagcuucgagcuccugcacgcccccgccacggugugcggccccaagaaguccaccaaccuggucaagaacaagugcgugaacuucaacuucaacggccucaccgggaccggcgugcugaccgagagcaacaagaaguuccugccguuccagcaguucgggcgcgacaucgccgacacgaccgacgcgguccgcgacccccagacccuggagauccucgacaucacccccugcagcuucggcgggguguccgugaucacgccgggcaccaacaccagcaaccaggucgccgugcuguaccagggcgugaacugcaccgagguccccguggccauccacgccgaccagcugacgcccaccuggcggguguacuccaccggcagcaacgucuuccagacccgcgccgggugccucaucggcgcggagcacgugaacaacuccuacgagugcgacauccccaucggggccggcaucugcgccagcuaccagacgcagaccaacuccccgcggcgcgcccggagcguggcgucccagagcaucaucgccuacaccaugucccugggcgccgagaacagcgucgccuacuccaacaacagcaucgccauccccaccaacuucacgaucuccgugaccaccgagauccugcccgugagcaugaccaagacgagcgucgacugcaccauguacaucugcggggacuccaccgagugcagcaaccuccugcugcaguacggcuccuucugcacccagcucaaccgcgcgcugacggggaucgccguggagcaggacaagaacacccaggagguguucgcccaggucaagcagaucuacaagacgcccccgaucaaggacuucggcggguucaacuucagccagauccugcccgaccccuccaagcccagcaagcgguccuucaucgaggaccuccuguucaacaaggugacccuggccgacgccggcuucaucaagcaguacggcgacugccucggggacaucgcggcccgcgaccugaucugcgcccagaaguucaacggccugaccgugcucccgccccugcugaccgacgagaugaucgcccaguacaccagcgcccuccuggcggggaccaucacguccggcuggaccuucggggccggcgccgcccugcagauccccuucgcgaugcagauggccuaccgguucaacggcaucggggucacccagaacgugcucuacgagaaccagaagcugaucgccaaccaguucaacagcgccaucggcaagauccaggacucccugagcuccaccgccagcgcgcucgggaagcugcaggacguggucaaccagaacgcccaggcccugaacacgcucgugaagcagcuguccagcaacuucggcgccaucuccagcgugcugaacgacauccucucccgccuggacaaggucgaggccgaggugcagaucgaccggcugaucaccgggcgccuccagagccugcagaccuacgugacccagcagcugauccgggcggccgagauccgcgccagcgccaaccucgccgcgaccaagauguccgagugcguccugggccagagcaagcggguggacuucugcggcaagggguaccaccugauguccuucccccagagcgccccgcacggcguggucuuccuccacgugacguacguccccgcccaggagaagaacuucaccaccgcccccgcgaucugccacgacgggaaggcccacuucccccgcgagggcguguucguguccaacgggacccacugguucgucacgcagcggaacuucuacgagccgcagaucaucaccaccgacaacaccuucgugagcggcaacugcgacguggucaucggcaucgugaacaacacgguguacgacccccugcagcccgagcuggacuccuucaaggaggagcucgacaaguacuucaagaaccacaccagccccgacgucgaccugggggacaucuccggcaucaacgccagcguggugaacauccagaaggagaucgaccgccugaacgaggucgccaagaaccucaacgagucccugaucgaccugcaggagcucgggaaguacgagcaguacaucaaguggccgugguacaucuggcugggcuucaucgccggccugaucgcgaucgugauggugaccaucaugcucugcugcaugaccagcugcugcuccugccugaaggggugcugcagcugcggcuccugcugcaaguucgacgaggacgacagcgagcccguccugaagggggugaagcuccacuacacgugaggacuaguuauaagacugacuagcccgaugggccucccaacgggcccuccuccccuccuugcaccgagauuaaucaaaggcucuuuucagagccaccaaaaaaaaaaaaaaaaaaaaaaaaaaaaaaaaaaaaaaaaaaaaaaaaaaaaaaaaaaaaaaaaaaaaaaaaaaaaaaaaaaaaaaaaaaaaaaaaaaaaa

SEQ ID NO: 24071 - RNA, 4035 nt, Artificial Sequence
  SARS-CoV-2/Wuhan/WIV05/2019__EPI_ISL_402128 spike protein mRNA gc (1-1273)(A222V_D614G)
aggagaaagcuuaccauguucguguuccugguccuccugccccuggugagcucccagugcgugaaccucaccacccgcacgcagcugccgcccgccuacaccaacagcuucacccggggcgucuacuaccccgacaagguguuccgcuccagcgugcugcacuccacccaggaccucuuccugcccuucuucagcaacgucacgugguuccacgccauccacguguccgggaccaacggcaccaagcgguucgacaacccggugcugcccuucaacgacggggucuacuucgcgagcaccgagaaguccaacaucauccgcggcuggaucuucgggacgacccucgacagcaagacccagucccugcugaucgugaacaacgccaccaacguggucaucaaggugugcgaguuccaguucugcaacgaccccuuccucggcguguacuaccacaagaacaacaagagcuggauggaguccgaguuccgggucuacagcuccgccaacaacugcacguucgaguacgugagccagcccuuccugauggaccuggagggcaagcaggggaacuucaagaaccuccgcgaguucguguucaagaacaucgacggcuacuucaagaucuacuccaagcacaccccgaucaaccugguccgggaccugccccagggguucagcguccucgagccccugguggaccugcccaucggcaucaacaucacccgcuuccagacccuccuggcccugcaccgguccuaccucacgccgggggacagcagcuccggcuggaccgcgggcgccgccgccuacuacgugggguaccugcagccccgcaccuuccugcucaaguacaacgagaacggcaccaucacggacgcggucgacugcgcccuggacccccugagcgagaccaagugcacccucaaguccuucaccguggagaaggggaucuaccagacgagcaacuuccgggugcagcccaccgaguccaucguccgcuucccgaacaucaccaaccugugccccuucggcgagguguucaacgccacccgguucgccagcgucuacgccuggaaccgcaagcggaucuccaacugcguggcggacuacagcgugcuguacaacuccgccagcuucuccacguucaagugcuacggcgucagccccaccaagcucaacgaccugugcuucaccaacguguacgccgacuccuucgugauccgcggggacgagguccggcagaucgcccccggccagaccgggaagaucgccgacuacaacuacaagcugccggacgacuucacgggcugcgugaucgcguggaacagcaacaaccucgacuccaaggucgggggcaacuacaacuaccuguaccgccuguuccgcaagagcaaccucaagcccuucgagcgggacaucuccaccgagaucuaccaggccggcagcacccccugcaacgggguggagggcuucaacugcuacuucccccugcaguccuacggguuccagccgaccaacggcgugggguaccagcccuaccggguggucgugcugagcuucgagcuccugcacgcccccgccacggugugcggccccaagaaguccaccaaccuggucaagaacaagugcgugaacuucaacuucaacggccucaccgggaccggcgugcugaccgagagcaacaagaaguuccugccguuccagcaguucgggcgcgacaucgccgacacgaccgacgcgguccgcgacccccagacccuggagauccucgacaucacccccugcagcuucggcgggguguccgugaucacgccgggcaccaacaccagcaaccaggucgccgugcuguaccagggcgugaacugcaccgagguccccguggccauccacgccgaccagcugacgcccaccuggcggguguacuccaccggcagcaacgucuuccagacccgcgccgggugccucaucggcgcggagcacgugaacaacuccuacgagugcgacauccccaucggggccggcaucugcgccagcuaccagacgcagaccaacuccccgcggcgcgcccggagcguggcgucccagagcaucaucgccuacaccaugucccugggcgccgagaacagcgucgccuacuccaacaacagcaucgccauccccaccaacuucacgaucuccgugaccaccgagauccugcccgugagcaugaccaagacgagcgucgacugcaccauguacaucugcggggacuccaccgagugcagcaaccuccugcugcaguacggcuccuucugcacccagcucaaccgcgcgcugacggggaucgccguggagcaggacaagaacacccaggagguguucgcccaggucaagcagaucuacaagacgcccccgaucaaggacuucggcggguucaacuucagccagauccugcccgaccccuccaagcccagcaagcgguccuucaucgaggaccuccuguucaacaaggugacccuggccgacgccggcuucaucaagcaguacggcgacugccucggggacaucgcggcccgcgaccugaucugcgcccagaaguucaacggccugaccgugcucccgccccugcugaccgacgagaugaucgcccaguacaccagcgcccuccuggcggggaccaucacguccggcuggaccuucggggccggcgccgcccugcagauccccuucgcgaugcagauggccuaccgguucaacggcaucggggucacccagaacgugcucuacgagaaccagaagcugaucgccaaccaguucaacagcgccaucggcaagauccaggacucccugagcuccaccgccagcgcgcucgggaagcugcaggacguggucaaccagaacgcccaggcccugaacacgcucgugaagcagcuguccagcaacuucggcgccaucuccagcgugcugaacgacauccucucccgccuggacaaggucgaggccgaggugcagaucgaccggcugaucaccgggcgccuccagagccugcagaccuacgugacccagcagcugauccgggcggccgagauccgcgccagcgccaaccucgccgcgaccaagauguccgagugcguccugggccagagcaagcggguggacuucugcggcaagggguaccaccugauguccuucccccagagcgccccgcacggcguggucuuccuccacgugacguacguccccgcccaggagaagaacuucaccaccgcccccgcgaucugccacgacgggaaggcccacuucccccgcgagggcguguucguguccaacgggacccacugguucgucacgcagcggaacuucuacgagccgcagaucaucaccaccgacaacaccuucgugagcggcaacugcgacguggucaucggcaucgugaacaacacgguguacgacccccugcagcccgagcuggacuccuucaaggaggagcucgacaaguacuucaagaaccacaccagccccgacgucgaccugggggacaucuccggcaucaacgccagcguggugaacauccagaaggagaucgaccgccugaacgaggucgccaagaaccucaacgagucccugaucgaccugcaggagcucgggaaguacgagcaguacaucaaguggccgugguacaucuggcugggcuucaucgccggccugaucgcgaucgugauggugaccaucaugcucugcugcaugaccagcugcugcuccugccugaaggggugcugcagcugcggcuccugcugcaaguucgacgaggacgacagcgagcccguccugaagggggugaagcuccacuacacgugaggacuaguuauaagacugacuagcccgaugggccucccaacgggcccuccuccccuccuugcaccgagauuaaucaaaggcucuuuucagagccaccaaaaaaaaaaaaaaaaaaaaaaaaaaaaaaaaaaaaaaaaaaaaaaaaaaaaaaaaaaaaaaaaaaaaaaaaaaaaaaaaaaaaaaaaaaaaaaaaaaaaa

SEQ ID NO: 24072 - RNA, 4035 nt, Artificial Sequence
  SARS-CoV-2/Wuhan/WIV05/2019__EPI_ISL_402128 spike protein mRNA gc (1-1273)(N439K_D614G)
aggagaaagcuuaccauguucguguuccugguccuccugccccuggugagcucccagugcgugaaccucaccacccgcacgcagcugccgcccgccuacaccaacagcuucacccggggcgucuacuaccccgacaagguguuccgcuccagcgugcugcacuccacccaggaccucuuccugcccuucuucagcaacgucacgugguuccacgccauccacguguccgggaccaacggcaccaagcgguucgacaacccggugcugcccuucaacgacggggucuacuucgcgagcaccgagaaguccaacaucauccgcggcuggaucuucgggacgacccucgacagcaagacccagucccugcugaucgugaacaacgccaccaacguggucaucaaggugugcgaguuccaguucugcaacgaccccuuccucggcguguacuaccacaagaacaacaagagcuggauggaguccgaguuccgggucuacagcuccgccaacaacugcacguucgaguacgugagccagcccuuccugauggaccuggagggcaagcaggggaacuucaagaaccuccgcgaguucguguucaagaacaucgacggcuacuucaagaucuacuccaagcacaccccgaucaaccugguccgggaccugccccagggguucagcgcccucgagccccugguggaccugcccaucggcaucaacaucacccgcuuccagacccuccuggcccugcaccgguccuaccucacgccgggggacagcagcuccggcuggaccgcgggcgccgccgccuacuacgugggguaccugcagccccgcaccuuccugcucaaguacaacgagaacggcaccaucacggacgcggucgacugcgcccuggacccccugagcgagaccaagugcacccucaaguccuucaccguggagaaggggaucuaccagacgagcaacuuccgggugcagcccaccgaguccaucguccgcuucccgaacaucaccaaccugugccccuucggcgagguguucaacgccacccgguucgccagcgucuacgccuggaaccgcaagcggaucuccaacugcguggcggacuacagcgugcuguacaacuccgccagcuucuccacguucaagugcuacggcgucagccccaccaagcucaacgaccugugcuucaccaacguguacgccgacuccuucgugauccgcggggacgagguccggcagaucgcccccggccagaccgggaagaucgccgacuacaacuacaagcugccggacgacuucacgggcugcgugaucgcguggaacagcaagaaccucgacuccaaggucgggggcaacuacaacuaccuguaccgccuguuccgcaagagcaaccucaagcccuucgagcgggacaucuccaccgagaucuaccaggccggcagcacccccugcaacgggguggagggcuucaacugcuacuucccccugcaguccuacggguuccagccgaccaacggcgugggguaccagcccuaccggguggucgugcugagcuucgagcuccugcacgcccccgccacggugugcggccccaagaaguccaccaaccuggucaagaacaagugcgugaacuucaacuucaacggccucaccgggaccggcgugcugaccgagagcaacaagaaguuccugccguuccagcaguucgggcgcgacaucgccgacacgaccgacgcgguccgcgacccccagacccuggagauccucgacaucacccccugcagcuucggcgggguguccgugaucacgccgggcaccaacaccagcaaccaggucgccgugcuguaccagggcgugaacugcaccgagguccccguggccauccacgccgaccagcugacgcccaccuggcggguguacuccaccggcagcaacgucuuccagacccgcgccgggugccucaucggcgcggagcacgugaacaacuccuacgagugcgacauccccaucggggccggcaucugcgccagcuaccagacgcagaccaacuccccgcggcgcgcccggagcguggcgucccagagcaucaucgccuacaccaugucccugggcgccgagaacagcgucgccuacuccaacaacagcaucgccauccccaccaacuucacgaucuccgugaccaccgagauccugcccgugagcaugaccaagacgagcgucgacugcaccauguacaucugcggggacuccaccgagugcagcaaccuccugcugcaguacggcuccuucugcacccagcucaaccgcgcgcugacggggaucgccguggagcaggacaagaacacccaggagguguucgcccaggucaagcagaucuacaagacgcccccgaucaaggacuucggcggguucaacuucagccagauccugcccgaccccuccaagcccagcaagcgguccuucaucgaggaccuccuguucaacaaggugacccuggccgacgccggcuucaucaagcaguacggcgacugccucggggacaucgcggcccgcgaccugaucugcgcccagaaguucaacggccugaccgugcucccgccccugcugaccgacgagaugaucgcccaguacaccagcgcccuccuggcggggaccaucacguccggcuggaccuucggggccggcgccgcccugcagauccccuucgcgaugcagauggccuaccgguucaacggcaucggggucacccagaacgugcucuacgagaaccagaagcugaucgccaaccaguucaacagcgccaucggcaagauccaggacucccugagcuccaccgccagcgcgcucgggaagcugcaggacguggucaaccagaacgcccaggcccugaacacgcucgugaagcagcuguccagcaacuucggcgccaucuccagcgugcugaacgacauccucucccgccuggacaaggucgaggccgaggugcagaucgaccggcugaucaccgggcgccuccagagccugcagaccuacgugacccagcagcugauccgggcggccgagauccgcgccagcgccaaccucgccgcgaccaagauguccgagugcguccugggccagagcaagcggguggacuucugcggcaagggguaccaccugauguccuucccccagagcgccccgcacggcguggucuuccuccacgugacguacguccccgcccaggagaagaacuucaccaccgcccccgcgaucugccacgacgggaaggcccacuucccccgcgagggcguguucguguccaacgggacccacugguucgucacgcagcggaacuucuacgagccgcagaucaucaccaccgacaacaccuucgugagcggcaacugcgacguggucaucggcaucgugaacaacacgguguacgacccccugcagcccgagcuggacuccuucaaggaggagcucgacaaguacuucaagaaccacaccagccccgacgucgaccugggggacaucuccggcaucaacgccagcguggugaacauccagaaggagaucgaccgccugaacgaggucgccaagaaccucaacgagucccugaucgaccugcaggagcucgggaaguacgagcaguacaucaaguggccgugguacaucuggcugggcuucaucgccggccugaucgcgaucgugauggugaccaucaugcucugcugcaugaccagcugcugcuccugccugaaggggugcugcagcugcggcuccugcugcaaguucgacgaggacgacagcgagcccguccugaagggggugaagcuccacuacacgugaggacuaguuauaagacugacuagcccgaugggccucccaacgggcccuccuccccuccuugcaccgagauuaaucaaaggcucuuuucagagccaccaaaaaaaaaaaaaaaaaaaaaaaaaaaaaaaaaaaaaaaaaaaaaaaaaaaaaaaaaaaaaaaaaaaaaaaaaaaaaaaaaaaaaaaaaaaaaaaaaaaaa

SEQ ID NO: 24073 - RNA, 4035 nt, Artificial Sequence
  SARS-CoV-2/Wuhan/WIV05/2019__EPI_ISL_402128 spike protein mRNA gc (1-1273)(S477N_D614G)
aggagaaagcuuaccauguucguguuccugguccuccugccccuggugagcucccagugcgugaaccucaccacccgcacgcagcugccgcccgccuacaccaacagcuucacccggggcgucuacuaccccgacaagguguuccgcuccagcgugcugcacuccacccaggaccucuuccugcccuucuucagcaacgucacgugguuccacgccauccacguguccgggaccaacggcaccaagcgguucgacaacccggugcugcccuucaacgacggggucuacuucgcgagcaccgagaaguccaacaucauccgcggcuggaucuucgggacgacccucgacagcaagacccagucccugcugaucgugaacaacgccaccaacguggucaucaaggugugcgaguuccaguucugcaacgaccccuuccucggcguguacuaccacaagaacaacaagagcuggauggaguccgaguuccgggucuacagcuccgccaacaacugcacguucgaguacgugagccagcccuuccugauggaccuggagggcaagcaggggaacuucaagaaccuccgcgaguucguguucaagaacaucgacggcuacuucaagaucuacuccaagcacaccccgaucaaccugguccgggaccugccccagggguucagcgcccucgagccccugguggaccugcccaucggcaucaacaucacccgcuuccagacccuccuggcccugcaccgguccuaccucacgccgggggacagcagcuccggcuggaccgcgggcgccgccgccuacuacgugggguaccugcagccccgcaccuuccugcucaaguacaacgagaacggcaccaucacggacgcggucgacugcgcccuggacccccugagcgagaccaagugcacccucaaguccuucaccguggagaaggggaucuaccagacgagcaacuuccgggugcagcccaccgaguccaucguccgcuucccgaacaucaccaaccugugccccuucggcgagguguucaacgccacccgguucgccagcgucuacgccuggaaccgcaagcggaucuccaacugcguggcggacuacagcgugcuguacaacuccgccagcuucuccacguucaagugcuacggcgucagccccaccaagcucaacgaccugugcuucaccaacguguacgccgacuccuucgugauccgcggggacgagguccggcagaucgcccccggccagaccgggaagaucgccgacuacaacuacaagcugccggacgacuucacgggcugcgugaucgcguggaacagcaacaaccucgacuccaaggucgggggcaacuacaacuaccuguaccgccuguuccgcaagagcaaccucaagcccuucgagcgggacaucuccaccgagaucuaccaggccggcaacacccccugcaacgggguggagggcuucaacugcuacuucccccugcaguccuacggguuccagccgaccaacggcgugggguaccagcccuaccggguggucgugcugagcuucgagcuccugcacgcccccgccacggugugcggccccaagaaguccaccaaccuggucaagaacaagugcgugaacuucaacuucaacggccucaccgggaccggcgugcugaccgagagcaacaagaaguuccugccguuccagcaguucgggcgcgacaucgccgacacgaccgacgcgguccgcgacccccagacccuggagauccucgacaucacccccugcagcuucggcgggguguccgugaucacgccgggcaccaacaccagcaaccaggucgccgugcuguaccagggcgugaacugcaccgagguccccguggccauccacgccgaccagcugacgcccaccuggcggguguacuccaccggcagcaacgucuuccagacccgcgccgggugccucaucggcgcggagcacgugaacaacuccuacgagugcgacauccccaucggggccggcaucugcgccagcuaccagacgcagaccaacuccccgcggcgcgcccggagcguggcgucccagagcaucaucgccuacaccaugucccugggcgccgagaacagcgucgccuacuccaacaacagcaucgccauccccaccaacuucacgaucuccgugaccaccgagauccugcccgugagcaugaccaagacgagcgucgacugcaccauguacaucugcggggacuccaccgagugcagcaaccuccugcugcaguacggcuccuucugcacccagcucaaccgcgcgcugacggggaucgccguggagcaggacaagaacacccaggagguguucgcccaggucaagcagaucuacaagacgcccccgaucaaggacuucggcggguucaacuucagccagauccugcccgaccccuccaagcccagcaagcgguccuucaucgaggaccuccuguucaacaaggugacccuggccgacgccggcuucaucaagcaguacggcgacugccucggggacaucgcggcccgcgaccugaucugcgcccagaaguucaacggccugaccgugcucccgccccugcugaccgacgagaugaucgcccaguacaccagcgcccuccuggcggggaccaucacguccggcuggaccuucggggccggcgccgcccugcagauccccuucgcgaugcagauggccuaccgguucaacggcaucggggucacccagaacgugcucuacgagaaccagaagcugaucgccaaccaguucaacagcgccaucggcaagauccaggacucccugagcuccaccgccagcgcgcucgggaagcugcaggacguggucaaccagaacgcccaggcccugaacacgcucgugaagcagcuguccagcaacuucggcgccaucuccagcgugcugaacgacauccucucccgccuggacaaggucgaggccgaggugcagaucgaccggcugaucaccgggcgccuccagagccugcagaccuacgugacccagcagcugauccgggcggccgagauccgcgccagcgccaaccucgccgcgaccaagauguccgagugcguccugggccagagcaagcggguggacuucugcggcaagggguaccaccugauguccuucccccagagcgccccgcacggcguggucuuccuccacgugacguacguccccgcccaggagaagaacuucaccaccgcccccgcgaucugccacgacgggaaggcccacuucccccgcgagggcguguucguguccaacgggacccacugguucgucacgcagcggaacuucuacgagccgcagaucaucaccaccgacaacaccuucgugagcggcaacugcgacguggucaucggcaucgugaacaacacgguguacgacccccugcagcccgagcuggacuccuucaaggaggagcucgacaaguacuucaagaaccacaccagccccgacgucgaccugggggacaucuccggcaucaacgccagcguggugaacauccagaaggagaucgaccgccugaacgaggucgccaagaaccucaacgagucccugaucgaccugcaggagcucgggaaguacgagcaguacaucaaguggccgugguacaucuggcugggcuucaucgccggccugaucgcgaucgugauggugaccaucaugcucugcugcaugaccagcugcugcuccugccugaaggggugcugcagcugcggcuccugcugcaaguucgacgaggacgacagcgagcccguccugaagggggugaagcuccacuacacgugaggacuaguuauaagacugacuagcccgaugggccucccaacgggcccuccuccccuccuugcaccgagauuaaucaaaggcucuuuucagagccaccaaaaaaaaaaaaaaaaaaaaaaaaaaaaaaaaaaaaaaaaaaaaaaaaaaaaaaaaaaaaaaaaaaaaaaaaaaaaaaaaaaaaaaaaaaaaaaaaaaaaa

SEQ ID NO: 24074 - RNA, 4035 nt, Artificial Sequence
  SARS-CoV-2/Wuhan/WIV05/2019__EPI_ISL_402128 spike protein mRNA gc (1-1273)(N501Y_D614G)
aggagaaagcuuaccauguucguguuccugguccuccugccccuggugagcucccagugcgugaaccucaccacccgcacgcagcugccgcccgccuacaccaacagcuucacccggggcgucuacuaccccgacaagguguuccgcuccagcgugcugcacuccacccaggaccucuuccugcccuucuucagcaacgucacgugguuccacgccauccacguguccgggaccaacggcaccaagcgguucgacaacccggugcugcccuucaacgacggggucuacuucgcgagcaccgagaaguccaacaucauccgcggcuggaucuucgggacgacccucgacagcaagacccagucccugcugaucgugaacaacgccaccaacguggucaucaaggugugcgaguuccaguucugcaacgaccccuuccucggcguguacuaccacaagaacaacaagagcuggauggaguccgaguuccgggucuacagcuccgccaacaacugcacguucgaguacgugagccagcccuuccugauggaccuggagggcaagcaggggaacuucaagaaccuccgcgaguucguguucaagaacaucgacggcuacuucaagaucuacuccaagcacaccccgaucaaccugguccgggaccugccccagggguucagcgcccucgagccccugguggaccugcccaucggcaucaacaucacccgcuuccagacccuccuggcccugcaccgguccuaccucacgccgggggacagcagcuccggcuggaccgcgggcgccgccgccuacuacgugggguaccugcagccccgcaccuuccugcucaaguacaacgagaacggcaccaucacggacgcggucgacugcgcccuggacccccugagcgagaccaagugcacccucaaguccuucaccguggagaaggggaucuaccagacgagcaacuuccgggugcagcccaccgaguccaucguccgcuucccgaacaucaccaaccugugccccuucggcgagguguucaacgccacccgguucgccagcgucuacgccuggaaccgcaagcggaucuccaacugcguggcggacuacagcgugcuguacaacuccgccagcuucuccacguucaagugcuacggcgucagccccaccaagcucaacgaccugugcuucaccaacguguacgccgacuccuucgugauccgcggggacgagguccggcagaucgcccccggccagaccgggaagaucgccgacuacaacuacaagcugccggacgacuucacgggcugcgugaucgcguggaacagcaacaaccucgacuccaaggucgggggcaacuacaacuaccuguaccgccuguuccgcaagagcaaccucaagcccuucgagcgggacaucuccaccgagaucuaccaggccggcagcacccccugcaacgggguggagggcuucaacugcuacuucccccugcaguccuacggguuccagccgaccuacggcgugggguaccagcccuaccggguggucgugcugagcuucgagcuccugcacgcccccgccacggugugcggccccaagaaguccaccaaccuggucaagaacaagugcgugaacuucaacuucaacggccucaccgggaccggcgugcugaccgagagcaacaagaaguuccugccguuccagcaguucgggcgcgacaucgccgacacgaccgacgcgguccgcgacccccagacccuggagauccucgacaucacccccugcagcuucggcgggguguccgugaucacgccgggcaccaacaccagcaaccaggucgccgugcuguaccagggcgugaacugcaccgagguccccguggccauccacgccgaccagcugacgcccaccuggcggguguacuccaccggcagcaacgucuuccagacccgcgccgggugccucaucggcgcggagcacgugaacaacuccuacgagugcgacauccccaucggggccggcaucugcgccagcuaccagacgcagaccaacuccccgcggcgcgcccggagcguggcgucccagagcaucaucgccuacaccaugucccugggcgccgagaacagcgucgccuacuccaacaacagcaucgccauccccaccaacuucacgaucuccgugaccaccgagauccugcccgugagcaugaccaagacgagcgucgacugcaccauguacaucugcggggacuccaccgagugcagcaaccuccugcugcaguacggcuccuucugcacccagcucaaccgcgcgcugacggggaucgccguggagcaggacaagaacacccaggagguguucgcccaggucaagcagaucuacaagacgcccccgaucaaggacuucggcggguucaacuucagccagauccugcccgaccccuccaagcccagcaagcgguccuucaucgaggaccuccuguucaacaaggugacccuggccgacgccggcuucaucaagcaguacggcgacugccucggggacaucgcggcccgcgaccugaucugcgcccagaaguucaacggccugaccgugcucccgccccugcugaccgacgagaugaucgcccaguacaccagcgcccuccuggcggggaccaucacguccggcuggaccuucggggccggcgccgcccugcagauccccuucgcgaugcagauggccuaccgguucaacggcaucggggucacccagaacgugcucuacgagaaccagaagcugaucgccaaccaguucaacagcgccaucggcaagauccaggacucccugagcuccaccgccagcgcgcucgggaagcugcaggacguggucaaccagaacgcccaggcccugaacacgcucgugaagcagcuguccagcaacuucggcgccaucuccagcgugcugaacgacauccucucccgccuggacaaggucgaggccgaggugcagaucgaccggcugaucaccgggcgccuccagagccugcagaccuacgugacccagcagcugauccgggcggccgagauccgcgccagcgccaaccucgccgcgaccaagauguccgagugcguccugggccagagcaagcggguggacuucugcggcaagggguaccaccugauguccuucccccagagcgccccgcacggcguggucuuccuccacgugacguacguccccgcccaggagaagaacuucaccaccgcccccgcgaucugccacgacgggaaggcccacuucccccgcgagggcguguucguguccaacgggacccacugguucgucacgcagcggaacuucuacgagccgcagaucaucaccaccgacaacaccuucgugagcggcaacugcgacguggucaucggcaucgugaacaacacgguguacgacccccugcagcccgagcuggacuccuucaaggaggagcucgacaaguacuucaagaaccacaccagccccgacgucgaccugggggacaucuccggcaucaacgccagcguggugaacauccagaaggagaucgaccgccugaacgaggucgccaagaaccucaacgagucccugaucgaccugcaggagcucgggaaguacgagcaguacaucaaguggccgugguacaucuggcugggcuucaucgccggccugaucgcgaucgugauggugaccaucaugcucugcugcaugaccagcugcugcuccugccugaaggggugcugcagcugcggcuccugcugcaaguucgacgaggacgacagcgagcccguccugaagggggugaagcuccacuacacgugaggacuaguuauaagacugacuagcccgaugggccucccaacgggcccuccuccccuccuugcaccgagauuaaucaaaggcucuuuucagagccaccaaaaaaaaaaaaaaaaaaaaaaaaaaaaaaaaaaaaaaaaaaaaaaaaaaaaaaaaaaaaaaaaaaaaaaaaaaaaaaaaaaaaaaaaaaaaaaaaaaaaa

SEQ ID NO: 24075 - RNA, 4029 nt, Artificial Sequence
  SARS-CoV-2/Wuhan/WIV05/2019__EPI_ISL_402128 spike protein mRNA gc (1-1273)(H69del_V70del_D614G)
aggagaaagcuuaccauguucguguuccugguccuccugccccuggugagcucccagugcgugaaccucaccacccgcacgcagcugccgcccgccuacaccaacagcuucacccggggcgucuacuaccccgacaagguguuccgcuccagcgugcugcacuccacccaggaccucuuccugcccuucuucagcaacgucacgugguuccacgccaucuccgggaccaacggcaccaagcgguucgacaacccggugcugcccuucaacgacggggucuacuucgcgagcaccgagaaguccaacaucauccgcggcuggaucuucgggacgacccucgacagcaagacccagucccugcugaucgugaacaacgccaccaacguggucaucaaggugugcgaguuccaguucugcaacgaccccuuccucggcguguacuaccacaagaacaacaagagcuggauggaguccgaguuccgggucuacagcuccgccaacaacugcacguucgaguacgugagccagcccuuccugauggaccuggagggcaagcaggggaacuucaagaaccuccgcgaguucguguucaagaacaucgacggcuacuucaagaucuacuccaagcacaccccgaucaaccugguccgggaccugccccagggguucagcgcccucgagccccugguggaccugcccaucggcaucaacaucacccgcuuccagacccuccuggcccugcaccgguccuaccucacgccgggggacagcagcuccggcuggaccgcgggcgccgccgccuacuacgugggguaccugcagccccgcaccuuccugcucaaguacaacgagaacggcaccaucacggacgcggucgacugcgcccuggacccccugagcgagaccaagugcacccucaaguccuucaccguggagaaggggaucuaccagacgagcaacuuccgggugcagcccaccgaguccaucguccgcuucccgaacaucaccaaccugugccccuucggcgagguguucaacgccacccgguucgccagcgucuacgccuggaaccgcaagcggaucuccaacugcguggcggacuacagcgugcuguacaacuccgccagcuucuccacguucaagugcuacggcgucagccccaccaagcucaacgaccugugcuucaccaacguguacgccgacuccuucgugauccgcggggacgagguccggcagaucgcccccggccagaccgggaagaucgccgacuacaacuacaagcugccggacgacuucacgggcugcgugaucgcguggaacagcaacaaccucgacuccaaggucgggggcaacuacaacuaccuguaccgccuguuccgcaagagcaaccucaagcccuucgagcgggacaucuccaccgagaucuaccaggccggcagcacccccugcaacgggguggagggcuucaacugcuacuucccccugcaguccuacggguuccagccgaccaacggcgugggguaccagcccuaccggguggucgugcugagcuucgagcuccugcacgcccccgccacggugugcggccccaagaaguccaccaaccuggucaagaacaagugcgugaacuucaacuucaacggccucaccgggaccggcgugcugaccgagagcaacaagaaguuccugccguuccagcaguucgggcgcgacaucgccgacacgaccgacgcgguccgcgacccccagacccuggagauccucgacaucacccccugcagcuucggcgggguguccgugaucacgccgggcaccaacaccagcaaccaggucgccgugcuguaccagggcgugaacugcaccgagguccccguggccauccacgccgaccagcugacgcccaccuggcggguguacuccaccggcagcaacgucuuccagacccgcgccgggugccucaucggcgcggagcacgugaacaacuccuacgagugcgacauccccaucggggccggcaucugcgccagcuaccagacgcagaccaacuccccgcggcgcgcccggagcguggcgucccagagcaucaucgccuacaccaugucccugggcgccgagaacagcgucgccuacuccaacaacagcaucgccauccccaccaacuucacgaucuccgugaccaccgagauccugcccgugagcaugaccaagacgagcgucgacugcaccauguacaucugcggggacuccaccgagugcagcaaccuccugcugcaguacggcuccuucugcacccagcucaaccgcgcgcugacggggaucgccguggagcaggacaagaacacccaggagguguucgcccaggucaagcagaucuacaagacgcccccgaucaaggacuucggcggguucaacuucagccagauccugcccgaccccuccaagcccagcaagcgguccuucaucgaggaccuccuguucaacaaggugacccuggccgacgccggcuucaucaagcaguacggcgacugccucggggacaucgcggcccgcgaccugaucugcgcccagaaguucaacggccugaccgugcucccgccccugcugaccgacgagaugaucgcccaguacaccagcgcccuccuggcggggaccaucacguccggcuggaccuucggggccggcgccgcccugcagauccccuucgcgaugcagauggccuaccgguucaacggcaucggggucacccagaacgugcucuacgagaaccagaagcugaucgccaaccaguucaacagcgccaucggcaagauccaggacucccugagcuccaccgccagcgcgcucgggaagcugcaggacguggucaaccagaacgcccaggcccugaacacgcucgugaagcagcuguccagcaacuucggcgccaucuccagcgugcugaacgacauccucucccgccuggacaaggucgaggccgaggugcagaucgaccggcugaucaccgggcgccuccagagccugcagaccuacgugacccagcagcugauccgggcggccgagauccgcgccagcgccaaccucgccgcgaccaagauguccgagugcguccugggccagagcaagcggguggacuucugcggcaagggguaccaccugauguccuucccccagagcgccccgcacggcguggucuuccuccacgugacguacguccccgcccaggagaagaacuucaccaccgcccccgcgaucugccacgacgggaaggcccacuucccccgcgagggcguguucguguccaacgggacccacugguucgucacgcagcggaacuucuacgagccgcagaucaucaccaccgacaacaccuucgugagcggcaacugcgacguggucaucggcaucgugaacaacacgguguacgacccccugcagcccgagcuggacuccuucaaggaggagcucgacaaguacuucaagaaccacaccagccccgacgucgaccugggggacaucuccggcaucaacgccagcguggugaacauccagaaggagaucgaccgccugaacgaggucgccaagaaccucaacgagucccugaucgaccugcaggagcucgggaaguacgagcaguacaucaaguggccgugguacaucuggcugggcuucaucgccggccugaucgcgaucgugauggugaccaucaugcucugcugcaugaccagcugcugcuccugccugaaggggugcugcagcugcggcuccugcugcaaguucgacgaggacgacagcgagcccguccugaagggggugaagcuccacuacacgugaggacuaguuauaagacugacuagcccgaugggccucccaacgggcccuccuccccuccuugcaccgagauuaaucaaaggcucuuuucagagccaccaaaaaaaaaaaaaaaaaaaaaaaaaaaaaaaaaaaaaaaaaaaaaaaaaaaaaaaaaaaaaaaaaaaaaaaaaaaaaaaaaaaaaaaaaaaaaaaaaaaaa

SEQ ID NO: 24076 - RNA, 4035 nt, Artificial Sequence
  SARS-CoV-2/Wuhan/WIV05/2019__EPI_ISL_402128 spike protein mRNA gc (1-1273)(Y453F_D614G)
aggagaaagcuuaccauguucguguuccugguccuccugccccuggugagcucccagugcgugaaccucaccacccgcacgcagcugccgcccgccuacaccaacagcuucacccggggcgucuacuaccccgacaagguguuccgcuccagcgugcugcacuccacccaggaccucuuccugcccuucuucagcaacgucacgugguuccacgccauccacguguccgggaccaacggcaccaagcgguucgacaacccggugcugcccuucaacgacggggucuacuucgcgagcaccgagaaguccaacaucauccgcggcuggaucuucgggacgacccucgacagcaagacccagucccugcugaucgugaacaacgccaccaacguggucaucaaggugugcgaguuccaguucugcaacgaccccuuccucggcguguacuaccacaagaacaacaagagcuggauggaguccgaguuccgggucuacagcuccgccaacaacugcacguucgaguacgugagccagcccuuccugauggaccuggagggcaagcaggggaacuucaagaaccuccgcgaguucguguucaagaacaucgacggcuacuucaagaucuacuccaagcacaccccgaucaaccugguccgggaccugccccagggguucagcgcccucgagccccugguggaccugcccaucggcaucaacaucacccgcuuccagacccuccuggcccugcaccgguccuaccucacgccgggggacagcagcuccggcuggaccgcgggcgccgccgccuacuacgugggguaccugcagccccgcaccuuccugcucaaguacaacgagaacggcaccaucacggacgcggucgacugcgcccuggacccccugagcgagaccaagugcacccucaaguccuucaccguggagaaggggaucuaccagacgagcaacuuccgggugcagcccaccgaguccaucguccgcuucccgaacaucaccaaccugugccccuucggcgagguguucaacgccacccgguucgccagcgucuacgccuggaaccgcaagcggaucuccaacugcguggcggacuacagcgugcuguacaacuccgccagcuucuccacguucaagugcuacggcgucagccccaccaagcucaacgaccugugcuucaccaacguguacgccgacuccuucgugauccgcggggacgagguccggcagaucgcccccggccagaccgggaagaucgccgacuacaacuacaagcugccggacgacuucacgggcugcgugaucgcguggaacagcaacaaccucgacuccaaggucgggggcaacuacaacuaccuguuccgccuguuccgcaagagcaaccucaagcccuucgagcgggacaucuccaccgagaucuaccaggccggcagcacccccugcaacgggguggagggcuucaacugcuacuucccccugcaguccuacggguuccagccgaccaacggcgugggguaccagcccuaccggguggucgugcugagcuucgagcuccugcacgcccccgccacggugugcggccccaagaaguccaccaaccuggucaagaacaagugcgugaacuucaacuucaacggccucaccgggaccggcgugcugaccgagagcaacaagaaguuccugccguuccagcaguucgggcgcgacaucgccgacacgaccgacgcgguccgcgacccccagacccuggagauccucgacaucacccccugcagcuucggcgggguguccgugaucacgccgggcaccaacaccagcaaccaggucgccgugcuguaccagggcgugaacugcaccgagguccccguggccauccacgccgaccagcugacgcccaccuggcggguguacuccaccggcagcaacgucuuccagacccgcgccgggugccucaucggcgcggagcacgugaacaacuccuacgagugcgacauccccaucggggccggcaucugcgccagcuaccagacgcagaccaacuccccgcggcgcgcccggagcguggcgucccagagcaucaucgccuacaccaugucccugggcgccgagaacagcgucgccuacuccaacaacagcaucgccauccccaccaacuucacgaucuccgugaccaccgagauccugcccgugagcaugaccaagacgagcgucgacugcaccauguacaucugcggggacuccaccgagugcagcaaccuccugcugcaguacggcuccuucugcacccagcucaaccgcgcgcugacggggaucgccguggagcaggacaagaacacccaggagguguucgcccaggucaagcagaucuacaagacgcccccgaucaaggacuucggcggguucaacuucagccagauccugcccgaccccuccaagcccagcaagcgguccuucaucgaggaccuccuguucaacaaggugacccuggccgacgccggcuucaucaagcaguacggcgacugccucggggacaucgcggcccgcgaccugaucugcgcccagaaguucaacggccugaccgugcucccgccccugcugaccgacgagaugaucgcccaguacaccagcgcccuccuggcggggaccaucacguccggcuggaccuucggggccggcgccgcccugcagauccccuucgcgaugcagauggccuaccgguucaacggcaucggggucacccagaacgugcucuacgagaaccagaagcugaucgccaaccaguucaacagcgccaucggcaagauccaggacucccugagcuccaccgccagcgcgcucgggaagcugcaggacguggucaaccagaacgcccaggcccugaacacgcucgugaagcagcuguccagcaacuucggcgccaucuccagcgugcugaacgacauccucucccgccuggacaaggucgaggccgaggugcagaucgaccggcugaucaccgggcgccuccagagccugcagaccuacgugacccagcagcugauccgggcggccgagauccgcgccagcgccaaccucgccgcgaccaagauguccgagugcguccugggccagagcaagcggguggacuucugcggcaagggguaccaccugauguccuucccccagagcgccccgcacggcguggucuuccuccacgugacguacguccccgcccaggagaagaacuucaccaccgcccccgcgaucugccacgacgggaaggcccacuucccccgcgagggcguguucguguccaacgggacccacugguucgucacgcagcggaacuucuacgagccgcagaucaucaccaccgacaacaccuucgugagcggcaacugcgacguggucaucggcaucgugaacaacacgguguacgacccccugcagcccgagcuggacuccuucaaggaggagcucgacaaguacuucaagaaccacaccagccccgacgucgaccugggggacaucuccggcaucaacgccagcguggugaacauccagaaggagaucgaccgccugaacgaggucgccaagaaccucaacgagucccugaucgaccugcaggagcucgggaaguacgagcaguacaucaaguggccgugguacaucuggcugggcuucaucgccggccugaucgcgaucgugauggugaccaucaugcucugcugcaugaccagcugcugcuccugccugaaggggugcugcagcugcggcuccugcugcaaguucgacgaggacgacagcgagcccguccugaagggggugaagcuccacuacacgugaggacuaguuauaagacugacuagcccgaugggccucccaacgggcccuccuccccuccuugcaccgagauuaaucaaaggcucuuuucagagccaccaaaaaaaaaaaaaaaaaaaaaaaaaaaaaaaaaaaaaaaaaaaaaaaaaaaaaaaaaaaaaaaaaaaaaaaaaaaaaaaaaaaaaaaaaaaaaaaaaaaaa

SEQ ID NO: 24077 - RNA, 4035 nt, Artificial Sequence
  SARS-CoV-2/Wuhan/WIV05/2019__EPI_ISL_402128 spike protein mRNA gc (1-1273)(D614G_I692V)
aggagaaagcuuaccauguucguguuccugguccuccugccccuggugagcucccagugcgugaaccucaccacccgcacgcagcugccgcccgccuacaccaacagcuucacccggggcgucuacuaccccgacaagguguuccgcuccagcgugcugcacuccacccaggaccucuuccugcccuucuucagcaacgucacgugguuccacgccauccacguguccgggaccaacggcaccaagcgguucgacaacccggugcugcccuucaacgacggggucuacuucgcgagcaccgagaaguccaacaucauccgcggcuggaucuucgggacgacccucgacagcaagacccagucccugcugaucgugaacaacgccaccaacguggucaucaaggugugcgaguuccaguucugcaacgaccccuuccucggcguguacuaccacaagaacaacaagagcuggauggaguccgaguuccgggucuacagcuccgccaacaacugcacguucgaguacgugagccagcccuuccugauggaccuggagggcaagcaggggaacuucaagaaccuccgcgaguucguguucaagaacaucgacggcuacuucaagaucuacuccaagcacaccccgaucaaccugguccgggaccugccccagggguucagcgcccucgagccccugguggaccugcccaucggcaucaacaucacccgcuuccagacccuccuggcccugcaccgguccuaccucacgccgggggacagcagcuccggcuggaccgcgggcgccgccgccuacuacgugggguaccugcagccccgcaccuuccugcucaaguacaacgagaacggcaccaucacggacgcggucgacugcgcccuggacccccugagcgagaccaagugcacccucaaguccuucaccguggagaaggggaucuaccagacgagcaacuuccgggugcagcccaccgaguccaucguccgcuucccgaacaucaccaaccugugccccuucggcgagguguucaacgccacccgguucgccagcgucuacgccuggaaccgcaagcggaucuccaacugcguggcggacuacagcgugcuguacaacuccgccagcuucuccacguucaagugcuacggcgucagccccaccaagcucaacgaccugugcuucaccaacguguacgccgacuccuucgugauccgcggggacgagguccggcagaucgcccccggccagaccgggaagaucgccgacuacaacuacaagcugccggacgacuucacgggcugcgugaucgcguggaacagcaacaaccucgacuccaaggucgggggcaacuacaacuaccuguaccgccuguuccgcaagagcaaccucaagcccuucgagcgggacaucuccaccgagaucuaccaggccggcagcacccccugcaacgggguggagggcuucaacugcuacuucccccugcaguccuacggguuccagccgaccaacggcgugggguaccagcccuaccggguggucgugcugagcuucgagcuccugcacgcccccgccacggugugcggccccaagaaguccaccaaccuggucaagaacaagugcgugaacuucaacuucaacggccucaccgggaccggcgugcugaccgagagcaacaagaaguuccugccguuccagcaguucgggcgcgacaucgccgacacgaccgacgcgguccgcgacccccagacccuggagauccucgacaucacccccugcagcuucggcgggguguccgugaucacgccgggcaccaacaccagcaaccaggucgccgugcuguaccagggcgugaacugcaccgagguccccguggccauccacgccgaccagcugacgcccaccuggcggguguacuccaccggcagcaacgucuuccagacccgcgccgggugccucaucggcgcggagcacgugaacaacuccuacgagugcgacauccccaucggggccggcaucugcgccagcuaccagacgcagaccaacuccccgcggcgcgcccggagcguggcgucccagagcgucaucgccuacaccaugucccugggcgccgagaacagcgucgccuacuccaacaacagcaucgccauccccaccaacuucacgaucuccgugaccaccgagauccugcccgugagcaugaccaagacgagcgucgacugcaccauguacaucugcggggacuccaccgagugcagcaaccuccugcugcaguacggcuccuucugcacccagcucaaccgcgcgcugacggggaucgccguggagcaggacaagaacacccaggagguguucgcccaggucaagcagaucuacaagacgcccccgaucaaggacuucggcggguucaacuucagccagauccugcccgaccccuccaagcccagcaagcgguccuucaucgaggaccuccuguucaacaaggugacccuggccgacgccggcuucaucaagcaguacggcgacugccucggggacaucgcggcccgcgaccugaucugcgcccagaaguucaacggccugaccgugcucccgccccugcugaccgacgagaugaucgcccaguacaccagcgcccuccuggcggggaccaucacguccggcuggaccuucggggccggcgccgcccugcagauccccuucgcgaugcagauggccuaccgguucaacggcaucggggucacccagaacgugcucuacgagaaccagaagcugaucgccaaccaguucaacagcgccaucggcaagauccaggacucccugagcuccaccgccagcgcgcucgggaagcugcaggacguggucaaccagaacgcccaggcccugaacacgcucgugaagcagcuguccagcaacuucggcgccaucuccagcgugcugaacgacauccucucccgccuggacaaggucgaggccgaggugcagaucgaccggcugaucaccgggcgccuccagagccugcagaccuacgugacccagcagcugauccgggcggccgagauccgcgccagcgccaaccucgccgcgaccaagauguccgagugcguccugggccagagcaagcggguggacuucugcggcaagggguaccaccugauguccuucccccagagcgccccgcacggcguggucuuccuccacgugacguacguccccgcccaggagaagaacuucaccaccgcccccgcgaucugccacgacgggaaggcccacuucccccgcgagggcguguucguguccaacgggacccacugguucgucacgcagcggaacuucuacgagccgcagaucaucaccaccgacaacaccuucgugagcggcaacugcgacguggucaucggcaucgugaacaacacgguguacgacccccugcagcccgagcuggacuccuucaaggaggagcucgacaaguacuucaagaaccacaccagccccgacgucgaccugggggacaucuccggcaucaacgccagcguggugaacauccagaaggagaucgaccgccugaacgaggucgccaagaaccucaacgagucccugaucgaccugcaggagcucgggaaguacgagcaguacaucaaguggccgugguacaucuggcugggcuucaucgccggccugaucgcgaucgugauggugaccaucaugcucugcugcaugaccagcugcugcuccugccugaaggggugcugcagcugcggcuccugcugcaaguucgacgaggacgacagcgagcccguccugaagggggugaagcuccacuacacgugaggacuaguuauaagacugacuagcccgaugggccucccaacgggcccuccuccccuccuugcaccgagauuaaucaaaggcucuuuucagagccaccaaaaaaaaaaaaaaaaaaaaaaaaaaaaaaaaaaaaaaaaaaaaaaaaaaaaaaaaaaaaaaaaaaaaaaaaaaaaaaaaaaaaaaaaaaaaaaaaaaaaa

SEQ ID NO: 24078 - RNA, 4035 nt, Artificial Sequence
  SARS-CoV-2/Wuhan/WIV05/2019__EPI_ISL_402128 spike protein mRNA gc (1-1273)(D614G_M1229I)
aggagaaagcuuaccauguucguguuccugguccuccugccccuggugagcucccagugcgugaaccucaccacccgcacgcagcugccgcccgccuacaccaacagcuucacccggggcgucuacuaccccgacaagguguuccgcuccagcgugcugcacuccacccaggaccucuuccugcccuucuucagcaacgucacgugguuccacgccauccacguguccgggaccaacggcaccaagcgguucgacaacccggugcugcccuucaacgacggggucuacuucgcgagcaccgagaaguccaacaucauccgcggcuggaucuucgggacgacccucgacagcaagacccagucccugcugaucgugaacaacgccaccaacguggucaucaaggugugcgaguuccaguucugcaacgaccccuuccucggcguguacuaccacaagaacaacaagagcuggauggaguccgaguuccgggucuacagcuccgccaacaacugcacguucgaguacgugagccagcccuuccugauggaccuggagggcaagcaggggaacuucaagaaccuccgcgaguucguguucaagaacaucgacggcuacuucaagaucuacuccaagcacaccccgaucaaccugguccgggaccugccccagggguucagcgcccucgagccccugguggaccugcccaucggcaucaacaucacccgcuuccagacccuccuggcccugcaccgguccuaccucacgccgggggacagcagcuccggcuggaccgcgggcgccgccgccuacuacgugggguaccugcagccccgcaccuuccugcucaaguacaacgagaacggcaccaucacggacgcggucgacugcgcccuggacccccugagcgagaccaagugcacccucaaguccuucaccguggagaaggggaucuaccagacgagcaacuuccgggugcagcccaccgaguccaucguccgcuucccgaacaucaccaaccugugccccuucggcgagguguucaacgccacccgguucgccagcgucuacgccuggaaccgcaagcggaucuccaacugcguggcggacuacagcgugcuguacaacuccgccagcuucuccacguucaagugcuacggcgucagccccaccaagcucaacgaccugugcuucaccaacguguacgccgacuccuucgugauccgcggggacgagguccggcagaucgcccccggccagaccgggaagaucgccgacuacaacuacaagcugccggacgacuucacgggcugcgugaucgcguggaacagcaacaaccucgacuccaaggucgggggcaacuacaacuaccuguaccgccuguuccgcaagagcaaccucaagcccuucgagcgggacaucuccaccgagaucuaccaggccggcagcacccccugcaacgggguggagggcuucaacugcuacuucccccugcaguccuacggguuccagccgaccaacggcgugggguaccagcccuaccggguggucgugcugagcuucgagcuccugcacgcccccgccacggugugcggccccaagaaguccaccaaccuggucaagaacaagugcgugaacuucaacuucaacggccucaccgggaccggcgugcugaccgagagcaacaagaaguuccugccguuccagcaguucgggcgcgacaucgccgacacgaccgacgcgguccgcgacccccagacccuggagauccucgacaucacccccugcagcuucggcgggguguccgugaucacgccgggcaccaacaccagcaaccaggucgccgugcuguaccagggcgugaacugcaccgagguccccguggccauccacgccgaccagcugacgcccaccuggcggguguacuccaccggcagcaacgucuuccagacccgcgccgggugccucaucggcgcggagcacgugaacaacuccuacgagugcgacauccccaucggggccggcaucugcgccagcuaccagacgcagaccaacuccccgcggcgcgcccggagcguggcgucccagagcaucaucgccuacaccaugucccugggcgccgagaacagcgucgccuacuccaacaacagcaucgccauccccaccaacuucacgaucuccgugaccaccgagauccugcccgugagcaugaccaagacgagcgucgacugcaccauguacaucugcggggacuccaccgagugcagcaaccuccugcugcaguacggcuccuucugcacccagcucaaccgcgcgcugacggggaucgccguggagcaggacaagaacacccaggagguguucgcccaggucaagcagaucuacaagacgcccccgaucaaggacuucggcggguucaacuucagccagauccugcccgaccccuccaagcccagcaagcgguccuucaucgaggaccuccuguucaacaaggugacccuggccgacgccggcuucaucaagcaguacggcgacugccucggggacaucgcggcccgcgaccugaucugcgcccagaaguucaacggccugaccgugcucccgccccugcugaccgacgagaugaucgcccaguacaccagcgcccuccuggcggggaccaucacguccggcuggaccuucggggccggcgccgcccugcagauccccuucgcgaugcagauggccuaccgguucaacggcaucggggucacccagaacgugcucuacgagaaccagaagcugaucgccaaccaguucaacagcgccaucggcaagauccaggacucccugagcuccaccgccagcgcgcucgggaagcugcaggacguggucaaccagaacgcccaggcccugaacacgcucgugaagcagcuguccagcaacuucggcgccaucuccagcgugcugaacgacauccucucccgccuggacaaggucgaggccgaggugcagaucgaccggcugaucaccgggcgccuccagagccugcagaccuacgugacccagcagcugauccgggcggccgagauccgcgccagcgccaaccucgccgcgaccaagauguccgagugcguccugggccagagcaagcggguggacuucugcggcaagggguaccaccugauguccuucccccagagcgccccgcacggcguggucuuccuccacgugacguacguccccgcccaggagaagaacuucaccaccgcccccgcgaucugccacgacgggaaggcccacuucccccgcgagggcguguucguguccaacgggacccacugguucgucacgcagcggaacuucuacgagccgcagaucaucaccaccgacaacaccuucgugagcggcaacugcgacguggucaucggcaucgugaacaacacgguguacgacccccugcagcccgagcuggacuccuucaaggaggagcucgacaaguacuucaagaaccacaccagccccgacgucgaccugggggacaucuccggcaucaacgccagcguggugaacauccagaaggagaucgaccgccugaacgaggucgccaagaaccucaacgagucccugaucgaccugcaggagcucgggaaguacgagcaguacaucaaguggccgugguacaucuggcugggcuucaucgccggccugaucgcgaucgugaucgugaccaucaugcucugcugcaugaccagcugcugcuccugccugaaggggugcugcagcugcggcuccugcugcaaguucgacgaggacgacagcgagcccguccugaagggggugaagcuccacuacacgugaggacuaguuauaagacugacuagcccgaugggccucccaacgggcccuccuccccuccuugcaccgagauuaaucaaaggcucuuuucagagccaccaaaaaaaaaaaaaaaaaaaaaaaaaaaaaaaaaaaaaaaaaaaaaaaaaaaaaaaaaaaaaaaaaaaaaaaaaaaaaaaaaaaaaaaaaaaaaaaaaaaaa

SEQ ID NO: 24079 - RNA, 4029 nt, Artificial Sequence
  SARS-CoV-2/Wuhan/WIV05/2019__EPI_ISL_402128 spike protein mRNA gc (1-1273)(H69del_V70del_A222V_Y453F_S477N_D614G_I692V)
aggagaaagcuuaccauguucguguuccugguccuccugccccuggugagcucccagugcgugaaccucaccacccgcacgcagcugccgcccgccuacaccaacagcuucacccggggcgucuacuaccccgacaagguguuccgcuccagcgugcugcacuccacccaggaccucuuccugcccuucuucagcaacgucacgugguuccacgccaucuccgggaccaacggcaccaagcgguucgacaacccggugcugcccuucaacgacggggucuacuucgcgagcaccgagaaguccaacaucauccgcggcuggaucuucgggacgacccucgacagcaagacccagucccugcugaucgugaacaacgccaccaacguggucaucaaggugugcgaguuccaguucugcaacgaccccuuccucggcguguacuaccacaagaacaacaagagcuggauggaguccgaguuccgggucuacagcuccgccaacaacugcacguucgaguacgugagccagcccuuccugauggaccuggagggcaagcaggggaacuucaagaaccuccgcgaguucguguucaagaacaucgacggcuacuucaagaucuacuccaagcacaccccgaucaaccugguccgggaccugccccagggguucagcguccucgagccccugguggaccugcccaucggcaucaacaucacccgcuuccagacccuccuggcccugcaccgguccuaccucacgccgggggacagcagcuccggcuggaccgcgggcgccgccgccuacuacgugggguaccugcagccccgcaccuuccugcucaaguacaacgagaacggcaccaucacggacgcggucgacugcgcccuggacccccugagcgagaccaagugcacccucaaguccuucaccguggagaaggggaucuaccagacgagcaacuuccgggugcagcccaccgaguccaucguccgcuucccgaacaucaccaaccugugccccuucggcgagguguucaacgccacccgguucgccagcgucuacgccuggaaccgcaagcggaucuccaacugcguggcggacuacagcgugcuguacaacuccgccagcuucuccacguucaagugcuacggcgucagccccaccaagcucaacgaccugugcuucaccaacguguacgccgacuccuucgugauccgcggggacgagguccggcagaucgcccccggccagaccgggaagaucgccgacuacaacuacaagcugccggacgacuucacgggcugcgugaucgcguggaacagcaacaaccucgacuccaaggucgggggcaacuacaacuaccuguuccgccuguuccgcaagagcaaccucaagcccuucgagcgggacaucuccaccgagaucuaccaggccggcaacacccccugcaacgggguggagggcuucaacugcuacuucccccugcaguccuacggguuccagccgaccaacggcgugggguaccagcccuaccggguggucgugcugagcuucgagcuccugcacgcccccgccacggugugcggccccaagaaguccaccaaccuggucaagaacaagugcgugaacuucaacuucaacggccucaccgggaccggcgugcugaccgagagcaacaagaaguuccugccguuccagcaguucgggcgcgacaucgccgacacgaccgacgcgguccgcgacccccagacccuggagauccucgacaucacccccugcagcuucggcgggguguccgugaucacgccgggcaccaacaccagcaaccaggucgccgugcuguaccagggcgugaacugcaccgagguccccguggccauccacgccgaccagcugacgcccaccuggcggguguacuccaccggcagcaacgucuuccagacccgcgccgggugccucaucggcgcggagcacgugaacaacuccuacgagugcgacauccccaucggggccggcaucugcgccagcuaccagacgcagaccaacuccccgcggcgcgcccggagcguggcgucccagagcgucaucgccuacaccaugucccugggcgccgagaacagcgucgccuacuccaacaacagcaucgccauccccaccaacuucacgaucuccgugaccaccgagauccugcccgugagcaugaccaagacgagcgucgacugcaccauguacaucugcggggacuccaccgagugcagcaaccuccugcugcaguacggcuccuucugcacccagcucaaccgcgcgcugacggggaucgccguggagcaggacaagaacacccaggagguguucgcccaggucaagcagaucuacaagacgcccccgaucaaggacuucggcggguucaacuucagccagauccugcccgaccccuccaagcccagcaagcgguccuucaucgaggaccuccuguucaacaaggugacccuggccgacgccggcuucaucaagcaguacggcgacugccucggggacaucgcggcccgcgaccugaucugcgcccagaaguucaacggccugaccgugcucccgccccugcugaccgacgagaugaucgcccaguacaccagcgcccuccuggcggggaccaucacguccggcuggaccuucggggccggcgccgcccugcagauccccuucgcgaugcagauggccuaccgguucaacggcaucggggucacccagaacgugcucuacgagaaccagaagcugaucgccaaccaguucaacagcgccaucggcaagauccaggacucccugagcuccaccgccagcgcgcucgggaagcugcaggacguggucaaccagaacgcccaggcccugaacacgcucgugaagcagcuguccagcaacuucggcgccaucuccagcgugcugaacgacauccucucccgccuggacaaggucgaggccgaggugcagaucgaccggcugaucaccgggcgccuccagagccugcagaccuacgugacccagcagcugauccgggcggccgagauccgcgccagcgccaaccucgccgcgaccaagauguccgagugcguccugggccagagcaagcggguggacuucugcggcaagggguaccaccugauguccuucccccagagcgccccgcacggcguggucuuccuccacgugacguacguccccgcccaggagaagaacuucaccaccgcccccgcgaucugccacgacgggaaggcccacuucccccgcgagggcguguucguguccaacgggacccacugguucgucacgcagcggaacuucuacgagccgcagaucaucaccaccgacaacaccuucgugagcggcaacugcgacguggucaucggcaucgugaacaacacgguguacgacccccugcagcccgagcuggacuccuucaaggaggagcucgacaaguacuucaagaaccacaccagccccgacgucgaccugggggacaucuccggcaucaacgccagcguggugaacauccagaaggagaucgaccgccugaacgaggucgccaagaaccucaacgagucccugaucgaccugcaggagcucgggaaguacgagcaguacaucaaguggccgugguacaucuggcugggcuucaucgccggccugaucgcgaucgugauggugaccaucaugcucugcugcaugaccagcugcugcuccugccugaaggggugcugcagcugcggcuccugcugcaaguucgacgaggacgacagcgagcccguccugaagggggugaagcuccacuacacgugaggacuaguuauaagacugacuagcccgaugggccucccaacgggcccuccuccccuccuugcaccgagauuaaucaaaggcucuuuucagagccaccaaaaaaaaaaaaaaaaaaaaaaaaaaaaaaaaaaaaaaaaaaaaaaaaaaaaaaaaaaaaaaaaaaaaaaaaaaaaaaaaaaaaaaaaaaaaaaaaaaaaa

SEQ ID NO: 24080 - RNA, 4029 nt, Artificial Sequence
  SARS-CoV-2/Wuhan/WIV05/2019__EPI_ISL_402128 spike protein mRNA gc (1-1273)(H69del_V70del_Y453F_D614G_I692V_M1229I)
aggagaaagcuuaccauguucguguuccugguccuccugccccuggugagcucccagugcgugaaccucaccacccgcacgcagcugccgcccgccuacaccaacagcuucacccggggcgucuacuaccccgacaagguguuccgcuccagcgugcugcacuccacccaggaccucuuccugcccuucuucagcaacgucacgugguuccacgccaucuccgggaccaacggcaccaagcgguucgacaacccggugcugcccuucaacgacggggucuacuucgcgagcaccgagaaguccaacaucauccgcggcuggaucuucgggacgacccucgacagcaagacccagucccugcugaucgugaacaacgccaccaacguggucaucaaggugugcgaguuccaguucugcaacgaccccuuccucggcguguacuaccacaagaacaacaagagcuggauggaguccgaguuccgggucuacagcuccgccaacaacugcacguucgaguacgugagccagcccuuccugauggaccuggagggcaagcaggggaacuucaagaaccuccgcgaguucguguucaagaacaucgacggcuacuucaagaucuacuccaagcacaccccgaucaaccugguccgggaccugccccagggguucagcgcccucgagccccugguggaccugcccaucggcaucaacaucacccgcuuccagacccuccuggcccugcaccgguccuaccucacgccgggggacagcagcuccggcuggaccgcgggcgccgccgccuacuacgugggguaccugcagccccgcaccuuccugcucaaguacaacgagaacggcaccaucacggacgcggucgacugcgcccuggacccccugagcgagaccaagugcacccucaaguccuucaccguggagaaggggaucuaccagacgagcaacuuccgggugcagcccaccgaguccaucguccgcuucccgaacaucaccaaccugugccccuucggcgagguguucaacgccacccgguucgccagcgucuacgccuggaaccgcaagcggaucuccaacugcguggcggacuacagcgugcuguacaacuccgccagcuucuccacguucaagugcuacggcgucagccccaccaagcucaacgaccugugcuucaccaacguguacgccgacuccuucgugauccgcggggacgagguccggcagaucgcccccggccagaccgggaagaucgccgacuacaacuacaagcugccggacgacuucacgggcugcgugaucgcguggaacagcaacaaccucgacuccaaggucgggggcaacuacaacuaccuguuccgccuguuccgcaagagcaaccucaagcccuucgagcgggacaucuccaccgagaucuaccaggccggcagcacccccugcaacgggguggagggcuucaacugcuacuucccccugcaguccuacggguuccagccgaccaacggcgugggguaccagcccuaccggguggucgugcugagcuucgagcuccugcacgcccccgccacggugugcggccccaagaaguccaccaaccuggucaagaacaagugcgugaacuucaacuucaacggccucaccgggaccggcgugcugaccgagagcaacaagaaguuccugccguuccagcaguucgggcgcgacaucgccgacacgaccgacgcgguccgcgacccccagacccuggagauccucgacaucacccccugcagcuucggcgggguguccgugaucacgccgggcaccaacaccagcaaccaggucgccgugcuguaccagggcgugaacugcaccgagguccccguggccauccacgccgaccagcugacgcccaccuggcggguguacuccaccggcagcaacgucuuccagacccgcgccgggugccucaucggcgcggagcacgugaacaacuccuacgagugcgacauccccaucggggccggcaucugcgccagcuaccagacgcagaccaacuccccgcggcgcgcccggagcguggcgucccagagcgugaucgccuacaccaugucccugggcgccgagaacagcgucgccuacuccaacaacagcaucgccauccccaccaacuucacgaucuccgugaccaccgagauccugcccgugagcaugaccaagacgagcgucgacugcaccauguacaucugcggggacuccaccgagugcagcaaccuccugcugcaguacggcuccuucugcacccagcucaaccgcgcgcugacggggaucgccguggagcaggacaagaacacccaggagguguucgcccaggucaagcagaucuacaagacgcccccgaucaaggacuucggcggguucaacuucagccagauccugcccgaccccuccaagcccagcaagcgguccuucaucgaggaccuccuguucaacaaggugacccuggccgacgccggcuucaucaagcaguacggcgacugccucggggacaucgcggcccgcgaccugaucugcgcccagaaguucaacggccugaccgugcucccgccccugcugaccgacgagaugaucgcccaguacaccagcgcccuccuggcggggaccaucacguccggcuggaccuucggggccggcgccgcccugcagauccccuucgcgaugcagauggccuaccgguucaacggcaucggggucacccagaacgugcucuacgagaaccagaagcugaucgccaaccaguucaacagcgccaucggcaagauccaggacucccugagcuccaccgccagcgcgcucgggaagcugcaggacguggucaaccagaacgcccaggcccugaacacgcucgugaagcagcuguccagcaacuucggcgccaucuccagcgugcugaacgacauccucucccgccuggacaaggucgaggccgaggugcagaucgaccggcugaucaccgggcgccuccagagccugcagaccuacgugacccagcagcugauccgggcggccgagauccgcgccagcgccaaccucgccgcgaccaagauguccgagugcguccugggccagagcaagcggguggacuucugcggcaagggguaccaccugauguccuucccccagagcgccccgcacggcguggucuuccuccacgugacguacguccccgcccaggagaagaacuucaccaccgcccccgcgaucugccacgacgggaaggcccacuucccccgcgagggcguguucguguccaacgggacccacugguucgucacgcagcggaacuucuacgagccgcagaucaucaccaccgacaacaccuucgugagcggcaacugcgacguggucaucggcaucgugaacaacacgguguacgacccccugcagcccgagcuggacuccuucaaggaggagcucgacaaguacuucaagaaccacaccagccccgacgucgaccugggggacaucuccggcaucaacgccagcguggugaacauccagaaggagaucgaccgccugaacgaggucgccaagaaccucaacgagucccugaucgaccugcaggagcucgggaaguacgagcaguacaucaaguggccgugguacaucuggcugggcuucaucgccggccugaucgcgaucgugaucgugaccaucaugcucugcugcaugaccagcugcugcuccugccugaaggggugcugcagcugcggcuccugcugcaaguucgacgaggacgacagcgagcccguccugaagggggugaagcuccacuacacgugaggacuaguuauaagacugacuagcccgaugggccucccaacgggcccuccuccccuccuugcaccgagauuaaucaaaggcucuuuucagagccaccaaaaaaaaaaaaaaaaaaaaaaaaaaaaaaaaaaaaaaaaaaaaaaaaaaaaaaaaaaaaaaaaaaaaaaaaaaaaaaaaaaaaaaaaaaaaaaaaaaaaa

SEQ ID NO: 24081 - RNA, 4026 nt, Artificial Sequence
  SARS-CoV-2/Wuhan/WIV05/2019__EPI_ISL_402128 spike protein mRNA gc (1-1273)(H69del_V70del_Y144del_N501Y_A570D_D614G_P681H_T716I_S982 A_D1118H)
aggagaaagcuuaccauguucguguuccugguccuccugccccuggugagcucccagugcgugaaccucaccacccgcacgcagcugccgcccgccuacaccaacagcuucacccggggcgucuacuaccccgacaagguguuccgcuccagcgugcugcacuccacccaggaccucuuccugcccuucuucagcaacgucacgugguuccacgccaucuccgggaccaacggcaccaagcgguucgacaacccggugcugcccuucaacgacggggucuacuucgcgagcaccgagaaguccaacaucauccgcggcuggaucuucgggacgacccucgacagcaagacccagucccugcugaucgugaacaacgccaccaacguggucaucaaggugugcgaguuccaguucugcaacgaccccuuccucggcguguaccacaagaacaacaagagcuggauggaguccgaguuccgggucuacagcuccgccaacaacugcacguucgaguacgugagccagcccuuccugauggaccuggagggcaagcaggggaacuucaagaaccuccgcgaguucguguucaagaacaucgacggcuacuucaagaucuacuccaagcacaccccgaucaaccugguccgggaccugccccagggguucagcgcccucgagccccugguggaccugcccaucggcaucaacaucacccgcuuccagacccuccuggcccugcaccgguccuaccucacgccgggggacagcagcuccggcuggaccgcgggcgccgccgccuacuacgugggguaccugcagccccgcaccuuccugcucaaguacaacgagaacggcaccaucacggacgcggucgacugcgcccuggacccccugagcgagaccaagugcacccucaaguccuucaccguggagaaggggaucuaccagacgagcaacuuccgggugcagcccaccgaguccaucguccgcuucccgaacaucaccaaccugugccccuucggcgagguguucaacgccacccgguucgccagcgucuacgccuggaaccgcaagcggaucuccaacugcguggcggacuacagcgugcuguacaacuccgccagcuucuccacguucaagugcuacggcgucagccccaccaagcucaacgaccugugcuucaccaacguguacgccgacuccuucgugauccgcggggacgagguccggcagaucgcccccggccagaccgggaagaucgccgacuacaacuacaagcugccggacgacuucacgggcugcgugaucgcguggaacagcaacaaccucgacuccaaggucgggggcaacuacaacuaccuguaccgccuguuccgcaagagcaaccucaagcccuucgagcgggacaucuccaccgagaucuaccaggccggcagcacccccugcaacgggguggagggcuucaacugcuacuucccccugcaguccuacggguuccagccgaccuacggcgugggguaccagcccuaccggguggucgugcugagcuucgagcuccugcacgcccccgccacggugugcggccccaagaaguccaccaaccuggucaagaacaagugcgugaacuucaacuucaacggccucaccgggaccggcgugcugaccgagagcaacaagaaguuccugccguuccagcaguucgggcgcgacaucgacgacacgaccgacgcgguccgcgacccccagacccuggagauccucgacaucacccccugcagcuucggcgggguguccgugaucacgccgggcaccaacaccagcaaccaggucgccgugcuguaccagggcgugaacugcaccgagguccccguggccauccacgccgaccagcugacgcccaccuggcggguguacuccaccggcagcaacgucuuccagacccgcgccgggugccucaucggcgcggagcacgugaacaacuccuacgagugcgacauccccaucggggccggcaucugcgccagcuaccagacgcagaccaacucccaccggcgcgcccggagcguggcgucccagagcaucaucgccuacaccaugucccugggcgccgagaacagcgucgccuacuccaacaacagcaucgccauccccaucaacuucacgaucuccgugaccaccgagauccugcccgugagcaugaccaagacgagcgucgacugcaccauguacaucugcggggacuccaccgagugcagcaaccuccugcugcaguacggcuccuucugcacccagcucaaccgcgcgcugacggggaucgccguggagcaggacaagaacacccaggagguguucgcccaggucaagcagaucuacaagacgcccccgaucaaggacuucggcggguucaacuucagccagauccugcccgaccccuccaagcccagcaagcgguccuucaucgaggaccuccuguucaacaaggugacccuggccgacgccggcuucaucaagcaguacggcgacugccucggggacaucgcggcccgcgaccugaucugcgcccagaaguucaacggccugaccgugcucccgccccugcugaccgacgagaugaucgcccaguacaccagcgcccuccuggcggggaccaucacguccggcuggaccuucggggccggcgccgcccugcagauccccuucgcgaugcagauggccuaccgguucaacggcaucggggucacccagaacgugcucuacgagaaccagaagcugaucgccaaccaguucaacagcgccaucggcaagauccaggacucccugagcuccaccgccagcgcgcucgggaagcugcaggacguggucaaccagaacgcccaggcccugaacacgcucgugaagcagcuguccagcaacuucggcgccaucuccagcgugcugaacgacauccucgcccgccuggacaaggucgaggccgaggugcagaucgaccggcugaucaccgggcgccuccagagccugcagaccuacgugacccagcagcugauccgggcggccgagauccgcgccagcgccaaccucgccgcgaccaagauguccgagugcguccugggccagagcaagcggguggacuucugcggcaagggguaccaccugauguccuucccccagagcgccccgcacggcguggucuuccuccacgugacguacguccccgcccaggagaagaacuucaccaccgcccccgcgaucugccacgacgggaaggcccacuucccccgcgagggcguguucguguccaacgggacccacugguucgucacgcagcggaacuucuacgagccgcagaucaucaccacccacaacaccuucgugagcggcaacugcgacguggucaucggcaucgugaacaacacgguguacgacccccugcagcccgagcuggacuccuucaaggaggagcucgacaaguacuucaagaaccacaccagccccgacgucgaccugggggacaucuccggcaucaacgccagcguggugaacauccagaaggagaucgaccgccugaacgaggucgccaagaaccucaacgagucccugaucgaccugcaggagcucgggaaguacgagcaguacaucaaguggccgugguacaucuggcugggcuucaucgccggccugaucgcgaucgugauggugaccaucaugcucugcugcaugaccagcugcugcuccugccugaaggggugcugcagcugcggcuccugcugcaaguucgacgaggacgacagcgagcccguccugaagggggugaagcuccacuacacgugaggacuaguuauaagacugacuagcccgaugggccucccaacgggcccuccuccccuccuugcaccgagauuaaucaaaggcucuuuucagagccaccaaaaaaaaaaaaaaaaaaaaaaaaaaaaaaaaaaaaaaaaaaaaaaaaaaaaaaaaaaaaaaaaaaaaaaaaaaaaaaaaaaaaaaaaaaaaaaaaaaaaa

SEQ ID NO: 24082 - RNA, 4035 nt, Artificial Sequence
  SARS-CoV-2/Wuhan/WIV05/2019__EPI_ISL_402128 spike protein mRNA gc (1-1273)(K417N_E484K_N501Y_D614G)
aggagaaagcuuaccauguucguguuccugguccuccugccccuggugagcucccagugcgugaaccucaccacccgcacgcagcugccgcccgccuacaccaacagcuucacccggggcgucuacuaccccgacaagguguuccgcuccagcgugcugcacuccacccaggaccucuuccugcccuucuucagcaacgucacgugguuccacgccauccacguguccgggaccaacggcaccaagcgguucgacaacccggugcugcccuucaacgacggggucuacuucgcgagcaccgagaaguccaacaucauccgcggcuggaucuucgggacgacccucgacagcaagacccagucccugcugaucgugaacaacgccaccaacguggucaucaaggugugcgaguuccaguucugcaacgaccccuuccucggcguguacuaccacaagaacaacaagagcuggauggaguccgaguuccgggucuacagcuccgccaacaacugcacguucgaguacgugagccagcccuuccugauggaccuggagggcaagcaggggaacuucaagaaccuccgcgaguucguguucaagaacaucgacggcuacuucaagaucuacuccaagcacaccccgaucaaccugguccgggaccugccccagggguucagcgcccucgagccccugguggaccugcccaucggcaucaacaucacccgcuuccagacccuccuggcccugcaccgguccuaccucacgccgggggacagcagcuccggcuggaccgcgggcgccgccgccuacuacgugggguaccugcagccccgcaccuuccugcucaaguacaacgagaacggcaccaucacggacgcggucgacugcgcccuggacccccugagcgagaccaagugcacccucaaguccuucaccguggagaaggggaucuaccagacgagcaacuuccgggugcagcccaccgaguccaucguccgcuucccgaacaucaccaaccugugccccuucggcgagguguucaacgccacccgguucgccagcgucuacgccuggaaccgcaagcggaucuccaacugcguggcggacuacagcgugcuguacaacuccgccagcuucuccacguucaagugcuacggcgucagccccaccaagcucaacgaccugugcuucaccaacguguacgccgacuccuucgugauccgcggggacgagguccggcagaucgcccccggccagaccgggaacaucgccgacuacaacuacaagcugccggacgacuucacgggcugcgugaucgcguggaacagcaacaaccucgacuccaaggucgggggcaacuacaacuaccuguaccgccuguuccgcaagagcaaccucaagcccuucgagcgggacaucuccaccgagaucuaccaggccggcagcacccccugcaacggggugaagggcuucaacugcuacuucccccugcaguccuacggguuccagccgaccuacggcgugggguaccagcccuaccggguggucgugcugagcuucgagcuccugcacgcccccgccacggugugcggccccaagaaguccaccaaccuggucaagaacaagugcgugaacuucaacuucaacggccucaccgggaccggcgugcugaccgagagcaacaagaaguuccugccguuccagcaguucgggcgcgacaucgccgacacgaccgacgcgguccgcgacccccagacccuggagauccucgacaucacccccugcagcuucggcgggguguccgugaucacgccgggcaccaacaccagcaaccaggucgccgugcuguaccagggcgugaacugcaccgagguccccguggccauccacgccgaccagcugacgcccaccuggcggguguacuccaccggcagcaacgucuuccagacccgcgccgggugccucaucggcgcggagcacgugaacaacuccuacgagugcgacauccccaucggggccggcaucugcgccagcuaccagacgcagaccaacuccccgcggcgcgcccggagcguggcgucccagagcaucaucgccuacaccaugucccugggcgccgagaacagcgucgccuacuccaacaacagcaucgccauccccaccaacuucacgaucuccgugaccaccgagauccugcccgugagcaugaccaagacgagcgucgacugcaccauguacaucugcggggacuccaccgagugcagcaaccuccugcugcaguacggcuccuucugcacccagcucaaccgcgcgcugacggggaucgccguggagcaggacaagaacacccaggagguguucgcccaggucaagcagaucuacaagacgcccccgaucaaggacuucggcggguucaacuucagccagauccugcccgaccccuccaagcccagcaagcgguccuucaucgaggaccuccuguucaacaaggugacccuggccgacgccggcuucaucaagcaguacggcgacugccucggggacaucgcggcccgcgaccugaucugcgcccagaaguucaacggccugaccgugcucccgccccugcugaccgacgagaugaucgcccaguacaccagcgcccuccuggcggggaccaucacguccggcuggaccuucggggccggcgccgcccugcagauccccuucgcgaugcagauggccuaccgguucaacggcaucggggucacccagaacgugcucuacgagaaccagaagcugaucgccaaccaguucaacagcgccaucggcaagauccaggacucccugagcuccaccgccagcgcgcucgggaagcugcaggacguggucaaccagaacgcccaggcccugaacacgcucgugaagcagcuguccagcaacuucggcgccaucuccagcgugcugaacgacauccucucccgccuggacaaggucgaggccgaggugcagaucgaccggcugaucaccgggcgccuccagagccugcagaccuacgugacccagcagcugauccgggcggccgagauccgcgccagcgccaaccucgccgcgaccaagauguccgagugcguccugggccagagcaagcggguggacuucugcggcaagggguaccaccugauguccuucccccagagcgccccgcacggcguggucuuccuccacgugacguacguccccgcccaggagaagaacuucaccaccgcccccgcgaucugccacgacgggaaggcccacuucccccgcgagggcguguucguguccaacgggacccacugguucgucacgcagcggaacuucuacgagccgcagaucaucaccaccgacaacaccuucgugagcggcaacugcgacguggucaucggcaucgugaacaacacgguguacgacccccugcagcccgagcuggacuccuucaaggaggagcucgacaaguacuucaagaaccacaccagccccgacgucgaccugggggacaucuccggcaucaacgccagcguggugaacauccagaaggagaucgaccgccugaacgaggucgccaagaaccucaacgagucccugaucgaccugcaggagcucgggaaguacgagcaguacaucaaguggccgugguacaucuggcugggcuucaucgccggccugaucgcgaucgugauggugaccaucaugcucugcugcaugaccagcugcugcuccugccugaaggggugcugcagcugcggcuccugcugcaaguucgacgaggacgacagcgagcccguccugaagggggugaagcuccacuacacgugaggacuaguuauaagacugacuagcccgaugggccucccaacgggcccuccuccccuccuugcaccgagauuaaucaaaggcucuuuucagagccaccaaaaaaaaaaaaaaaaaaaaaaaaaaaaaaaaaaaaaaaaaaaaaaaaaaaaaaaaaaaaaaaaaaaaaaaaaaaaaaaaaaaaaaaaaaaaaaaaaaaaa

SEQ ID NO: 24083 - RNA, 4026 nt, Artificial Sequence
  SARS-CoV-2/Wuhan/WIV05/2019__EPI_ISL_402128 spike protein mRNA gc (1-1273)(L18F_D80A_D215G_L242del_A243del_L244del_R246I_K417N_E484 K_N501Y_D614G_A701V)
aggagaaagcuuaccauguucguguuccugguccuccugccccuggugagcucccagugcgugaacuucaccacccgcacgcagcugccgcccgccuacaccaacagcuucacccggggcgucuacuaccccgacaagguguuccgcuccagcgugcugcacuccacccaggaccucuuccugcccuucuucagcaacgucacgugguuccacgccauccacguguccgggaccaacggcaccaagcgguucgccaacccggugcugcccuucaacgacggggucuacuucgcgagcaccgagaaguccaacaucauccgcggcuggaucuucgggacgacccucgacagcaagacccagucccugcugaucgugaacaacgccaccaacguggucaucaaggugugcgaguuccaguucugcaacgaccccuuccucggcguguacuaccacaagaacaacaagagcuggauggaguccgaguuccgggucuacagcuccgccaacaacugcacguucgaguacgugagccagcccuuccugauggaccuggagggcaagcaggggaacuucaagaaccuccgcgaguucguguucaagaacaucgacggcuacuucaagaucuacuccaagcacaccccgaucaaccugguccggggccugccccagggguucagcgcccucgagccccugguggaccugcccaucggcaucaacaucacccgcuuccagacccuccacaucuccuaccucacgccgggggacagcagcuccggcuggaccgcgggcgccgccgccuacuacgugggguaccugcagccccgcaccuuccugcucaaguacaacgagaacggcaccaucacggacgcggucgacugcgcccuggacccccugagcgagaccaagugcacccucaaguccuucaccguggagaaggggaucuaccagacgagcaacuuccgggugcagcccaccgaguccaucguccgcuucccgaacaucaccaaccugugccccuucggcgagguguucaacgccacccgguucgccagcgucuacgccuggaaccgcaagcggaucuccaacugcguggcggacuacagcgugcuguacaacuccgccagcuucuccacguucaagugcuacggcgucagccccaccaagcucaacgaccugugcuucaccaacguguacgccgacuccuucgugauccgcggggacgagguccggcagaucgcccccggccagaccgggaacaucgccgacuacaacuacaagcugccggacgacuucacgggcugcgugaucgcguggaacagcaacaaccucgacuccaaggucgggggcaacuacaacuaccuguaccgccuguuccgcaagagcaaccucaagcccuucgagcgggacaucuccaccgagaucuaccaggccggcagcacccccugcaacggggugaagggcuucaacugcuacuucccccugcaguccuacggguuccagccgaccuacggcgugggguaccagcccuaccggguggucgugcugagcuucgagcuccugcacgcccccgccacggugugcggccccaagaaguccaccaaccuggucaagaacaagugcgugaacuucaacuucaacggccucaccgggaccggcgugcugaccgagagcaacaagaaguuccugccguuccagcaguucgggcgcgacaucgccgacacgaccgacgcgguccgcgacccccagacccuggagauccucgacaucacccccugcagcuucggcgggguguccgugaucacgccgggcaccaacaccagcaaccaggucgccgugcuguaccagggcgugaacugcaccgagguccccguggccauccacgccgaccagcugacgcccaccuggcggguguacuccaccggcagcaacgucuuccagacccgcgccgggugccucaucggcgcggagcacgugaacaacuccuacgagugcgacauccccaucggggccggcaucugcgccagcuaccagacgcagaccaacuccccgcggcgcgcccggagcguggcgucccagagcaucaucgccuacaccaugucccugggcguggagaacagcgucgccuacuccaacaacagcaucgccauccccaccaacuucacgaucuccgugaccaccgagauccugcccgugagcaugaccaagacgagcgucgacugcaccauguacaucugcggggacuccaccgagugcagcaaccuccugcugcaguacggcuccuucugcacccagcucaaccgcgcgcugacggggaucgccguggagcaggacaagaacacccaggagguguucgcccaggucaagcagaucuacaagacgcccccgaucaaggacuucggcggguucaacuucagccagauccugcccgaccccuccaagcccagcaagcgguccuucaucgaggaccuccuguucaacaaggugacccuggccgacgccggcuucaucaagcaguacggcgacugccucggggacaucgcggcccgcgaccugaucugcgcccagaaguucaacggccugaccgugcucccgccccugcugaccgacgagaugaucgcccaguacaccagcgcccuccuggcggggaccaucacguccggcuggaccuucggggccggcgccgcccugcagauccccuucgcgaugcagauggccuaccgguucaacggcaucggggucacccagaacgugcucuacgagaaccagaagcugaucgccaaccaguucaacagcgccaucggcaagauccaggacucccugagcuccaccgccagcgcgcucgggaagcugcaggacguggucaaccagaacgcccaggcccugaacacgcucgugaagcagcuguccagcaacuucggcgccaucuccagcgugcugaacgacauccucucccgccuggacaaggucgaggccgaggugcagaucgaccggcugaucaccgggcgccuccagagccugcagaccuacgugacccagcagcugauccgggcggccgagauccgcgccagcgccaaccucgccgcgaccaagauguccgagugcguccugggccagagcaagcggguggacuucugcggcaagggguaccaccugauguccuucccccagagcgccccgcacggcguggucuuccuccacgugacguacguccccgcccaggagaagaacuucaccaccgcccccgcgaucugccacgacgggaaggcccacuucccccgcgagggcguguucguguccaacgggacccacugguucgucacgcagcggaacuucuacgagccgcagaucaucaccaccgacaacaccuucgugagcggcaacugcgacguggucaucggcaucgugaacaacacgguguacgacccccugcagcccgagcuggacuccuucaaggaggagcucgacaaguacuucaagaaccacaccagccccgacgucgaccugggggacaucuccggcaucaacgccagcguggugaacauccagaaggagaucgaccgccugaacgaggucgccaagaaccucaacgagucccugaucgaccugcaggagcucgggaaguacgagcaguacaucaaguggccgugguacaucuggcugggcuucaucgccggccugaucgcgaucgugauggugaccaucaugcucugcugcaugaccagcugcugcuccugccugaaggggugcugcagcugcggcuccugcugcaaguucgacgaggacgacagcgagcccguccugaagggggugaagcuccacuacacgugaggacuaguuauaagacugacuagcccgaugggccucccaacgggcccuccuccccuccuugcaccgagauuaaucaaaggcucuuuucagagccaccaaaaaaaaaaaaaaaaaaaaaaaaaaaaaaaaaaaaaaaaaaaaaaaaaaaaaaaaaaaaaaaaaaaaaaaaaaaaaaaaaaaaaaaaaaaaaaaaaaaaa

SEQ ID NO: 24084 - RNA, 4035 nt, Artificial Sequence
  SARS-CoV-2/Wuhan/WIV05/2019__EPI_ISL_402128 spike protein mRNA gc (1-1273)(E484K_D614G)
aggagaaagcuuaccauguucguguuccugguccuccugccccuggugagcucccagugcgugaaccucaccacccgcacgcagcugccgcccgccuacaccaacagcuucacccggggcgucuacuaccccgacaagguguuccgcuccagcgugcugcacuccacccaggaccucuuccugcccuucuucagcaacgucacgugguuccacgccauccacguguccgggaccaacggcaccaagcgguucgacaacccggugcugcccuucaacgacggggucuacuucgcgagcaccgagaaguccaacaucauccgcggcuggaucuucgggacgacccucgacagcaagacccagucccugcugaucgugaacaacgccaccaacguggucaucaaggugugcgaguuccaguucugcaacgaccccuuccucggcguguacuaccacaagaacaacaagagcuggauggaguccgaguuccgggucuacagcuccgccaacaacugcacguucgaguacgugagccagcccuuccugauggaccuggagggcaagcaggggaacuucaagaaccuccgcgaguucguguucaagaacaucgacggcuacuucaagaucuacuccaagcacaccccgaucaaccugguccgggaccugccccagggguucagcgcccucgagccccugguggaccugcccaucggcaucaacaucacccgcuuccagacccuccuggcccugcaccgguccuaccucacgccgggggacagcagcuccggcuggaccgcgggcgccgccgccuacuacgugggguaccugcagccccgcaccuuccugcucaaguacaacgagaacggcaccaucacggacgcggucgacugcgcccuggacccccugagcgagaccaagugcacccucaaguccuucaccguggagaaggggaucuaccagacgagcaacuuccgggugcagcccaccgaguccaucguccgcuucccgaacaucaccaaccugugccccuucggcgagguguucaacgccacccgguucgccagcgucuacgccuggaaccgcaagcggaucuccaacugcguggcggacuacagcgugcuguacaacuccgccagcuucuccacguucaagugcuacggcgucagccccaccaagcucaacgaccugugcuucaccaacguguacgccgacuccuucgugauccgcggggacgagguccggcagaucgcccccggccagaccgggaagaucgccgacuacaacuacaagcugccggacgacuucacgggcugcgugaucgcguggaacagcaacaaccucgacuccaaggucgggggcaacuacaacuaccuguaccgccuguuccgcaagagcaaccucaagcccuucgagcgggacaucuccaccgagaucuaccaggccggcagcacccccugcaacggggugaagggcuucaacugcuacuucccccugcaguccuacggguuccagccgaccaacggcgugggguaccagcccuaccggguggucgugcugagcuucgagcuccugcacgcccccgccacggugugcggccccaagaaguccaccaaccuggucaagaacaagugcgugaacuucaacuucaacggccucaccgggaccggcgugcugaccgagagcaacaagaaguuccugccguuccagcaguucgggcgcgacaucgccgacacgaccgacgcgguccgcgacccccagacccuggagauccucgacaucacccccugcagcuucggcgggguguccgugaucacgccgggcaccaacaccagcaaccaggucgccgugcuguaccagggcgugaacugcaccgagguccccguggccauccacgccgaccagcugacgcccaccuggcggguguacuccaccggcagcaacgucuuccagacccgcgccgggugccucaucggcgcggagcacgugaacaacuccuacgagugcgacauccccaucggggccggcaucugcgccagcuaccagacgcagaccaacuccccgcggcgcgcccggagcguggcgucccagagcaucaucgccuacaccaugucccugggcgccgagaacagcgucgccuacuccaacaacagcaucgccauccccaccaacuucacgaucuccgugaccaccgagauccugcccgugagcaugaccaagacgagcgucgacugcaccauguacaucugcggggacuccaccgagugcagcaaccuccugcugcaguacggcuccuucugcacccagcucaaccgcgcgcugacggggaucgccguggagcaggacaagaacacccaggagguguucgcccaggucaagcagaucuacaagacgcccccgaucaaggacuucggcggguucaacuucagccagauccugcccgaccccuccaagcccagcaagcgguccuucaucgaggaccuccuguucaacaaggugacccuggccgacgccggcuucaucaagcaguacggcgacugccucggggacaucgcggcccgcgaccugaucugcgcccagaaguucaacggccugaccgugcucccgccccugcugaccgacgagaugaucgcccaguacaccagcgcccuccuggcggggaccaucacguccggcuggaccuucggggccggcgccgcccugcagauccccuucgcgaugcagauggccuaccgguucaacggcaucggggucacccagaacgugcucuacgagaaccagaagcugaucgccaaccaguucaacagcgccaucggcaagauccaggacucccugagcuccaccgccagcgcgcucgggaagcugcaggacguggucaaccagaacgcccaggcccugaacacgcucgugaagcagcuguccagcaacuucggcgccaucuccagcgugcugaacgacauccucucccgccuggacaaggucgaggccgaggugcagaucgaccggcugaucaccgggcgccuccagagccugcagaccuacgugacccagcagcugauccgggcggccgagauccgcgccagcgccaaccucgccgcgaccaagauguccgagugcguccugggccagagcaagcggguggacuucugcggcaagggguaccaccugauguccuucccccagagcgccccgcacggcguggucuuccuccacgugacguacguccccgcccaggagaagaacuucaccaccgcccccgcgaucugccacgacgggaaggcccacuucccccgcgagggcguguucguguccaacgggacccacugguucgucacgcagcggaacuucuacgagccgcagaucaucaccaccgacaacaccuucgugagcggcaacugcgacguggucaucggcaucgugaacaacacgguguacgacccccugcagcccgagcuggacuccuucaaggaggagcucgacaaguacuucaagaaccacaccagccccgacgucgaccugggggacaucuccggcaucaacgccagcguggugaacauccagaaggagaucgaccgccugaacgaggucgccaagaaccucaacgagucccugaucgaccugcaggagcucgggaaguacgagcaguacaucaaguggccgugguacaucuggcugggcuucaucgccggccugaucgcgaucgugauggugaccaucaugcucugcugcaugaccagcugcugcuccugccugaaggggugcugcagcugcggcuccugcugcaaguucgacgaggacgacagcgagcccguccugaagggggugaagcuccacuacacgugaggacuaguuauaagacugacuagcccgaugggccucccaacgggcccuccuccccuccuugcaccgagauuaaucaaaggcucuuuucagagccaccaaaaaaaaaaaaaaaaaaaaaaaaaaaaaaaaaaaaaaaaaaaaaaaaaaaaaaaaaaaaaaaaaaaaaaaaaaaaaaaaaaaaaaaaaaaaaaaaaaaaa

SEQ ID NO: 24085 - RNA, 4035 nt, Artificial Sequence
  SARS-CoV-2/Wuhan/WIV05/2019__EPI_ISL_402128 spike protein mRNA gc (1-1273)(L18F_T20N_P26S_D138Y_R190S_K417T_E484K_N501Y_D614G_H655Y _T1027I)
aggagaaagcuuaccauguucguguuccugguccuccugccccuggugagcucccagugcgugaacuucaccaaccgcacgcagcugccgagcgccuacaccaacagcuucacccggggcgucuacuaccccgacaagguguuccgcuccagcgugcugcacuccacccaggaccucuuccugcccuucuucagcaacgucacgugguuccacgccauccacguguccgggaccaacggcaccaagcgguucgacaacccggugcugcccuucaacgacggggucuacuucgcgagcaccgagaaguccaacaucauccgcggcuggaucuucgggacgacccucgacagcaagacccagucccugcugaucgugaacaacgccaccaacguggucaucaaggugugcgaguuccaguucugcaacuaccccuuccucggcguguacuaccacaagaacaacaagagcuggauggaguccgaguuccgggucuacagcuccgccaacaacugcacguucgaguacgugagccagcccuuccugauggaccuggagggcaagcaggggaacuucaagaaccucagcgaguucguguucaagaacaucgacggcuacuucaagaucuacuccaagcacaccccgaucaaccugguccgggaccugccccagggguucagcgcccucgagccccugguggaccugcccaucggcaucaacaucacccgcuuccagacccuccuggcccugcaccgguccuaccucacgccgggggacagcagcuccggcuggaccgcgggcgccgccgccuacuacgugggguaccugcagccccgcaccuuccugcucaaguacaacgagaacggcaccaucacggacgcggucgacugcgcccuggacccccugagcgagaccaagugcacccucaaguccuucaccguggagaaggggaucuaccagacgagcaacuuccgggugcagcccaccgaguccaucguccgcuucccgaacaucaccaaccugugccccuucggcgagguguucaacgccacccgguucgccagcgucuacgccuggaaccgcaagcggaucuccaacugcguggcggacuacagcgugcuguacaacuccgccagcuucuccacguucaagugcuacggcgucagccccaccaagcucaacgaccugugcuucaccaacguguacgccgacuccuucgugauccgcggggacgagguccggcagaucgcccccggccagaccgggaccaucgccgacuacaacuacaagcugccggacgacuucacgggcugcgugaucgcguggaacagcaacaaccucgacuccaaggucgggggcaacuacaacuaccuguaccgccuguuccgcaagagcaaccucaagcccuucgagcgggacaucuccaccgagaucuaccaggccggcagcacccccugcaacggggugaagggcuucaacugcuacuucccccugcaguccuacggguuccagccgaccuacggcgugggguaccagcccuaccggguggucgugcugagcuucgagcuccugcacgcccccgccacggugugcggccccaagaaguccaccaaccuggucaagaacaagugcgugaacuucaacuucaacggccucaccgggaccggcgugcugaccgagagcaacaagaaguuccugccguuccagcaguucgggcgcgacaucgccgacacgaccgacgcgguccgcgacccccagacccuggagauccucgacaucacccccugcagcuucggcgggguguccgugaucacgccgggcaccaacaccagcaaccaggucgccgugcuguaccagggcgugaacugcaccgagguccccguggccauccacgccgaccagcugacgcccaccuggcggguguacuccaccggcagcaacgucuuccagacccgcgccgggugccucaucggcgcggaguacgugaacaacuccuacgagugcgacauccccaucggggccggcaucugcgccagcuaccagacgcagaccaacuccccgcggcgcgcccggagcguggcgucccagagcaucaucgccuacaccaugucccugggcgccgagaacagcgucgccuacuccaacaacagcaucgccauccccaccaacuucacgaucuccgugaccaccgagauccugcccgugagcaugaccaagacgagcgucgacugcaccauguacaucugcggggacuccaccgagugcagcaaccuccugcugcaguacggcuccuucugcacccagcucaaccgcgcgcugacggggaucgccguggagcaggacaagaacacccaggagguguucgcccaggucaagcagaucuacaagacgcccccgaucaaggacuucggcggguucaacuucagccagauccugcccgaccccuccaagcccagcaagcgguccuucaucgaggaccuccuguucaacaaggugacccuggccgacgccggcuucaucaagcaguacggcgacugccucggggacaucgcggcccgcgaccugaucugcgcccagaaguucaacggccugaccgugcucccgccccugcugaccgacgagaugaucgcccaguacaccagcgcccuccuggcggggaccaucacguccggcuggaccuucggggccggcgccgcccugcagauccccuucgcgaugcagauggccuaccgguucaacggcaucggggucacccagaacgugcucuacgagaaccagaagcugaucgccaaccaguucaacagcgccaucggcaagauccaggacucccugagcuccaccgccagcgcgcucgggaagcugcaggacguggucaaccagaacgcccaggcccugaacacgcucgugaagcagcuguccagcaacuucggcgccaucuccagcgugcugaacgacauccucucccgccuggacaaggucgaggccgaggugcagaucgaccggcugaucaccgggcgccuccagagccugcagaccuacgugacccagcagcugauccgggcggccgagauccgcgccagcgccaaccucgccgcgaucaagauguccgagugcguccugggccagagcaagcggguggacuucugcggcaagggguaccaccugauguccuucccccagagcgccccgcacggcguggucuuccuccacgugacguacguccccgcccaggagaagaacuucaccaccgcccccgcgaucugccacgacgggaaggcccacuucccccgcgagggcguguucguguccaacgggacccacugguucgucacgcagcggaacuucuacgagccgcagaucaucaccaccgacaacaccuucgugagcggcaacugcgacguggucaucggcaucgugaacaacacgguguacgacccccugcagcccgagcuggacuccuucaaggaggagcucgacaaguacuucaagaaccacaccagccccgacgucgaccugggggacaucuccggcaucaacgccagcguggugaacauccagaaggagaucgaccgccugaacgaggucgccaagaaccucaacgagucccugaucgaccugcaggagcucgggaaguacgagcaguacaucaaguggccgugguacaucuggcugggcuucaucgccggccugaucgcgaucgugauggugaccaucaugcucugcugcaugaccagcugcugcuccugccugaaggggugcugcagcugcggcuccugcugcaaguucgacgaggacgacagcgagcccguccugaagggggugaagcuccacuacacgugaggacuaguuauaagacugacuagcccgaugggccucccaacgggcccuccuccccuccuugcaccgagauuaaucaaaggcucuuuucagagccaccaaaaaaaaaaaaaaaaaaaaaaaaaaaaaaaaaaaaaaaaaaaaaaaaaaaaaaaaaaaaaaaaaaaaaaaaaaaaaaaaaaaaaaaaaaaaaaaaaaaaa

SEQ ID NO: 24086 - RNA, 4035 nt, Artificial Sequence
  SARS-CoV-2/Wuhan/WIV05/2019__EPI_ISL_402128 spike protein mRNA gc (1-1273)(S13I_W152C_L452R_D614G)
aggagaaagcuuaccauguucguguuccugguccuccugccccuggugagcauccagugcgugaaccucaccacccgcacgcagcugccgcccgccuacaccaacagcuucacccggggcgucuacuaccccgacaagguguuccgcuccagcgugcugcacuccacccaggaccucuuccugcccuucuucagcaacgucacgugguuccacgccauccacguguccgggaccaacggcaccaagcgguucgacaacccggugcugcccuucaacgacggggucuacuucgcgagcaccgagaaguccaacaucauccgcggcuggaucuucgggacgacccucgacagcaagacccagucccugcugaucgugaacaacgccaccaacguggucaucaaggugugcgaguuccaguucugcaacgaccccuuccucggcguguacuaccacaagaacaacaagagcugcauggaguccgaguuccgggucuacagcuccgccaacaacugcacguucgaguacgugagccagcccuuccugauggaccuggagggcaagcaggggaacuucaagaaccuccgcgaguucguguucaagaacaucgacggcuacuucaagaucuacuccaagcacaccccgaucaaccugguccgggaccugccccagggguucagcgcccucgagccccugguggaccugcccaucggcaucaacaucacccgcuuccagacccuccuggcccugcaccgguccuaccucacgccgggggacagcagcuccggcuggaccgcgggcgccgccgccuacuacgugggguaccugcagccccgcaccuuccugcucaaguacaacgagaacggcaccaucacggacgcggucgacugcgcccuggacccccugagcgagaccaagugcacccucaaguccuucaccguggagaaggggaucuaccagacgagcaacuuccgggugcagcccaccgaguccaucguccgcuucccgaacaucaccaaccugugccccuucggcgagguguucaacgccacccgguucgccagcgucuacgccuggaaccgcaagcggaucuccaacugcguggcggacuacagcgugcuguacaacuccgccagcuucuccacguucaagugcuacggcgucagccccaccaagcucaacgaccugugcuucaccaacguguacgccgacuccuucgugauccgcggggacgagguccggcagaucgcccccggccagaccgggaagaucgccgacuacaacuacaagcugccggacgacuucacgggcugcgugaucgcguggaacagcaacaaccucgacuccaaggucgggggcaacuacaacuaccgcuaccgccuguuccgcaagagcaaccucaagcccuucgagcgggacaucuccaccgagaucuaccaggccggcagcacccccugcaacgggguggagggcuucaacugcuacuucccccugcaguccuacggguuccagccgaccaacggcgugggguaccagcccuaccggguggucgugcugagcuucgagcuccugcacgcccccgccacggugugcggccccaagaaguccaccaaccuggucaagaacaagugcgugaacuucaacuucaacggccucaccgggaccggcgugcugaccgagagcaacaagaaguuccugccguuccagcaguucgggcgcgacaucgccgacacgaccgacgcgguccgcgacccccagacccuggagauccucgacaucacccccugcagcuucggcgggguguccgugaucacgccgggcaccaacaccagcaaccaggucgccgugcuguaccagggcgugaacugcaccgagguccccguggccauccacgccgaccagcugacgcccaccuggcggguguacuccaccggcagcaacgucuuccagacccgcgccgggugccucaucggcgcggagcacgugaacaacuccuacgagugcgacauccccaucggggccggcaucugcgccagcuaccagacgcagaccaacuccccgcggcgcgcccggagcguggcgucccagagcaucaucgccuacaccaugucccugggcgccgagaacagcgucgccuacuccaacaacagcaucgccauccccaccaacuucacgaucuccgugaccaccgagauccugcccgugagcaugaccaagacgagcgucgacugcaccauguacaucugcggggacuccaccgagugcagcaaccuccugcugcaguacggcuccuucugcacccagcucaaccgcgcgcugacggggaucgccguggagcaggacaagaacacccaggagguguucgcccaggucaagcagaucuacaagacgcccccgaucaaggacuucggcggguucaacuucagccagauccugcccgaccccuccaagcccagcaagcgguccuucaucgaggaccuccuguucaacaaggugacccuggccgacgccggcuucaucaagcaguacggcgacugccucggggacaucgcggcccgcgaccugaucugcgcccagaaguucaacggccugaccgugcucccgccccugcugaccgacgagaugaucgcccaguacaccagcgcccuccuggcggggaccaucacguccggcuggaccuucggggccggcgccgcccugcagauccccuucgcgaugcagauggccuaccgguucaacggcaucggggucacccagaacgugcucuacgagaaccagaagcugaucgccaaccaguucaacagcgccaucggcaagauccaggacucccugagcuccaccgccagcgcgcucgggaagcugcaggacguggucaaccagaacgcccaggcccugaacacgcucgugaagcagcuguccagcaacuucggcgccaucuccagcgugcugaacgacauccucucccgccuggacaaggucgaggccgaggugcagaucgaccggcugaucaccgggcgccuccagagccugcagaccuacgugacccagcagcugauccgggcggccgagauccgcgccagcgccaaccucgccgcgaccaagauguccgagugcguccugggccagagcaagcggguggacuucugcggcaagggguaccaccugauguccuucccccagagcgccccgcacggcguggucuuccuccacgugacguacguccccgcccaggagaagaacuucaccaccgcccccgcgaucugccacgacgggaaggcccacuucccccgcgagggcguguucguguccaacgggacccacugguucgucacgcagcggaacuucuacgagccgcagaucaucaccaccgacaacaccuucgugagcggcaacugcgacguggucaucggcaucgugaacaacacgguguacgacccccugcagcccgagcuggacuccuucaaggaggagcucgacaaguacuucaagaaccacaccagccccgacgucgaccugggggacaucuccggcaucaacgccagcguggugaacauccagaaggagaucgaccgccugaacgaggucgccaagaaccucaacgagucccugaucgaccugcaggagcucgggaaguacgagcaguacaucaaguggccgugguacaucuggcugggcuucaucgccggccugaucgcgaucgugauggugaccaucaugcucugcugcaugaccagcugcugcuccugccugaaggggugcugcagcugcggcuccugcugcaaguucgacgaggacgacagcgagcccguccugaagggggugaagcuccacuacacgugaggacuaguuauaagacugacuagcccgaugggccucccaacgggcccuccuccccuccuugcaccgagauuaaucaaaggcucuuuucagagccaccaaaaaaaaaaaaaaaaaaaaaaaaaaaaaaaaaaaaaaaaaaaaaaaaaaaaaaaaaaaaaaaaaaaaaaaaaaaaaaaaaaaaaaaaaaaaaaaaaaaaa

SEQ ID NO: 24087 - RNA, 4035 nt, Artificial Sequence; identical to SEQ ID NO: 24069
  SARS-CoV-2/Wuhan/WIV05/2019__EPI_ISL_402128 spike protein mRNA gc (1-1273)

SEQ ID NO: 24088 - RNA, 4035 nt, Artificial Sequence
  SARS-CoV-2/Wuhan/WIV05/2019__EPI_ISL_402128 spike protein mRNA gc (1-1273)(D614G)
aggagaaagcuuaccauguucguguuccugguccuccugccccuggugagcucccagugcgugaaccucaccacccgcacgcagcugccgcccgccuacaccaacagcuucacccggggcgucuacuaccccgacaagguguuccgcuccagcgugcugcacuccacccaggaccucuuccugcccuucuucagcaacgucacgugguuccacgccauccacguguccgggaccaacggcaccaagcgguucgacaacccggugcugcccuucaacgacggggucuacuucgcgagcaccgagaaguccaacaucauccgcggcuggaucuucgggacgacccucgacagcaagacccagucccugcugaucgugaacaacgccaccaacguggucaucaaggugugcgaguuccaguucugcaacgaccccuuccucggcguguacuaccacaagaacaacaagagcuggauggaguccgaguuccgggucuacagcuccgccaacaacugcacguucgaguacgugagccagcccuuccugauggaccuggagggcaagcaggggaacuucaagaaccuccgcgaguucguguucaagaacaucgacggcuacuucaagaucuacuccaagcacaccccgaucaaccugguccgggaccugccccagggguucagcgcccucgagccccugguggaccugcccaucggcaucaacaucacccgcuuccagacccuccuggcccugcaccgguccuaccucacgccgggggacagcagcuccggcuggaccgcgggcgccgccgccuacuacgugggguaccugcagccccgcaccuuccugcucaaguacaacgagaacggcaccaucacggacgcggucgacugcgcccuggacccccugagcgagaccaagugcacccucaaguccuucaccguggagaaggggaucuaccagacgagcaacuuccgggugcagcccaccgaguccaucguccgcuucccgaacaucaccaaccugugccccuucggcgagguguucaacgccacccgguucgccagcgucuacgccuggaaccgcaagcggaucuccaacugcguggcggacuacagcgugcuguacaacuccgccagcuucuccacguucaagugcuacggcgucagccccaccaagcucaacgaccugugcuucaccaacguguacgccgacuccuucgugauccgcggggacgagguccggcagaucgcccccggccagaccgggaagaucgccgacuacaacuacaagcugccggacgacuucacgggcugcgugaucgcguggaacagcaacaaccucgacuccaaggucgggggcaacuacaacuaccuguaccgccuguuccgcaagagcaaccucaagcccuucgagcgggacaucuccaccgagaucuaccaggccggcagcacccccugcaacgggguggagggcuucaacugcuacuucccccugcaguccuacggguuccagccgaccaacggcgugggguaccagcccuaccggguggucgugcugagcuucgagcuccugcacgcccccgccacggugugcggccccaagaaguccaccaaccuggucaagaacaagugcgugaacuucaacuucaacggccucaccgggaccggcgugcugaccgagagcaacaagaaguuccugccguuccagcaguucgggcgcgacaucgccgacacgaccgacgcgguccgcgacccccagacccuggagauccucgacaucacccccugcagcuucggcgggguguccgugaucacgccgggcaccaacaccagcaaccaggucgccgugcuguaccagggcgugaacugcaccgagguccccguggccauccacgccgaccagcugacgcccaccuggcggguguacuccaccgggagcaacgucuuccagacccgcgccggcugccucaucggggcggagcacgugaacaacuccuacgagugcgacauccccaucggcgccggcaucugcgccagcuaccagacgcagaccaacuccccgcggcgcgcccggagcguggcgucccagagcaucaucgccuacaccaugucccugggggccgagaacagcgucgccuacuccaacaacagcaucgccauccccaccaacuucacgaucuccgugaccaccgagauccugcccgugagcaugaccaagacgagcgucgacugcaccauguacaucugcggcgacuccaccgagugcagcaaccuccugcugcaguacggguccuucugcacccagcucaaccgcgcgcugacgggcaucgccguggagcaggacaagaacacccaggagguguucgcccaggucaagcagaucuacaagacgcccccgaucaaggacuucgggggcuucaacuucagccagauccugcccgaccccuccaagcccagcaagcgguccuucaucgaggaccuccuguucaacaaggugacccuggccgacgccggcuucaucaagcaguacggggacugccucggcgacaucgcggcccgcgaccugaucugcgcccagaaguucaacgggcugaccgugcucccgccccugcugaccgacgagaugaucgcccaguacaccagcgcccuccuggcgggcaccaucacguccggguggaccuucggcgccggcgccgcccugcagauccccuucgcgaugcagauggccuaccgguucaacgggaucggcgucacccagaacgugcucuacgagaaccagaagcugaucgccaaccaguucaacagcgccaucgggaagauccaggacucccugagcuccaccgccagcgcgcucggcaagcugcaggacguggucaaccagaacgcccaggcccugaacacgcucgugaagcagcuguccagcaacuucggggccaucuccagcgugcugaacgacauccucucccgccuggacaaggucgaggccgaggugcagaucgaccggcugaucaccggccgccuccagagccugcagaccuacgugacccagcagcugauccgggcggccgagauccgcgccagcgccaaccucgccgcgaccaagauguccgagugcguccugggccagagcaagcggguggacuucugcgggaagggcuaccaccugauguccuucccccagagcgccccgcacgggguggucuuccuccacgugacguacguccccgcccaggagaagaacuucaccaccgcccccgcgaucugccacgacggcaaggcccacuucccccgcgaggggguguucguguccaacggcacccacugguucgucacgcagcggaacuucuacgagccgcagaucaucaccaccgacaacaccuucgugagcggcaacugcgacguggucaucgggaucgugaacaacacgguguacgacccccugcagcccgagcuggacuccuucaaggaggagcucgacaaguacuucaagaaccacaccagccccgacgucgaccugggcgacaucuccgggaucaacgccagcguggugaacauccagaaggagaucgaccgccugaacgaggucgccaagaaccucaacgagucccugaucgaccugcaggagcucggcaaguacgagcaguacaucaaguggccgugguacaucuggcugggcuucaucgccgggcugaucgcgaucgugauggugaccaucaugcucugcugcaugaccagcugcugcuccugccugaagggcugcugcagcugcggguccugcugcaaguucgacgaggacgacagcgagcccguccugaagggcgugaagcuccacuacacgugaggacuaguuauaagacugacuagcccgaugggccucccaacgggcccuccuccccuccuugcaccgagauuaaucaaaggcucuuuucagagccaccaaaaaaaaaaaaaaaaaaaaaaaaaaaaaaaaaaaaaaaaaaaaaaaaaaaaaaaaaaaaaaaaaaaaaaaaaaaaaaaaaaaaaaaaaaaaaaaaaaaaa

SEQ ID NO: 24089 - RNA, 4035 nt, Artificial Sequence
  SARS-CoV-2/Wuhan/WIV05/2019__EPI_ISL_402128 spike protein mRNA gc (1-1273)(A222V_D614G)
aggagaaagcuuaccauguucguguuccugguccuccugccccuggugagcucccagugcgugaaccucaccacccgcacgcagcugccgcccgccuacaccaacagcuucacccggggcgucuacuaccccgacaagguguuccgcuccagcgugcugcacuccacccaggaccucuuccugcccuucuucagcaacgucacgugguuccacgccauccacguguccgggaccaacggcaccaagcgguucgacaacccggugcugcccuucaacgacggggucuacuucgcgagcaccgagaaguccaacaucauccgcggcuggaucuucgggacgacccucgacagcaagacccagucccugcugaucgugaacaacgccaccaacguggucaucaaggugugcgaguuccaguucugcaacgaccccuuccucggcguguacuaccacaagaacaacaagagcuggauggaguccgaguuccgggucuacagcuccgccaacaacugcacguucgaguacgugagccagcccuuccugauggaccuggagggcaagcaggggaacuucaagaaccuccgcgaguucguguucaagaacaucgacggcuacuucaagaucuacuccaagcacaccccgaucaaccugguccgggaccugccccagggguucagcgugcucgagccccugguggaccugcccaucggcaucaacaucacccgcuuccagacccuccuggcccugcaccgguccuaccucacgccgggggacagcagcuccggcuggaccgccggcgcggccgccuacuacgucggguaccugcagccccgcaccuuccugcucaaguacaacgagaacggcaccaucacggacgccguggacugcgcgcuggacccccugagcgagaccaagugcacccucaaguccuucaccguggagaaggggaucuaccagacgagcaacuuccggguccagcccaccgaguccaucgugcgcuucccgaacaucaccaaccugugccccuucggcgaggucuucaacgccacccgguucgccagcguguacgccuggaaccgcaagcggaucuccaacugcguggccgacuacagcguccuguacaacuccgcgagcuucuccacguucaagugcuacggcgugagccccaccaagcucaacgaccugugcuucaccaacguguacgccgacuccuucgucauccgcggggacgaggugcggcagaucgcccccggccagaccgggaagaucgccgacuacaacuacaagcugccggacgacuucacgggcugcgugaucgccuggaacagcaacaaccucgacuccaaggucgggggcaacuacaacuaccuguaccgccuguuccgcaagagcaaccucaagcccuucgagcgggacaucuccaccgagaucuaccaggcgggcagcacccccugcaacgggguggagggcuucaacugcuacuucccccugcaguccuacggguuccagccgaccaacggcgugggguaccagcccuaccgggucguggugcugagcuucgagcuccugcacgcccccgccacggucugcggccccaagaaguccaccaaccuggugaagaacaagugcgugaacuucaacuucaacggccucaccgggaccggcguccugaccgagagcaacaagaaguuccugccguuccagcaguucgggcgcgacaucgccgacacgaccgacgccgugcgcgacccccagacccuggagauccucgacaucacccccugcagcuucggcgggguguccgucaucacgccgggcaccaacaccagcaaccagguggcggugcuguaccagggcgucaacugcaccgaggugcccguggccauccacgccgaccagcugacgcccaccuggcgggucuacuccaccgggagcaacguguuccagacccgcgccggcugccucaucggggccgagcacgugaacaacuccuacgagugcgacauccccaucggcgcgggcaucugcgccagcuaccagacgcagaccaacuccccgcggcgcgcccggagcgucgccucccagagcaucaucgcguacaccaugucccugggggccgagaacagcguggccuacuccaacaacagcaucgccauccccaccaacuucacgaucuccgugaccaccgagauccugcccgucagcaugaccaagacgagcguggacugcaccauguacaucugcggcgacuccaccgagugcagcaaccuccugcugcaguacggguccuucugcacccagcucaaccgcgcccugacgggcaucgcgguggagcaggacaagaacacccaggaggucuucgcccaggugaagcagaucuacaagacgcccccgaucaaggacuucgggggcuucaacuucagccagauccugcccgaccccuccaagcccagcaagcgguccuucaucgaggaccuccuguucaacaaggugacccuggccgacgccggcuucaucaagcaguacggggacugccucggcgacaucgccgcgcgcgaccugaucugcgcccagaaguucaacgggcugaccguccucccgccccugcugaccgacgagaugaucgcccaguacaccagcgcccuccuggccggcaccaucacguccggguggaccuucggcgcgggcgccgcccugcagauccccuucgccaugcagauggcguaccgguucaacgggaucggcgugacccagaacgugcucuacgagaaccagaagcugaucgccaaccaguucaacagcgccaucgggaagauccaggacucccugagcuccaccgccagcgcccucggcaagcugcaggacgucgugaaccagaacgcgcaggcccugaacacgcucgugaagcagcuguccagcaacuucggggccaucuccagcguccugaacgacauccucucccgccuggacaagguggaggccgaggugcagaucgaccggcugaucaccggccgccuccagagccugcagaccuacgucacccagcagcugauccgggccgcggagauccgcgccagcgccaaccucgccgccaccaagauguccgagugcgugcugggccagagcaagcggguggacuucugcgggaagggcuaccaccugauguccuucccccagagcgcgccgcacggggucguguuccuccacgucacguacgugcccgcccaggagaagaacuucaccaccgcccccgccaucugccacgacggcaaggcgcacuucccccgcgaggggguguucgucuccaacggcacccacugguucgugacgcagcggaacuucuacgagccgcagaucaucaccaccgacaacaccuucgugagcggcaacugcgacgucgugaucgggaucgugaacaacacggucuacgacccccugcagcccgagcuggacuccuucaaggaggagcucgacaaguacuucaagaaccacaccagccccgacguggaccugggcgacaucuccgggaucaacgccagcguggucaacauccagaaggagaucgaccgccugaacgagguggccaagaaccucaacgagucccugaucgaccugcaggagcucggcaaguacgagcaguacaucaaguggccgugguacaucuggcugggcuucaucgccgggcugaucgccaucgugauggucaccaucaugcucugcugcaugaccagcugcugcuccugccugaagggcugcugcagcugcggguccugcugcaaguucgacgaggacgacagcgagcccgugcugaagggcgugaagcuccacuacacgugaggacuaguuauaagacugacuagcccgaugggccucccaacgggcccuccuccccuccuugcaccgagauuaaucaaaggcucuuuucagagccaccaaaaaaaaaaaaaaaaaaaaaaaaaaaaaaaaaaaaaaaaaaaaaaaaaaaaaaaaaaaaaaaaaaaaaaaaaaaaaaaaaaaaaaaaaaaaaaaaaaaaa

SEQ ID NO: 24090 - RNA, 4035 nt, Artificial Sequence
  SARS-CoV-2/Wuhan/WIV05/2019__EPI_ISL_402128 spike protein mRNA gc (1-1273)(N439K_D614G)
aggagaaagcuuaccauguucguguuccugguccuccugccccuggugagcucccagugcgugaaccucaccacccgcacgcagcugccgcccgccuacaccaacagcuucacccggggcgucuacuaccccgacaagguguuccgcuccagcgugcugcacuccacccaggaccucuuccugcccuucuucagcaacgucacgugguuccacgccauccacguguccgggaccaacggcaccaagcgguucgacaacccggugcugcccuucaacgacggggucuacuucgcgagcaccgagaaguccaacaucauccgcggcuggaucuucgggacgacccucgacagcaagacccagucccugcugaucgugaacaacgccaccaacguggucaucaaggugugcgaguuccaguucugcaacgaccccuuccucggcguguacuaccacaagaacaacaagagcuggauggaguccgaguuccgggucuacagcuccgccaacaacugcacguucgaguacgugagccagcccuuccugauggaccuggagggcaagcaggggaacuucaagaaccuccgcgaguucguguucaagaacaucgacggcuacuucaagaucuacuccaagcacaccccgaucaaccugguccgggaccugccccagggguucagcgcccucgagccccugguggaccugcccaucggcaucaacaucacccgcuuccagacccuccuggcccugcaccgguccuaccucacgccgggggacagcagcuccggcuggaccgcgggcgccgccgccuacuacgugggguaccugcagccccgcaccuuccugcucaaguacaacgagaacggcaccaucacggacgcggucgacugcgcccuggacccccugagcgagaccaagugcacccucaaguccuucaccguggagaaggggaucuaccagacgagcaacuuccgggugcagcccaccgaguccaucguccgcuucccgaacaucaccaaccugugccccuucggcgagguguucaacgccacccgguucgccagcgucuacgccuggaaccgcaagcggaucuccaacugcguggcggacuacagcgugcuguacaacuccgccagcuucuccacguucaagugcuacggcgucagccccaccaagcucaacgaccugugcuucaccaacguguacgccgacuccuucgugauccgcggggacgagguccggcagaucgcccccggccagaccgggaagaucgccgacuacaacuacaagcugccggacgacuucacgggcugcgugaucgcguggaacagcaagaaccucgacuccaaggucgggggcaacuacaacuaccuguaccgccuguuccgcaagagcaaccucaagcccuucgagcgggacaucuccaccgagaucuaccaggccggcagcacccccugcaacgggguggagggcuucaacugcuacuucccccugcaguccuacggguuccagccgaccaacggcgugggguaccagcccuaccggguggucgugcugagcuucgagcuccugcacgcccccgccacggugugcggccccaagaaguccaccaaccuggucaagaacaagugcgugaacuucaacuucaacggccucaccgggaccggcgugcugaccgagagcaacaagaaguuccugccguuccagcaguucgggcgcgacaucgccgacacgaccgacgcgguccgcgacccccagacccuggagauccucgacaucacccccugcagcuucggcgggguguccgugaucacgccgggcaccaacaccagcaaccaggucgccgugcuguaccagggcgugaacugcaccgagguccccguggccauccacgccgaccagcugacgcccaccuggcggguguacuccaccgggagcaacgucuuccagacccgcgccggcugccucaucggggcggagcacgugaacaacuccuacgagugcgacauccccaucggcgccggcaucugcgccagcuaccagacgcagaccaacuccccgcggcgcgcccggagcguggcgucccagagcaucaucgccuacaccaugucccugggggccgagaacagcgucgccuacuccaacaacagcaucgccauccccaccaacuucacgaucuccgugaccaccgagauccugcccgugagcaugaccaagacgagcgucgacugcaccauguacaucugcggcgacuccaccgagugcagcaaccuccugcugcaguacggguccuucugcacccagcucaaccgcgcgcugacgggcaucgccguggagcaggacaagaacacccaggagguguucgcccaggucaagcagaucuacaagacgcccccgaucaaggacuucgggggcuucaacuucagccagauccugcccgaccccuccaagcccagcaagcgguccuucaucgaggaccuccuguucaacaaggugacccuggccgacgccggcuucaucaagcaguacggggacugccucggcgacaucgcggcccgcgaccugaucugcgcccagaaguucaacgggcugaccgugcucccgccccugcugaccgacgagaugaucgcccaguacaccagcgcccuccuggcgggcaccaucacguccggguggaccuucggcgccggcgccgcccugcagauccccuucgcgaugcagauggccuaccgguucaacgggaucggcgucacccagaacgugcucuacgagaaccagaagcugaucgccaaccaguucaacagcgccaucgggaagauccaggacucccugagcuccaccgccagcgcgcucggcaagcugcaggacguggucaaccagaacgcccaggcccugaacacgcucgugaagcagcuguccagcaacuucggggccaucuccagcgugcugaacgacauccucucccgccuggacaaggucgaggccgaggugcagaucgaccggcugaucaccggccgccuccagagccugcagaccuacgugacccagcagcugauccgggcggccgagauccgcgccagcgccaaccucgccgcgaccaagauguccgagugcguccugggccagagcaagcggguggacuucugcgggaagggcuaccaccugauguccuucccccagagcgccccgcacgggguggucuuccuccacgugacguacguccccgcccaggagaagaacuucaccaccgcccccgcgaucugccacgacggcaaggcccacuucccccgcgaggggguguucguguccaacggcacccacugguucgucacgcagcggaacuucuacgagccgcagaucaucaccaccgacaacaccuucgugagcggcaacugcgacguggucaucgggaucgugaacaacacgguguacgacccccugcagcccgagcuggacuccuucaaggaggagcucgacaaguacuucaagaaccacaccagccccgacgucgaccugggcgacaucuccgggaucaacgccagcguggugaacauccagaaggagaucgaccgccugaacgaggucgccaagaaccucaacgagucccugaucgaccugcaggagcucggcaaguacgagcaguacaucaaguggccgugguacaucuggcugggcuucaucgccgggcugaucgcgaucgugauggugaccaucaugcucugcugcaugaccagcugcugcuccugccugaagggcugcugcagcugcggguccugcugcaaguucgacgaggacgacagcgagcccguccugaagggcgugaagcuccacuacacgugaggacuaguuauaagacugacuagcccgaugggccucccaacgggcccuccuccccuccuugcaccgagauuaaucaaaggcucuuuucagagccaccaaaaaaaaaaaaaaaaaaaaaaaaaaaaaaaaaaaaaaaaaaaaaaaaaaaaaaaaaaaaaaaaaaaaaaaaaaaaaaaaaaaaaaaaaaaaaaaaaaaaa

SEQ ID NO: 24091 - RNA, 4035 nt, Artificial Sequence
  SARS-CoV-2/Wuhan/WIV05/2019__EPI_ISL_402128 spike protein mRNA gc (1-1273)(S477N_D614G)
aggagaaagcuuaccauguucguguuccugguccuccugccccuggugagcucccagugcgugaaccucaccacccgcacgcagcugccgcccgccuacaccaacagcuucacccggggcgucuacuaccccgacaagguguuccgcuccagcgugcugcacuccacccaggaccucuuccugcccuucuucagcaacgucacgugguuccacgccauccacguguccgggaccaacggcaccaagcgguucgacaacccggugcugcccuucaacgacggggucuacuucgcgagcaccgagaaguccaacaucauccgcggcuggaucuucgggacgacccucgacagcaagacccagucccugcugaucgugaacaacgccaccaacguggucaucaaggugugcgaguuccaguucugcaacgaccccuuccucggcguguacuaccacaagaacaacaagagcuggauggaguccgaguuccgggucuacagcuccgccaacaacugcacguucgaguacgugagccagcccuuccugauggaccuggagggcaagcaggggaacuucaagaaccuccgcgaguucguguucaagaacaucgacggcuacuucaagaucuacuccaagcacaccccgaucaaccugguccgggaccugccccagggguucagcgcccucgagccccugguggaccugcccaucggcaucaacaucacccgcuuccagacccuccuggcccugcaccgguccuaccucacgccgggggacagcagcuccggcuggaccgcgggcgccgccgccuacuacgugggguaccugcagccccgcaccuuccugcucaaguacaacgagaacggcaccaucacggacgcggucgacugcgcccuggacccccugagcgagaccaagugcacccucaaguccuucaccguggagaaggggaucuaccagacgagcaacuuccgggugcagcccaccgaguccaucguccgcuucccgaacaucaccaaccugugccccuucggcgagguguucaacgccacccgguucgccagcgucuacgccuggaaccgcaagcggaucuccaacugcguggcggacuacagcgugcuguacaacuccgccagcuucuccacguucaagugcuacggcgucagccccaccaagcucaacgaccugugcuucaccaacguguacgccgacuccuucgugauccgcggggacgagguccggcagaucgcccccggccagaccgggaagaucgccgacuacaacuacaagcugccggacgacuucacgggcugcgugaucgcguggaacagcaacaaccucgacuccaaggucgggggcaacuacaacuaccuguaccgccuguuccgcaagagcaaccucaagcccuucgagcgggacaucuccaccgagaucuaccaggccggcaacacccccugcaacgggguggagggcuucaacugcuacuucccccugcagagcuacggguuccagccgaccaacggcgugggguaccagcccuaccggguggucgugcuguccuucgagcuccugcacgcccccgccacggugugcggccccaagaaguccaccaaccuggucaagaacaagugcgugaacuucaacuucaacggccucaccgggaccggcgugcugaccgagagcaacaagaaguuccugccguuccagcaguucgggcgcgacaucgccgacacgaccgacgcgguccgcgacccccagacccuggagauccucgacaucacccccugcagcuucggcggggugagcgugaucacgccgggcaccaacaccuccaaccaggucgccgugcuguaccagggcgugaacugcaccgagguccccguggccauccacgccgaccagcugacgcccaccuggcggguguacagcaccggguccaacgucuuccagacccgcgccggcugccucaucggggcggagcacgugaacaacagcuacgagugcgacauccccaucggcgccggcaucugcgccuccuaccagacgcagaccaacagcccgcggcgcgcccgguccguggcgagccaguccaucaucgccuacaccaugagccugggggccgagaacuccgucgccuacagcaacaacuccaucgccauccccaccaacuucacgaucagcgugaccaccgagauccugcccguguccaugaccaagacgagcgucgacugcaccauguacaucugcggcgacagcaccgagugcuccaaccuccugcugcaguacgggagcuucugcacccagcucaaccgcgcgcugacgggcaucgccguggagcaggacaagaacacccaggagguguucgcccaggucaagcagaucuacaagacgcccccgaucaaggacuucgggggcuucaacuucucccagauccugcccgaccccagcaagcccuccaagcggagcuucaucgaggaccuccuguucaacaaggugacccuggccgacgccggcuucaucaagcaguacggggacugccucggcgacaucgcggcccgcgaccugaucugcgcccagaaguucaacgggcugaccgugcucccgccccugcugaccgacgagaugaucgcccaguacaccuccgcccuccuggcgggcaccaucacgagcggguggaccuucggcgccggcgccgcccugcagauccccuucgcgaugcagauggccuaccgguucaacgggaucggcgucacccagaacgugcucuacgagaaccagaagcugaucgccaaccaguucaacuccgccaucgggaagauccaggacagccuguccagcaccgccuccgcgcucggcaagcugcaggacguggucaaccagaacgcccaggcccugaacacgcucgugaagcagcugagcuccaacuucggggccaucagcuccgugcugaacgacauccucagccgccuggacaaggucgaggccgaggugcagaucgaccggcugaucaccggccgccuccagucccugcagaccuacgugacccagcagcugauccgggcggccgagauccgcgccagcgccaaccucgccgcgaccaagaugagcgagugcguccugggccaguccaagcggguggacuucugcgggaagggcuaccaccugaugagcuucccccaguccgccccgcacgggguggucuuccuccacgugacguacguccccgcccaggagaagaacuucaccaccgcccccgcgaucugccacgacggcaaggcccacuucccccgcgaggggguguucgugagcaacggcacccacugguucgucacgcagcggaacuucuacgagccgcagaucaucaccaccgacaacaccuucguguccggcaacugcgacguggucaucgggaucgugaacaacacgguguacgacccccugcagcccgagcuggacagcuucaaggaggagcucgacaaguacuucaagaaccacaccucccccgacgucgaccugggcgacaucagcgggaucaacgccuccguggugaacauccagaaggagaucgaccgccugaacgaggucgccaagaaccucaacgagagccugaucgaccugcaggagcucggcaaguacgagcaguacaucaaguggccgugguacaucuggcugggcuucaucgccgggcugaucgcgaucgugauggugaccaucaugcucugcugcaugaccuccugcugcagcugccugaagggcugcugcuccugcgggagcugcugcaaguucgacgaggacgacuccgagcccguccugaagggcgugaagcuccacuacacgugaggacuaguuauaagacugacuagcccgaugggccucccaacgggcccuccuccccuccuugcaccgagauuaaucaaaggcucuuuucagagccaccaaaaaaaaaaaaaaaaaaaaaaaaaaaaaaaaaaaaaaaaaaaaaaaaaaaaaaaaaaaaaaaaaaaaaaaaaaaaaaaaaaaaaaaaaaaaaaaaaaaaa

SEQ ID NO: 24092 - RNA, 4035 nt, Artificial Sequence
  SARS-CoV-2/Wuhan/WIV05/2019__EPI_ISL_402128 spike protein mRNA gc (1-1273)(N501Y_D614G)
aggagaaagcuuaccauguucguguuccugguccuccugccccuggugagcucccagugcgugaaccucaccacccgcacgcagcugccgcccgccuacaccaacagcuucacccggggcgucuacuaccccgacaagguguuccgcuccagcgugcugcacuccacccaggaccucuuccugcccuucuucagcaacgucacgugguuccacgccauccacguguccgggaccaacggcaccaagcgguucgacaacccggugcugcccuucaacgacggggucuacuucgcgagcaccgagaaguccaacaucauccgcggcuggaucuucgggacgacccucgacagcaagacccagucccugcugaucgugaacaacgccaccaacguggucaucaaggugugcgaguuccaguucugcaacgaccccuuccucggcguguacuaccacaagaacaacaagagcuggauggaguccgaguuccgggucuacagcuccgccaacaacugcacguucgaguacgugagccagcccuuccugauggaccuggagggcaagcaggggaacuucaagaaccuccgcgaguucguguucaagaacaucgacggcuacuucaagaucuacuccaagcacaccccgaucaaccugguccgggaccugccccagggguucagcgcccucgagccccugguggaccugcccaucggcaucaacaucacccgcuuccagacccuccuggcccugcaccgguccuaccucacgccgggggacagcagcuccggcuggaccgcgggcgccgccgccuacuacgugggguaccugcagccccgcaccuuccugcucaaguacaacgagaacggcaccaucacggacgcggucgacugcgcccuggacccccugagcgagaccaagugcacccucaaguccuucaccguggagaaggggaucuaccagacgagcaacuuccgggugcagcccaccgaguccaucguccgcuucccgaacaucaccaaccugugccccuucggcgagguguucaacgccacccgguucgccagcgucuacgccuggaaccgcaagcggaucuccaacugcguggcggacuacagcgugcuguacaacuccgccagcuucuccacguucaagugcuacggcgucagccccaccaagcucaacgaccugugcuucaccaacguguacgccgacuccuucgugauccgcggggacgagguccggcagaucgcccccggccagaccgggaagaucgccgacuacaacuacaagcugccggacgacuucacgggcugcgugaucgcguggaacagcaacaaccucgacuccaaggucgggggcaacuacaacuaccuguaccgccuguuccgcaagagcaaccucaagcccuucgagcgggacaucuccaccgagaucuaccaggccggcagcacccccugcaacgggguggagggcuucaacugcuacuucccccugcaguccuacggguuccagccgaccuacggcgugggguaccagcccuaccggguggucgugcugagcuucgagcuccugcacgcccccgccacggugugcggccccaagaaguccaccaaccuggucaagaacaagugcgugaacuucaacuucaacggccucaccgggaccggcgugcugaccgagagcaacaagaaguuccugccguuccagcaguucgggcgcgacaucgccgacacgaccgacgcgguccgcgacccccagacccuggagauccucgacaucacccccugcagcuucggcgggguguccgugaucacgccgggcaccaacaccagcaaccaggucgccgugcuguaccagggcgugaacugcaccgagguccccguggccauccacgccgaccagcugacgcccaccuggcggguguacuccaccgggagcaacgucuuccagacccgcgccggcugccucaucggggcggagcacgugaacaacuccuacgagugcgacauccccaucggcgccggcaucugcgccagcuaccagacgcagaccaacuccccgcggcgcgcccggagcguggcgucccagagcaucaucgccuacaccaugucccugggggccgagaacagcgucgccuacuccaacaacagcaucgccauccccaccaacuucacgaucuccgugaccaccgagauccugcccgugagcaugaccaagacgagcgucgacugcaccauguacaucugcggcgacuccaccgagugcagcaaccuccugcugcaguacggguccuucugcacccagcucaaccgcgcgcugacgggcaucgccguggagcaggacaagaacacccaggagguguucgcccaggucaagcagaucuacaagacgcccccgaucaaggacuucgggggcuucaacuucagccagauccugcccgaccccuccaagcccagcaagcgguccuucaucgaggaccuccuguucaacaaggugacccuggccgacgccggcuucaucaagcaguacggggacugccucggcgacaucgcggcccgcgaccugaucugcgcccagaaguucaacgggcugaccgugcucccgccccugcugaccgacgagaugaucgcccaguacaccagcgcccuccuggcgggcaccaucacguccggguggaccuucggcgccggcgccgcccugcagauccccuucgcgaugcagauggccuaccgguucaacgggaucggcgucacccagaacgugcucuacgagaaccagaagcugaucgccaaccaguucaacagcgccaucgggaagauccaggacucccugagcuccaccgccagcgcgcucggcaagcugcaggacguggucaaccagaacgcccaggcccugaacacgcucgugaagcagcuguccagcaacuucggggccaucuccagcgugcugaacgacauccucucccgccuggacaaggucgaggccgaggugcagaucgaccggcugaucaccggccgccuccagagccugcagaccuacgugacccagcagcugauccgggcggccgagauccgcgccagcgccaaccucgccgcgaccaagauguccgagugcguccugggccagagcaagcggguggacuucugcgggaagggcuaccaccugauguccuucccccagagcgccccgcacgggguggucuuccuccacgugacguacguccccgcccaggagaagaacuucaccaccgcccccgcgaucugccacgacggcaaggcccacuucccccgcgaggggguguucguguccaacggcacccacugguucgucacgcagcggaacuucuacgagccgcagaucaucaccaccgacaacaccuucgugagcggcaacugcgacguggucaucgggaucgugaacaacacgguguacgacccccugcagcccgagcuggacuccuucaaggaggagcucgacaaguacuucaagaaccacaccagccccgacgucgaccugggcgacaucuccgggaucaacgccagcguggugaacauccagaaggagaucgaccgccugaacgaggucgccaagaaccucaacgagucccugaucgaccugcaggagcucggcaaguacgagcaguacaucaaguggccgugguacaucuggcugggcuucaucgccgggcugaucgcgaucgugauggugaccaucaugcucugcugcaugaccagcugcugcuccugccugaagggcugcugcagcugcggguccugcugcaaguucgacgaggacgacagcgagcccguccugaagggcgugaagcuccacuacacgugaggacuaguuauaagacugacuagcccgaugggccucccaacgggcccuccuccccuccuugcaccgagauuaaucaaaggcucuuuucagagccaccaaaaaaaaaaaaaaaaaaaaaaaaaaaaaaaaaaaaaaaaaaaaaaaaaaaaaaaaaaaaaaaaaaaaaaaaaaaaaaaaaaaaaaaaaaaaaaaaaaaaa

SEQ ID NO: 24093 - RNA, 4029 nt, Artificial Sequence
  SARS-CoV-2/Wuhan/WIV05/2019__EPI_ISL_402128 spike protein mRNA gc (1-1273)(H69del_V70del_D614G)
aggagaaagcuuaccauguucguguuccugguccuccugccccuggugagcucccagugcgugaaccucaccacccgcacgcagcugccgcccgccuacaccaacagcuucacccggggcgucuacuaccccgacaagguguuccgcuccagcgugcugcacuccacccaggaccucuuccugcccuucuucagcaacgucacgugguuccacgccaucuccgggaccaacggcaccaagcgguucgacaacccggugcugcccuucaacgacgggguguacuucgcgagcaccgagaaguccaacaucauccgcggcuggaucuucgggacgacccucgacagcaagacccagucccugcugaucgucaacaacgccaccaacguggugaucaaggucugcgaguuccaguucugcaacgaccccuuccucggcguguacuaccacaagaacaacaagagcuggauggaguccgaguuccggguguacagcuccgccaacaacugcacguucgaguacgucagccagcccuuccugauggaccuggagggcaagcaggggaacuucaagaaccuccgcgaguucguguucaagaacaucgacggcuacuucaagaucuacuccaagcacaccccgaucaaccuggugcgggaccugccccagggguucagcgcccucgagccccuggucgaccugcccaucggcaucaacaucacccgcuuccagacccuccuggcccugcaccgguccuaccucacgccgggggacagcagcuccggcuggaccgcgggcgccgccgccuacuacgugggguaccugcagccccgcaccuuccugcucaaguacaacgagaacggcaccaucacggacgcgguggacugcgcccuggacccccugagcgagaccaagugcacccucaaguccuucaccgucgagaaggggaucuaccagacgagcaacuuccgggugcagcccaccgaguccaucgugcgcuucccgaacaucaccaaccugugccccuucggcgaggucuucaacgccacccgguucgccagcguguacgccuggaaccgcaagcggaucuccaacugcgucgcggacuacagcgugcuguacaacuccgccagcuucuccacguucaagugcuacggcgugagccccaccaagcucaacgaccugugcuucaccaacgucuacgccgacuccuucgugauccgcggggacgaggugcggcagaucgcccccggccagaccgggaagaucgccgacuacaacuacaagcugccggacgacuucacgggcugcgucaucgcguggaacagcaacaaccucgacuccaaggucgggggcaacuacaacuaccuguaccgccuguuccgcaagagcaaccucaagcccuucgagcgggacaucuccaccgagaucuaccaggccggcagcacccccugcaacgggguggagggcuucaacugcuacuucccccugcaguccuacggguuccagccgaccaacggcgugggguaccagcccuaccggguggugguccugagcuucgagcuccugcacgcccccgccacggugugcggccccaagaaguccaccaaccuggugaagaacaagugcgucaacuucaacuucaacggccucaccgggaccggcgugcugaccgagagcaacaagaaguuccugccguuccagcaguucgggcgcgacaucgccgacacgaccgacgcggugcgcgacccccagacccuggagauccucgacaucacccccugcagcuucggcggggucuccgugaucacgccgggcaccaacaccagcaaccagguggccguccuguaccagggcgugaacugcaccgaggugcccgucgccauccacgccgaccagcugacgcccaccuggcggguguacuccaccgggagcaacguguuccagacccgcgccggcugccucaucggggcggagcacgucaacaacuccuacgagugcgacauccccaucggcgccggcaucugcgccagcuaccagacgcagaccaacuccccgcggcgcgcccggagcguggcgucccagagcaucaucgccuacaccaugucccugggggccgagaacagcguggccuacuccaacaacagcaucgccauccccaccaacuucacgaucuccgucaccaccgagauccugcccgugagcaugaccaagacgagcguggacugcaccauguacaucugcggcgacuccaccgagugcagcaaccuccugcugcaguacggguccuucugcacccagcucaaccgcgcgcugacgggcaucgccgucgagcaggacaagaacacccaggagguguucgcccaggugaagcagaucuacaagacgcccccgaucaaggacuucgggggcuucaacuucagccagauccugcccgaccccuccaagcccagcaagcgguccuucaucgaggaccuccuguucaacaaggucacccuggccgacgccggcuucaucaagcaguacggggacugccucggcgacaucgcggcccgcgaccugaucugcgcccagaaguucaacgggcugaccgugcucccgccccugcugaccgacgagaugaucgcccaguacaccagcgcccuccuggcgggcaccaucacguccggguggaccuucggcgccggcgccgcccugcagauccccuucgcgaugcagauggccuaccgguucaacgggaucggcgugacccagaacguccucuacgagaaccagaagcugaucgccaaccaguucaacagcgccaucgggaagauccaggacucccugagcuccaccgccagcgcgcucggcaagcugcaggacguggugaaccagaacgcccaggcccugaacacgcucgucaagcagcuguccagcaacuucggggccaucuccagcgugcugaacgacauccucucccgccuggacaagguggaggccgagguccagaucgaccggcugaucaccggccgccuccagagccugcagaccuacgugacccagcagcugauccgggcggccgagauccgcgccagcgccaaccucgccgcgaccaagauguccgagugcgugcugggccagagcaagcgggucgacuucugcgggaagggcuaccaccugauguccuucccccagagcgccccgcacggggugguguuccuccacgucacguacgugcccgcccaggagaagaacuucaccaccgcccccgcgaucugccacgacggcaaggcccacuucccccgcgagggggucuucguguccaacggcacccacugguucgugacgcagcggaacuucuacgagccgcagaucaucaccaccgacaacaccuucgucagcggcaacugcgacguggugaucgggaucgucaacaacacgguguacgacccccugcagcccgagcuggacuccuucaaggaggagcucgacaaguacuucaagaaccacaccagccccgacguggaccugggcgacaucuccgggaucaacgccagcgucgugaacauccagaaggagaucgaccgccugaacgagguggccaagaaccucaacgagucccugaucgaccugcaggagcucggcaaguacgagcaguacaucaaguggccgugguacaucuggcugggcuucaucgccgggcugaucgcgaucgucauggugaccaucaugcucugcugcaugaccagcugcugcuccugccugaagggcugcugcagcugcggguccugcugcaaguucgacgaggacgacagcgagcccgugcugaagggcgucaagcuccacuacacgugaggacuaguuauaagacugacuagcccgaugggccucccaacgggcccuccuccccuccuugcaccgagauuaaucaaaggcucuuuucagagccaccaaaaaaaaaaaaaaaaaaaaaaaaaaaaaaaaaaaaaaaaaaaaaaaaaaaaaaaaaaaaaaaaaaaaaaaaaaaaaaaaaaaaaaaaaaaaaaaaaaaaa

SEQ ID NO: 24094 - RNA, 4035 nt, Artificial Sequence
  SARS-CoV-2/Wuhan/WIV05/2019__EPI_ISL_402128 spike protein mRNA gc (1-1273)(Y453F_D614G)
aggagaaagcuuaccauguucguguuccugguccuccugccccuggugagcucccagugcgugaaccucaccacccgcacgcagcugccgcccgccuacaccaacagcuucacccggggcgucuacuaccccgacaagguguuccgcuccagcgugcugcacuccacccaggaccucuuccugcccuucuucagcaacgucacgugguuccacgccauccacguguccgggaccaacggcaccaagcgguucgacaacccggugcugcccuucaacgacggggucuacuucgcgagcaccgagaaguccaacaucauccgcggcuggaucuucgggacgacccucgacagcaagacccagucccugcugaucgugaacaacgccaccaacguggucaucaaggugugcgaguuccaguucugcaacgaccccuuccucggcguguacuaccacaagaacaacaagagcuggauggaguccgaguuccgggucuacagcuccgccaacaacugcacguucgaguacgugagccagcccuuccugauggaccuggagggcaagcaggggaacuucaagaaccuccgcgaguucguguucaagaacaucgacggcuacuucaagaucuacuccaagcacaccccgaucaaccugguccgggaccugccccagggguucagcgcccucgagccccugguggaccugcccaucggcaucaacaucacccgcuuccagacccuccuggcccugcaccgguccuaccucacgccgggggacagcagcuccggcuggaccgcgggcgccgccgccuacuacgugggguaccugcagccccgcaccuuccugcucaaguacaacgagaacggcaccaucacggacgcggucgacugcgcccuggacccccugagcgagaccaagugcacccucaaguccuucaccguggagaaggggaucuaccagacgagcaacuuccgggugcagcccaccgaguccaucguccgcuucccgaacaucaccaaccugugccccuucggcgagguguucaacgccacccgguucgccagcgucuacgccuggaaccgcaagcggaucuccaacugcguggcggacuacagcgugcuguacaacuccgccagcuucuccacguucaagugcuacggcgucagccccaccaagcucaacgaccugugcuucaccaacguguacgccgacuccuucgugauccgcggggacgagguccggcagaucgcccccggccagaccgggaagaucgccgacuacaacuacaagcugccggacgacuucacgggcugcgugaucgcguggaacagcaacaaccucgacuccaaggucgggggcaacuacaacuaccuguuccgccuguuccgcaagagcaaccucaagcccuucgagcgggacaucuccaccgagaucuaccaggccggcagcacccccugcaacgggguggagggcuucaacugcuacuucccccugcaguccuacggguuccagccgaccaacggcgugggguaccagcccuaccggguggucgugcugagcuucgagcuccugcacgcccccgccacggugugcggccccaagaaguccaccaaccuggucaagaacaagugcgugaacuucaacuucaacggccucaccgggaccggcgugcugaccgagagcaacaagaaguuccugccguuccagcaguucgggcgcgacaucgccgacacgaccgacgcgguccgcgacccccagacccuggagauccucgacaucacccccugcagcuucggcgggguguccgugaucacgccgggcaccaacaccagcaaccaggucgccgugcuguaccagggcgugaacugcaccgagguccccguggccauccacgccgaccagcugacgcccaccuggcggguguacuccaccgggagcaacgucuuccagacccgcgccggcugccucaucggggcggagcacgugaacaacuccuacgagugcgacauccccaucggcgccggcaucugcgccagcuaccagacgcagaccaacuccccgcggcgcgcccggagcguggcgucccagagcaucaucgccuacaccaugucccugggggccgagaacagcgucgccuacuccaacaacagcaucgccauccccaccaacuucacgaucuccgugaccaccgagauccugcccgugagcaugaccaagacgagcgucgacugcaccauguacaucugcggcgacuccaccgagugcagcaaccuccugcugcaguacggguccuucugcacccagcucaaccgcgcgcugacgggcaucgccguggagcaggacaagaacacccaggagguguucgcccaggucaagcagaucuacaagacgcccccgaucaaggacuucgggggcuucaacuucagccagauccugcccgaccccuccaagcccagcaagcgguccuucaucgaggaccuccuguucaacaaggugacccuggccgacgccggcuucaucaagcaguacggggacugccucggcgacaucgcggcccgcgaccugaucugcgcccagaaguucaacgggcugaccgugcucccgccccugcugaccgacgagaugaucgcccaguacaccagcgcccuccuggcgggcaccaucacguccggguggaccuucggcgccggcgccgcccugcagauccccuucgcgaugcagauggccuaccgguucaacgggaucggcgucacccagaacgugcucuacgagaaccagaagcugaucgccaaccaguucaacagcgccaucgggaagauccaggacucccugagcuccaccgccagcgcgcucggcaagcugcaggacguggucaaccagaacgcccaggcccugaacacgcucgugaagcagcuguccagcaacuucggggccaucuccagcgugcugaacgacauccucucccgccuggacaaggucgaggccgaggugcagaucgaccggcugaucaccggccgccuccagagccugcagaccuacgugacccagcagcugauccgggcggccgagauccgcgccagcgccaaccucgccgcgaccaagauguccgagugcguccugggccagagcaagcggguggacuucugcgggaagggcuaccaccugauguccuucccccagagcgccccgcacgggguggucuuccuccacgugacguacguccccgcccaggagaagaacuucaccaccgcccccgcgaucugccacgacggcaaggcccacuucccccgcgaggggguguucguguccaacggcacccacugguucgucacgcagcggaacuucuacgagccgcagaucaucaccaccgacaacaccuucgugagcggcaacugcgacguggucaucgggaucgugaacaacacgguguacgacccccugcagcccgagcuggacuccuucaaggaggagcucgacaaguacuucaagaaccacaccagccccgacgucgaccugggcgacaucuccgggaucaacgccagcguggugaacauccagaaggagaucgaccgccugaacgaggucgccaagaaccucaacgagucccugaucgaccugcaggagcucggcaaguacgagcaguacaucaaguggccgugguacaucuggcugggcuucaucgccgggcugaucgcgaucgugauggugaccaucaugcucugcugcaugaccagcugcugcuccugccugaagggcugcugcagcugcggguccugcugcaaguucgacgaggacgacagcgagcccguccugaagggcgugaagcuccacuacacgugaggacuaguuauaagacugacuagcccgaugggccucccaacgggcccuccuccccuccuugcaccgagauuaaucaaaggcucuuuucagagccaccaaaaaaaaaaaaaaaaaaaaaaaaaaaaaaaaaaaaaaaaaaaaaaaaaaaaaaaaaaaaaaaaaaaaaaaaaaaaaaaaaaaaaaaaaaaaaaaaaaaaa

SEQ ID NO: 24095 - RNA, 4035 nt, Artificial Sequence
  SARS-CoV-2/Wuhan/WIV05/2019__EPI_ISL_402128 spike protein mRNA gc (1-1273)(D614G_I692V)
aggagaaagcuuaccauguucguguuccugguccuccugccccuggugagcucccagugcgugaaccucaccacccgcacgcagcugccgcccgccuacaccaacagcuucacccggggcgucuacuaccccgacaagguguuccgcuccagcgugcugcacuccacccaggaccucuuccugcccuucuucagcaacgucacgugguuccacgccauccacguguccgggaccaacggcaccaagcgguucgacaacccggugcugcccuucaacgacggggucuacuucgcgagcaccgagaaguccaacaucauccgcggcuggaucuucgggacgacccucgacagcaagacccagucccugcugaucgugaacaacgccaccaacguggucaucaaggugugcgaguuccaguucugcaacgaccccuuccucggcguguacuaccacaagaacaacaagagcuggauggaguccgaguuccgggucuacagcuccgccaacaacugcacguucgaguacgugagccagcccuuccugauggaccuggagggcaagcaggggaacuucaagaaccuccgcgaguucguguucaagaacaucgacggcuacuucaagaucuacuccaagcacaccccgaucaaccugguccgggaccugccccagggguucagcgcccucgagccccugguggaccugcccaucggcaucaacaucacccgcuuccagacccuccuggcccugcaccgguccuaccucacgccgggggacagcagcuccggcuggaccgcgggcgccgccgccuacuacgugggguaccugcagccccgcaccuuccugcucaaguacaacgagaacggcaccaucacggacgcggucgacugcgcccuggacccccugagcgagaccaagugcacccucaaguccuucaccguggagaaggggaucuaccagacgagcaacuuccgggugcagcccaccgaguccaucguccgcuucccgaacaucaccaaccugugccccuucggcgagguguucaacgccacccgguucgccagcgucuacgccuggaaccgcaagcggaucuccaacugcguggcggacuacagcgugcuguacaacuccgccagcuucuccacguucaagugcuacggcgucagccccaccaagcucaacgaccugugcuucaccaacguguacgccgacuccuucgugauccgcggggacgagguccggcagaucgcccccggccagaccgggaagaucgccgacuacaacuacaagcugccggacgacuucacgggcugcgugaucgcguggaacagcaacaaccucgacuccaaggucgggggcaacuacaacuaccuguaccgccuguuccgcaagagcaaccucaagcccuucgagcgggacaucuccaccgagaucuaccaggccggcagcacccccugcaacgggguggagggcuucaacugcuacuucccccugcaguccuacggguuccagccgaccaacggcgugggguaccagcccuaccggguggucgugcugagcuucgagcuccugcacgcccccgccacggugugcggccccaagaaguccaccaaccuggucaagaacaagugcgugaacuucaacuucaacggccucaccgggaccggcgugcugaccgagagcaacaagaaguuccugccguuccagcaguucgggcgcgacaucgccgacacgaccgacgcgguccgcgacccccagacccuggagauccucgacaucacccccugcagcuucggcgggguguccgugaucacgccgggcaccaacaccagcaaccaggucgccgugcuguaccagggcgugaacugcaccgagguccccguggccauccacgccgaccagcugacgcccaccuggcggguguacuccaccgggagcaacgucuuccagacccgcgccggcugccucaucggggcggagcacgugaacaacuccuacgagugcgacauccccaucggcgccggcaucugcgccagcuaccagacgcagaccaacuccccgcggcgcgcccggagcguggcgucccagagcgucaucgccuacaccaugucccugggggccgagaacagcguggccuacuccaacaacagcaucgccauccccaccaacuucacgaucuccgugaccaccgagauccugcccgucagcaugaccaagacgagcguggacugcaccauguacaucugcggcgacuccaccgagugcagcaaccuccugcugcaguacggguccuucugcacccagcucaaccgcgcgcugacgggcaucgccguggagcaggacaagaacacccaggaggucuucgcccaggugaagcagaucuacaagacgcccccgaucaaggacuucgggggcuucaacuucagccagauccugcccgaccccuccaagcccagcaagcgguccuucaucgaggaccuccuguucaacaaggugacccuggccgacgccggcuucaucaagcaguacggggacugccucggcgacaucgcggcccgcgaccugaucugcgcccagaaguucaacgggcugaccguccucccgccccugcugaccgacgagaugaucgcccaguacaccagcgcccuccuggcgggcaccaucacguccggguggaccuucggcgccggcgccgcccugcagauccccuucgcgaugcagauggccuaccgguucaacgggaucggcgugacccagaacgugcucuacgagaaccagaagcugaucgccaaccaguucaacagcgccaucgggaagauccaggacucccugagcuccaccgccagcgcgcucggcaagcugcaggacgucgugaaccagaacgcccaggcccugaacacgcucgugaagcagcuguccagcaacuucggggccaucuccagcguccugaacgacauccucucccgccuggacaagguggaggccgaggugcagaucgaccggcugaucaccggccgccuccagagccugcagaccuacgucacccagcagcugauccgggcggccgagauccgcgccagcgccaaccucgccgcgaccaagauguccgagugcgugcugggccagagcaagcggguggacuucugcgggaagggcuaccaccugauguccuucccccagagcgccccgcacggggucguguuccuccacgucacguacgugcccgcccaggagaagaacuucaccaccgcccccgcgaucugccacgacggcaaggcccacuucccccgcgaggggguguucgucuccaacggcacccacugguucgugacgcagcggaacuucuacgagccgcagaucaucaccaccgacaacaccuucgugagcggcaacugcgacgucgugaucgggaucgugaacaacacggucuacgacccccugcagcccgagcuggacuccuucaaggaggagcucgacaaguacuucaagaaccacaccagccccgacguggaccugggcgacaucuccgggaucaacgccagcguggucaacauccagaaggagaucgaccgccugaacgagguggccaagaaccucaacgagucccugaucgaccugcaggagcucggcaaguacgagcaguacaucaaguggccgugguacaucuggcugggcuucaucgccgggcugaucgcgaucgugauggucaccaucaugcucugcugcaugaccagcugcugcuccugccugaagggcugcugcagcugcggguccugcugcaaguucgacgaggacgacagcgagcccgugcugaagggcgugaagcuccacuacacgugaggacuaguuauaagacugacuagcccgaugggccucccaacgggcccuccuccccuccuugcaccgagauuaaucaaaggcucuuuucagagccaccaaaaaaaaaaaaaaaaaaaaaaaaaaaaaaaaaaaaaaaaaaaaaaaaaaaaaaaaaaaaaaaaaaaaaaaaaaaaaaaaaaaaaaaaaaaaaaaaaaaaa

SEQ ID NO: 24096 - RNA, 4035 nt, Artificial Sequence
  SARS-CoV-2/Wuhan/WIV05/2019__EPI_ISL_402128 spike protein mRNA gc (1-1273)(D614G_M1229I)
aggagaaagcuuaccauguucguguuccugguccuccugccccuggugagcucccagugcgugaaccucaccacccgcacgcagcugccgcccgccuacaccaacagcuucacccggggcgucuacuaccccgacaagguguuccgcuccagcgugcugcacuccacccaggaccucuuccugcccuucuucagcaacgucacgugguuccacgccauccacguguccgggaccaacggcaccaagcgguucgacaacccggugcugcccuucaacgacggggucuacuucgcgagcaccgagaaguccaacaucauccgcggcuggaucuucgggacgacccucgacagcaagacccagucccugcugaucgugaacaacgccaccaacguggucaucaaggugugcgaguuccaguucugcaacgaccccuuccucggcguguacuaccacaagaacaacaagagcuggauggaguccgaguuccgggucuacagcuccgccaacaacugcacguucgaguacgugagccagcccuuccugauggaccuggagggcaagcaggggaacuucaagaaccuccgcgaguucguguucaagaacaucgacggcuacuucaagaucuacuccaagcacaccccgaucaaccugguccgggaccugccccagggguucagcgcccucgagccccugguggaccugcccaucggcaucaacaucacccgcuuccagacccuccuggcccugcaccgguccuaccucacgccgggggacagcagcuccggcuggaccgcgggcgccgccgccuacuacgugggguaccugcagccccgcaccuuccugcucaaguacaacgagaacggcaccaucacggacgcggucgacugcgcccuggacccccugagcgagaccaagugcacccucaaguccuucaccguggagaaggggaucuaccagacgagcaacuuccgggugcagcccaccgaguccaucguccgcuucccgaacaucaccaaccugugccccuucggcgagguguucaacgccacccgguucgccagcgucuacgccuggaaccgcaagcggaucuccaacugcguggcggacuacagcgugcuguacaacuccgccagcuucuccacguucaagugcuacggcgucagccccaccaagcucaacgaccugugcuucaccaacguguacgccgacuccuucgugauccgcggggacgagguccggcagaucgcccccggccagaccgggaagaucgccgacuacaacuacaagcugccggacgacuucacgggcugcgugaucgcguggaacagcaacaaccucgacuccaaggucgggggcaacuacaacuaccuguaccgccuguuccgcaagagcaaccucaagcccuucgagcgggacaucuccaccgagaucuaccaggccggcagcacccccugcaacgggguggagggcuucaacugcuacuucccccugcaguccuacggguuccagccgaccaacggcgugggguaccagcccuaccggguggucgugcugagcuucgagcuccugcacgcccccgccacggugugcggccccaagaaguccaccaaccuggucaagaacaagugcgugaacuucaacuucaacggccucaccgggaccggcgugcugaccgagagcaacaagaaguuccugccguuccagcaguucgggcgcgacaucgccgacacgaccgacgcgguccgcgacccccagacccuggagauccucgacaucacccccugcagcuucggcgggguguccgugaucacgccgggcaccaacaccagcaaccaggucgccgugcuguaccagggcgugaacugcaccgagguccccguggccauccacgccgaccagcugacgcccaccuggcggguguacuccaccgggagcaacgucuuccagacccgcgccggcugccucaucggggcggagcacgugaacaacuccuacgagugcgacauccccaucggcgccggcaucugcgccagcuaccagacgcagaccaacuccccgcggcgcgcccggagcguggcgucccagagcaucaucgccuacaccaugucccugggggccgagaacagcgucgccuacuccaacaacagcaucgccauccccaccaacuucacgaucuccgugaccaccgagauccugcccgugagcaugaccaagacgagcgucgacugcaccauguacaucugcggcgacuccaccgagugcagcaaccuccugcugcaguacggguccuucugcacccagcucaaccgcgcgcugacgggcaucgccguggagcaggacaagaacacccaggagguguucgcccaggucaagcagaucuacaagacgcccccgaucaaggacuucgggggcuucaacuucagccagauccugcccgaccccuccaagcccagcaagcgguccuucaucgaggaccuccuguucaacaaggugacccuggccgacgccggcuucaucaagcaguacggggacugccucggcgacaucgcggcccgcgaccugaucugcgcccagaaguucaacgggcugaccgugcucccgccccugcugaccgacgagaugaucgcccaguacaccagcgcccuccuggcgggcaccaucacguccggguggaccuucggcgccggcgccgcccugcagauccccuucgcgaugcagauggccuaccgguucaacgggaucggcgucacccagaacgugcucuacgagaaccagaagcugaucgccaaccaguucaacagcgccaucgggaagauccaggacucccugagcuccaccgccagcgcgcucggcaagcugcaggacguggucaaccagaacgcccaggcccugaacacgcucgugaagcagcuguccagcaacuucggggccaucuccagcgugcugaacgacauccucucccgccuggacaaggucgaggccgaggugcagaucgaccggcugaucaccggccgccuccagagccugcagaccuacgugacccagcagcugauccgggcggccgagauccgcgccagcgccaaccucgccgcgaccaagauguccgagugcguccugggccagagcaagcggguggacuucugcgggaagggcuaccaccugauguccuucccccagagcgccccgcacgggguggucuuccuccacgugacguacguccccgcccaggagaagaacuucaccaccgcccccgcgaucugccacgacggcaaggcccacuucccccgcgaggggguguucguguccaacggcacccacugguucgucacgcagcggaacuucuacgagccgcagaucaucaccaccgacaacaccuucgugagcggcaacugcgacguggucaucgggaucgugaacaacacgguguacgacccccugcagcccgagcuggacuccuucaaggaggagcucgacaaguacuucaagaaccacaccagccccgacgucgaccugggcgacaucuccgggaucaacgccagcguggugaacauccagaaggagaucgaccgccugaacgaggucgccaagaaccucaacgagucccugaucgaccugcaggagcucggcaaguacgagcaguacaucaaguggccgugguacaucuggcugggcuucaucgccgggcugaucgcgaucgugaucgugaccaucaugcucugcugcaugaccagcugcugcuccugccugaagggcugcugcagcugcggguccugcugcaaguucgacgaggacgacagcgagcccguccugaagggcgugaagcuccacuacacgugaggacuaguuauaagacugacuagcccgaugggccucccaacgggcccuccuccccuccuugcaccgagauuaaucaaaggcucuuuucagagccaccaaaaaaaaaaaaaaaaaaaaaaaaaaaaaaaaaaaaaaaaaaaaaaaaaaaaaaaaaaaaaaaaaaaaaaaaaaaaaaaaaaaaaaaaaaaaaaaaaaaaa

SEQ ID NO: 24097 - RNA, 4029 nt, Artificial Sequence
  SARS-CoV-2/Wuhan/WIV05/2019__EPI_ISL_402128 spike protein mRNA gc (1-1273)(H69del_V70del_A222V_Y453F_S477N_D614G_I692V)
aggagaaagcuuaccauguucguguuccugguccuccugccccuggugagcucccagugcgugaaccucaccacccgcacgcagcugccgcccgccuacaccaacagcuucacccggggcgucuacuaccccgacaagguguuccgcuccagcgugcugcacuccacccaggaccucuuccugcccuucuucagcaacgucacgugguuccacgccaucuccgggaccaacggcaccaagcgguucgacaacccggugcugcccuucaacgacgggguguacuucgcgagcaccgagaaguccaacaucauccgcggcuggaucuucgggacgacccucgacagcaagacccagucccugcugaucgucaacaacgccaccaacguggugaucaaggucugcgaguuccaguucugcaacgaccccuuccucggcguguacuaccacaagaacaacaagagcuggauggaguccgaguuccggguguacagcuccgccaacaacugcacguucgaguacgucagccagcccuuccugauggaccuggagggcaagcaggggaacuucaagaaccuccgcgaguucguguucaagaacaucgacggcuacuucaagaucuacuccaagcacaccccgaucaaccuggugcgggaccugccccagggguucagcguccucgagccccugguggaccugcccaucggcaucaacaucacccgcuuccagacccuccuggcccugcaccgguccuaccucacgccgggggacagcagcuccggcuggaccgccggcgcggccgccuacuacgugggguaccugcagccccgcaccuuccugcucaaguacaacgagaacggcaccaucacggacgccgucgacugcgcgcuggacccccugagcgagaccaagugcacccucaaguccuucaccguggagaaggggaucuaccagacgagcaacuuccgggugcagcccaccgaguccaucguccgcuucccgaacaucaccaaccugugccccuucggcgagguguucaacgccacccgguucgccagcgucuacgccuggaaccgcaagcggaucuccaacugcguggccgacuacagcgugcuguacaacuccgcgagcuucuccacguucaagugcuacggcgucagccccaccaagcucaacgaccugugcuucaccaacguguacgccgacuccuucgugauccgcggggacgagguccggcagaucgcccccggccagaccgggaagaucgccgacuacaacuacaagcugccggacgacuucacgggcugcgugaucgccuggaacagcaacaaccucgacuccaaggucgggggcaacuacaacuaccuguuccgccuguuccgcaagagcaaccucaagcccuucgagcgggacaucuccaccgagaucuaccaggcgggcaacacccccugcaacgggguggagggcuucaacugcuacuucccccugcagagcuacggguuccagccgaccaacggcgugggguaccagcccuaccggguggucgugcuguccuucgagcuccugcacgcccccgccacggugugcggccccaagaaguccaccaaccuggucaagaacaagugcgugaacuucaacuucaacggccucaccgggaccggcgugcugaccgagagcaacaagaaguuccugccguuccagcaguucgggcgcgacaucgccgacacgaccgacgccguccgcgacccccagacccuggagauccucgacaucacccccugcagcuucggcggggugagcgugaucacgccgggcaccaacaccuccaaccaggucgcggugcuguaccagggcgugaacugcaccgagguccccguggccauccacgccgaccagcugacgcccaccuggcggguguacagcaccggguccaacgucuuccagacccgcgccggcugccucaucggggccgagcacgugaacaacagcuacgagugcgacauccccaucggcgcgggcaucugcgccuccuaccagacgcagaccaacagcccgcggcgcgcccgguccguggccagccaguccgucaucgcguacaccaugagccugggggccgagaacuccguggccuacagcaacaacuccaucgccauccccaccaacuucacgaucagcgugaccaccgagauccugcccgucuccaugaccaagacgagcguggacugcaccauguacaucugcggcgacagcaccgagugcuccaaccuccugcugcaguacgggagcuucugcacccagcucaaccgcgcccugacgggcaucgcgguggagcaggacaagaacacccaggaggucuucgcccaggugaagcagaucuacaagacgcccccgaucaaggacuucgggggcuucaacuucucccagauccugcccgaccccagcaagcccuccaagcggagcuucaucgaggaccuccuguucaacaaggugacccuggccgacgccggcuucaucaagcaguacggggacugccucggcgacaucgccgcgcgcgaccugaucugcgcccagaaguucaacgggcugaccguccucccgccccugcugaccgacgagaugaucgcccaguacaccuccgcccuccuggccggcaccaucacgagcggguggaccuucggcgcgggcgccgcccugcagauccccuucgccaugcagauggcguaccgguucaacgggaucggcgugacccagaacgugcucuacgagaaccagaagcugaucgccaaccaguucaacuccgccaucgggaagauccaggacagccuguccagcaccgccuccgcccucggcaagcugcaggacgucgugaaccagaacgcgcaggcccugaacacgcucgugaagcagcugagcuccaacuucggggccaucagcuccguccugaacgacauccucagccgccuggacaagguggaggccgaggugcagaucgaccggcugaucaccggccgccuccagucccugcagaccuacgucacccagcagcugauccgggccgcggagauccgcgccagcgccaaccucgccgccaccaagaugagcgagugcgugcugggccaguccaagcggguggacuucugcgggaagggcuaccaccugaugagcuucccccaguccgcgccgcacggggucguguuccuccacgucacguacgugcccgcccaggagaagaacuucaccaccgcccccgccaucugccacgacggcaaggcgcacuucccccgcgaggggguguucgucagcaacggcacccacugguucgugacgcagcggaacuucuacgagccgcagaucaucaccaccgacaacaccuucguguccggcaacugcgacgucgugaucgggaucgugaacaacacggucuacgacccccugcagcccgagcuggacagcuucaaggaggagcucgacaaguacuucaagaaccacaccucccccgacguggaccugggcgacaucagcgggaucaacgccuccguggucaacauccagaaggagaucgaccgccugaacgagguggccaagaaccucaacgagagccugaucgaccugcaggagcucggcaaguacgagcaguacaucaaguggccgugguacaucuggcugggcuucaucgccgggcugaucgccaucgugauggucaccaucaugcucugcugcaugaccuccugcugcagcugccugaagggcugcugcuccugcgggagcugcugcaaguucgacgaggacgacuccgagcccgugcugaagggcgugaagcuccacuacacgugaggacuaguuauaagacugacuagcccgaugggccucccaacgggcccuccuccccuccuugcaccgagauuaaucaaaggcucuuuucagagccaccaaaaaaaaaaaaaaaaaaaaaaaaaaaaaaaaaaaaaaaaaaaaaaaaaaaaaaaaaaaaaaaaaaaaaaaaaaaaaaaaaaaaaaaaaaaaaaaaaaaaa

SEQ ID NO: 24098 - RNA, 4029 nt, Artificial Sequence
  SARS-CoV-2/Wuhan/WIV05/2019__EPI_ISL_402128 spike protein mRNA gc (1-1273)(H69del_V70del_Y453F_D614G_I692V_M1229I)
aggagaaagcuuaccauguucguguuccugguccuccugccccuggugagcucccagugcgugaaccucaccacccgcacgcagcugccgcccgccuacaccaacagcuucacccggggcgucuacuaccccgacaagguguuccgcuccagcgugcugcacuccacccaggaccucuuccugcccuucuucagcaacgucacgugguuccacgccaucuccgggaccaacggcaccaagcgguucgacaacccggugcugcccuucaacgacgggguguacuucgcgagcaccgagaaguccaacaucauccgcggcuggaucuucgggacgacccucgacagcaagacccagucccugcugaucgucaacaacgccaccaacguggugaucaaggucugcgaguuccaguucugcaacgaccccuuccucggcguguacuaccacaagaacaacaagagcuggauggaguccgaguuccggguguacagcuccgccaacaacugcacguucgaguacgucagccagcccuuccugauggaccuggagggcaagcaggggaacuucaagaaccuccgcgaguucguguucaagaacaucgacggcuacuucaagaucuacuccaagcacaccccgaucaaccuggugcgggaccugccccagggguucagcgcccucgagccccuggucgaccugcccaucggcaucaacaucacccgcuuccagacccuccuggcccugcaccgguccuaccucacgccgggggacagcagcuccggcuggaccgcgggcgccgccgccuacuacgugggguaccugcagccccgcaccuuccugcucaaguacaacgagaacggcaccaucacggacgcgguggacugcgcccuggacccccugagcgagaccaagugcacccucaaguccuucaccgucgagaaggggaucuaccagacgagcaacuuccgggugcagcccaccgaguccaucgugcgcuucccgaacaucaccaaccugugccccuucggcgaggucuucaacgccacccgguucgccagcguguacgccuggaaccgcaagcggaucuccaacugcgucgcggacuacagcgugcuguacaacuccgccagcuucuccacguucaagugcuacggcgugagccccaccaagcucaacgaccugugcuucaccaacgucuacgccgacuccuucgugauccgcggggacgaggugcggcagaucgcccccggccagaccgggaagaucgccgacuacaacuacaagcugccggacgacuucacgggcugcgucaucgcguggaacagcaacaaccucgacuccaaggucgggggcaacuacaacuaccuguuccgccuguuccgcaagagcaaccucaagcccuucgagcgggacaucuccaccgagaucuaccaggccggcagcacccccugcaacgggguggagggcuucaacugcuacuucccccugcaguccuacggguuccagccgaccaacggcgugggguaccagcccuaccggguggugguccugagcuucgagcuccugcacgcccccgccacggugugcggccccaagaaguccaccaaccuggugaagaacaagugcgucaacuucaacuucaacggccucaccgggaccggcgugcugaccgagagcaacaagaaguuccugccguuccagcaguucgggcgcgacaucgccgacacgaccgacgcggugcgcgacccccagacccuggagauccucgacaucacccccugcagcuucggcggggucuccgugaucacgccgggcaccaacaccagcaaccagguggccguccuguaccagggcgugaacugcaccgaggugcccgucgccauccacgccgaccagcugacgcccaccuggcggguguacuccaccgggagcaacguguuccagacccgcgccggcugccucaucggggcggagcacgucaacaacuccuacgagugcgacauccccaucggcgccggcaucugcgccagcuaccagacgcagaccaacuccccgcggcgcgcccggagcguggcgucccagagcgugaucgccuacaccaugucccugggggccgagaacagcgucgccuacuccaacaacagcaucgccauccccaccaacuucacgaucuccgugaccaccgagauccugcccgugagcaugaccaagacgagcgucgacugcaccauguacaucugcggcgacuccaccgagugcagcaaccuccugcugcaguacggguccuucugcacccagcucaaccgcgcgcugacgggcaucgccguggagcaggacaagaacacccaggagguguucgcccaggucaagcagaucuacaagacgcccccgaucaaggacuucgggggcuucaacuucagccagauccugcccgaccccuccaagcccagcaagcgguccuucaucgaggaccuccuguucaacaaggugacccuggccgacgccggcuucaucaagcaguacggggacugccucggcgacaucgcggcccgcgaccugaucugcgcccagaaguucaacgggcugaccgugcucccgccccugcugaccgacgagaugaucgcccaguacaccagcgcccuccuggcgggcaccaucacguccggguggaccuucggcgccggcgccgcccugcagauccccuucgcgaugcagauggccuaccgguucaacgggaucggcgucacccagaacgugcucuacgagaaccagaagcugaucgccaaccaguucaacagcgccaucgggaagauccaggacucccugagcuccaccgccagcgcgcucggcaagcugcaggacguggucaaccagaacgcccaggcccugaacacgcucgugaagcagcuguccagcaacuucggggccaucuccagcgugcugaacgacauccucucccgccuggacaaggucgaggccgaggugcagaucgaccggcugaucaccggccgccuccagagccugcagaccuacgugacccagcagcugauccgggcggccgagauccgcgccagcgccaaccucgccgcgaccaagauguccgagugcguccugggccagagcaagcggguggacuucugcgggaagggcuaccaccugauguccuucccccagagcgccccgcacgggguggucuuccuccacgugacguacguccccgcccaggagaagaacuucaccaccgcccccgcgaucugccacgacggcaaggcccacuucccccgcgaggggguguucguguccaacggcacccacugguucgucacgcagcggaacuucuacgagccgcagaucaucaccaccgacaacaccuucgugagcggcaacugcgacguggucaucgggaucgugaacaacacgguguacgacccccugcagcccgagcuggacuccuucaaggaggagcucgacaaguacuucaagaaccacaccagccccgacgucgaccugggcgacaucuccgggaucaacgccagcguggugaacauccagaaggagaucgaccgccugaacgaggucgccaagaaccucaacgagucccugaucgaccugcaggagcucggcaaguacgagcaguacaucaaguggccgugguacaucuggcugggcuucaucgccgggcugaucgcgaucgugaucgugaccaucaugcucugcugcaugaccagcugcugcuccugccugaagggcugcugcagcugcggguccugcugcaaguucgacgaggacgacagcgagcccguccugaagggcgugaagcuccacuacacgugaggacuaguuauaagacugacuagcccgaugggccucccaacgggcccuccuccccuccuugcaccgagauuaaucaaaggcucuuuucagagccaccaaaaaaaaaaaaaaaaaaaaaaaaaaaaaaaaaaaaaaaaaaaaaaaaaaaaaaaaaaaaaaaaaaaaaaaaaaaaaaaaaaaaaaaaaaaaaaaaaaaaa

SEQ ID NO: 24099 - RNA, 4026 nt, Artificial Sequence
  SARS-CoV-2/Wuhan/WIV05/2019__EPI_ISL_402128 spike protein mRNA gc (1-1273)(H69del_V70del_Y144del_N501Y_A570D_D614G_P681H_T716I_S982 A_D1118H)
aggagaaagcuuaccauguucguguuccugguccuccugccccuggugagcucccagugcgugaaccucaccacccgcacgcagcugccgcccgccuacaccaacagcuucacccggggcgucuacuaccccgacaagguguuccgcuccagcgugcugcacuccacccaggaccucuuccugcccuucuucagcaacgucacgugguuccacgccaucuccgggaccaacggcaccaagcgguucgacaacccggugcugcccuucaacgacgggguguacuucgcgagcaccgagaaguccaacaucauccgcggcuggaucuucgggacgacccucgacagcaagacccagucccugcugaucgucaacaacgccaccaacguggugaucaaggucugcgaguuccaguucugcaacgaccccuuccucggcguguaccacaagaacaacaagagcuggauggaguccgaguuccggguguacagcuccgccaacaacugcacguucgaguacgucagccagcccuuccugauggaccuggagggcaagcaggggaacuucaagaaccuccgcgaguucguguucaagaacaucgacggcuacuucaagaucuacuccaagcacaccccgaucaaccuggugcgggaccugccccagggguucagcgcccucgagccccuggucgaccugcccaucggcaucaacaucacccgcuuccagacccuccuggcccugcaccgguccuaccucacgccgggggacagcagcuccggcuggaccgcgggcgccgccgccuacuacgugggguaccugcagccccgcaccuuccugcucaaguacaacgagaacggcaccaucacggacgcgguggacugcgcccuggacccccugagcgagaccaagugcacccucaaguccuucaccgucgagaaggggaucuaccagacgagcaacuuccgggugcagcccaccgaguccaucgugcgcuucccgaacaucaccaaccugugccccuucggcgaggucuucaacgccacccgguucgccagcguguacgccuggaaccgcaagcggaucuccaacugcgucgcggacuacagcgugcuguacaacuccgccagcuucuccacguucaagugcuacggcgugagccccaccaagcucaacgaccugugcuucaccaacgucuacgccgacuccuucgugauccgcggggacgaggugcggcagaucgcccccggccagaccgggaagaucgccgacuacaacuacaagcugccggacgacuucacgggcugcgucaucgcguggaacagcaacaaccucgacuccaaggucgggggcaacuacaacuaccuguaccgccuguuccgcaagagcaaccucaagcccuucgagcgggacaucuccaccgagaucuaccaggccggcagcacccccugcaacgggguggagggcuucaacugcuacuucccccugcaguccuacggguuccagccgaccuacggcgugggguaccagcccuaccggguggugguccugagcuucgagcuccugcacgcccccgccacggugugcggccccaagaaguccaccaaccuggugaagaacaagugcgucaacuucaacuucaacggccucaccgggaccggcgugcugaccgagagcaacaagaaguuccugccguuccagcaguucgggcgcgacaucgacgacacgaccgacgccgugcgcgacccccagacccuggagauccucgacaucacccccugcagcuucggcggggucuccgugaucacgccgggcaccaacaccagcaaccagguggcgguccuguaccagggcgugaacugcaccgaggugcccgucgccauccacgccgaccagcugacgcccaccuggcggguguacuccaccgggagcaacguguuccagacccgcgccggcugccucaucggggccgagcacgucaacaacuccuacgagugcgacauccccaucggcgcgggcaucugcgccagcuaccagacgcagaccaacucccaccggcgcgcccggagcguggccucccagagcaucaucgcguacaccaugucccugggggccgagaacagcguggccuacuccaacaacagcaucgccaucccgaucaacuucaccaucuccgucacgaccgagauccugcccgugagcaugaccaagaccagcguggacugcacgauguacaucugcggcgacuccaccgagugcagcaaccuccugcugcaguacggguccuucugcacccagcucaaccgcgcccugaccggcaucgcggucgagcaggacaagaacacgcaggagguguucgcccaggugaagcagaucuacaagaccccgcccaucaaggacuucgggggcuucaacuucagccagauccugcccgaccccuccaagcccagcaagcgguccuucaucgaggaccuccuguucaacaaggucacccuggccgacgccggcuucaucaagcaguacggggacugccucggcgacaucgccgcgcgcgaccugaucugcgcccagaaguucaacgggcugaccgugcugcccccgcuccugacggacgagaugaucgcccaguacaccagcgcccuccuggccggcaccaucaccuccggguggacguucggcgcgggcgccgcccugcagauccccuucgccaugcagauggcguaccgguucaacgggaucggcgugacccagaacguccucuacgagaaccagaagcugaucgccaaccaguucaacagcgccaucgggaagauccaggacucccugagcuccaccgccagcgcccucggcaagcugcaggacguggugaaccagaacgcgcaggcccugaacacccucgucaagcagcuguccagcaacuucggggccaucuccagcgugcugaacgacauccucgcccgccuggacaagguggaggccgagguccagaucgaccggcugaucacgggccgccuccagucccugcagaccuacgugacccagcagcugauccgggcggccgagauccgcgccagcgccaaccucgccgcgaccaagaugagcgagugcgugcugggccaguccaagcgggucgacuucugcgggaagggcuaccaccugaugagcuucccccaguccgcgccccacggggugguguuccuccacgucaccuacgugccggcccaggagaagaacuucacgaccgcccccgccaucugccacgacggcaaggcccacuucccccgcgagggggucuucgugagcaacggcacccacugguucgugacccagcggaacuucuacgagccccagaucaucacgacccacaacaccuucgucuccggcaacugcgacguggugaucgggaucgucaacaacaccguguacgacccgcugcagcccgagcuggacagcuucaaggaggagcucgacaaguacuucaagaaccacacgucccccgacguggaccugggcgacaucagcgggaucaacgccuccgucgugaacauccagaaggagaucgaccgccugaacgagguggccaagaaccucaacgagagccugaucgaccugcaggagcucggcaaguacgagcaguacaucaaguggcccugguacaucuggcugggcuucaucgccgggcugaucgcgaucgucauggugaccaucaugcucugcugcaugaccuccugcugcagcugccugaagggcugcugcuccugcgggagcugcugcaaguucgacgaggacgacuccgagccggugcugaagggcgucaagcuccacuacaccugaggacuaguuauaagacugacuagcccgaugggccucccaacgggcccuccuccccuccuugcaccgagauuaaucaaaggcucuuuucagagccaccaaaaaaaaaaaaaaaaaaaaaaaaaaaaaaaaaaaaaaaaaaaaaaaaaaaaaaaaaaaaaaaaaaaaaaaaaaaaaaaaaaaaaaaaaaaaaaaaaaaaa

SEQ ID NO: 24100 - RNA, 4035 nt, Artificial Sequence
  SARS-CoV-2/Wuhan/WIV05/2019__EPI_ISL_402128 spike protein mRNA gc (1-1273)(K417N_E484K_N501Y_D614G)
aggagaaagcuuaccauguucguguuccugguccuccugccccuggugagcucccagugcgugaaccucaccacccgcacgcagcugccgcccgccuacaccaacagcuucacccggggcgucuacuaccccgacaagguguuccgcuccagcgugcugcacuccacccaggaccucuuccugcccuucuucagcaacgucacgugguuccacgccauccacguguccgggaccaacggcaccaagcgguucgacaacccggugcugcccuucaacgacggggucuacuucgcgagcaccgagaaguccaacaucauccgcggcuggaucuucgggacgacccucgacagcaagacccagucccugcugaucgugaacaacgccaccaacguggucaucaaggugugcgaguuccaguucugcaacgaccccuuccucggcguguacuaccacaagaacaacaagagcuggauggaguccgaguuccgggucuacagcuccgccaacaacugcacguucgaguacgugagccagcccuuccugauggaccuggagggcaagcaggggaacuucaagaaccuccgcgaguucguguucaagaacaucgacggcuacuucaagaucuacuccaagcacaccccgaucaaccugguccgggaccugccccagggguucagcgcccucgagccccugguggaccugcccaucggcaucaacaucacccgcuuccagacccuccuggcccugcaccgguccuaccucacgccgggggacagcagcuccggcuggaccgcgggcgccgccgccuacuacgugggguaccugcagccccgcaccuuccugcucaaguacaacgagaacggcaccaucacggacgcggucgacugcgcccuggacccccugagcgagaccaagugcacccucaaguccuucaccguggagaaggggaucuaccagacgagcaacuuccgggugcagcccaccgaguccaucguccgcuucccgaacaucaccaaccugugccccuucggcgagguguucaacgccacccgguucgccagcgucuacgccuggaaccgcaagcggaucuccaacugcguggcggacuacagcgugcuguacaacuccgccagcuucuccacguucaagugcuacggcgucagccccaccaagcucaacgaccugugcuucaccaacguguacgccgacuccuucgugauccgcggggacgagguccggcagaucgcccccggccagaccgggaacaucgccgacuacaacuacaagcugccggacgacuucacgggcugcgugaucgcguggaacagcaacaaccucgacuccaaggucgggggcaacuacaacuaccuguaccgccuguuccgcaagagcaaccucaagcccuucgagcgggacaucuccaccgagaucuaccaggccggcagcacccccugcaacggggugaagggcuucaacugcuacuucccccugcaguccuacggguuccagccgaccuacggcgugggguaccagcccuaccggguggucgugcugagcuucgagcuccugcacgcccccgccacggugugcggccccaagaaguccaccaaccuggucaagaacaagugcgugaacuucaacuucaacggccucaccgggaccggcgugcugaccgagagcaacaagaaguuccugccguuccagcaguucgggcgcgacaucgccgacacgaccgacgcgguccgcgacccccagacccuggagauccucgacaucacccccugcagcuucggcgggguguccgugaucacgccgggcaccaacaccagcaaccaggucgccgugcuguaccagggcgugaacugcaccgagguccccguggccauccacgccgaccagcugacgcccaccuggcggguguacuccaccgggagcaacgucuuccagacccgcgccggcugccucaucggggcggagcacgugaacaacuccuacgagugcgacauccccaucggcgccggcaucugcgccagcuaccagacgcagaccaacuccccgcggcgcgcccggagcguggcgucccagagcaucaucgccuacaccaugucccugggggccgagaacagcgucgccuacuccaacaacagcaucgccauccccaccaacuucacgaucuccgugaccaccgagauccugcccgugagcaugaccaagacgagcgucgacugcaccauguacaucugcggcgacuccaccgagugcagcaaccuccugcugcaguacggguccuucugcacccagcucaaccgcgcgcugacgggcaucgccguggagcaggacaagaacacccaggagguguucgcccaggucaagcagaucuacaagacgcccccgaucaaggacuucgggggcuucaacuucagccagauccugcccgaccccuccaagcccagcaagcgguccuucaucgaggaccuccuguucaacaaggugacccuggccgacgccggcuucaucaagcaguacggggacugccucggcgacaucgcggcccgcgaccugaucugcgcccagaaguucaacgggcugaccgugcucccgccccugcugaccgacgagaugaucgcccaguacaccagcgcccuccuggcgggcaccaucacguccggguggaccuucggcgccggcgccgcccugcagauccccuucgcgaugcagauggccuaccgguucaacgggaucggcgucacccagaacgugcucuacgagaaccagaagcugaucgccaaccaguucaacagcgccaucgggaagauccaggacucccugagcuccaccgccagcgcgcucggcaagcugcaggacguggucaaccagaacgcccaggcccugaacacgcucgugaagcagcuguccagcaacuucggggccaucuccagcgugcugaacgacauccucucccgccuggacaaggucgaggccgaggugcagaucgaccggcugaucaccggccgccuccagagccugcagaccuacgugacccagcagcugauccgggcggccgagauccgcgccagcgccaaccucgccgcgaccaagauguccgagugcguccugggccagagcaagcggguggacuucugcgggaagggcuaccaccugauguccuucccccagagcgccccgcacgggguggucuuccuccacgugacguacguccccgcccaggagaagaacuucaccaccgcccccgcgaucugccacgacggcaaggcccacuucccccgcgaggggguguucguguccaacggcacccacugguucgucacgcagcggaacuucuacgagccgcagaucaucaccaccgacaacaccuucgugagcggcaacugcgacguggucaucgggaucgugaacaacacgguguacgacccccugcagcccgagcuggacuccuucaaggaggagcucgacaaguacuucaagaaccacaccagccccgacgucgaccugggcgacaucuccgggaucaacgccagcguggugaacauccagaaggagaucgaccgccugaacgaggucgccaagaaccucaacgagucccugaucgaccugcaggagcucggcaaguacgagcaguacaucaaguggccgugguacaucuggcugggcuucaucgccgggcugaucgcgaucgugauggugaccaucaugcucugcugcaugaccagcugcugcuccugccugaagggcugcugcagcugcggguccugcugcaaguucgacgaggacgacagcgagcccguccugaagggcgugaagcuccacuacacgugaggacuaguuauaagacugacuagcccgaugggccucccaacgggcccuccuccccuccuugcaccgagauuaaucaaaggcucuuuucagagccaccaaaaaaaaaaaaaaaaaaaaaaaaaaaaaaaaaaaaaaaaaaaaaaaaaaaaaaaaaaaaaaaaaaaaaaaaaaaaaaaaaaaaaaaaaaaaaaaaaaaaa

SEQ ID NO: 24101 - RNA, 4026 nt, Artificial Sequence
  SARS-CoV-2/Wuhan/WIV05/2019__EPI_ISL_402128 spike protein mRNA gc (1-1273)(L18F_D80A_D215G_L242del_A243del_L244del_R246I_K417N_E484 K_N501Y_D614G_A701V)
aggagaaagcuuaccauguucguguuccugguccuccugccccuggugagcucccagugcgugaacuucaccacccgcacgcagcucccgcccgccuacaccaacagcuucacccggggcgucuacuaccccgacaagguguuccgcuccagcgugcugcacuccacccaggaccuguuccuccccuucuucagcaacgucacgugguuccacgccauccacguguccgggaccaacggcaccaagcgguucgcgaacccggugcugcccuucaacgacggggucuacuucgccagcaccgagaaguccaacaucauccgcggcuggaucuucgggacgacccuggacagcaagacccagucccuccugaucgugaacaacgccaccaacguggucaucaaggugugcgaguuccaguucugcaacgaccccuuccugggcguguacuaccacaagaacaacaagagcuggauggaguccgaguuccgggucuacagcuccgccaacaacugcacguucgaguacgugagccagcccuuccucauggaccuggagggcaagcaggggaacuucaagaaccugcgcgaguucguguucaagaacaucgacggcuacuucaagaucuacuccaagcacaccccgaucaaccucguccgggggcugccccagggcuucagcgcccuggagccccucguggaccugcccaucgggaucaacaucacccgcuuccagacccugcacaucuccuaccucacgccgggcgacagcagcuccggcuggaccgcgggggccgccgccuacuacgugggcuaccugcagccccggaccuuccugcucaaguacaacgagaacgggaccaucacggacgcggucgacugcgcccuggacccccugagcgagaccaagugcacccucaaguccuucaccguggagaagggcaucuaccagacgagcaacuuccgcgugcagcccaccgaguccaucguccgguucccgaacaucaccaaccugugccccuucggcgagguguucaacgccacccgcuucgccagcgucuacgccuggaaccggaagcgcaucuccaacugcguggcggacuacagcgugcuguacaacuccgccagcuucuccacguucaagugcuacggggucagccccaccaagcucaacgaccugugcuucaccaacguguacgccgacuccuucgugauccggggcgacgagguccgccagaucgcccccgggcagaccggcaacaucgccgacuacaacuacaagcugccggacgacuucacggggugcgugaucgcguggaacagcaacaaccucgacuccaaggugggcggcaacuacaacuaccuguaccggcuguuccgcaagagcaaccucaagcccuucgagcgggacaucuccaccgagaucuaccaggccgggagcacccccugcaacggcgucaagggguucaacugcuacuucccccugcaguccuacggcuuccagccgaccuacggggugggcuaccagcccuaccgcguggucgugcugagcuucgagcuccugcacgcccccgccacggugugcggccccaagaaguccaccaaccuggucaagaacaagugcgugaacuucaacuucaacgggcucaccggcaccggggugcugaccgagagcaacaagaaguuccugccguuccagcaguucggccgggacaucgccgacacgaccgacgcgguccgcgacccccagacccucgagauccuggacaucacccccugcagcuucgggggcguguccgugaucacgccgggcaccaacaccagcaaccaggucgccgugcuguaccagggggugaacugcaccgagguccccguggccauccacgccgaccagcugacgcccaccuggcgcguguacuccaccggcagcaacgucuuccagacccgggccgggugccucaucggcgcggagcacgugaacaacuccuacgagugcgacauccccaucggcgccgggaucugcgccagcuaccagacgcagaccaacuccccgcgccgggcccgcagcguggcgucccagagcaucaucgccuacaccaugucccugggcgucgagaacagcguggccuacuccaacaacagcaucgccauccccaccaacuucacgaucuccgugaccaccgagauccugcccgucagcaugaccaagacgagcguggacugcaccauguacaucugcggggacuccaccgagugcagcaaccuccugcugcaguacggcuccuucugcacccagcucaaccgggcccugacggggaucgcgguggagcaggacaagaacacccaggaggucuucgcccaggugaagcagaucuacaagacgcccccgaucaaggacuucggcggcuucaacuucagccagauccugcccgaccccuccaagcccagcaagcgcuccuucaucgaggaccuccuguucaacaaggugacccuggccgacgccggguucaucaagcaguacggcgacugccucggggacaucgccgcgcgggaccugaucugcgcccagaaguucaacggccugaccguccucccgccccugcugaccgacgagaugaucgcccaguacaccagcgcccuccuggccgggaccaucacguccggcuggaccuucggcgcgggggccgcccugcagauccccuucgccaugcagauggcguaccgcuucaacggcaucggggugacccagaacgugcucuacgagaaccagaagcugaucgccaaccaguucaacagcgccaucggcaagauccaggacucccugagcuccaccgccagcgcccucgggaagcugcaggacgucgugaaccagaacgcgcaggcccugaacacgcucgugaagcagcuguccagcaacuucggcgccaucuccagcguccugaacgacauccucucccggcuggacaagguggaggccgaggugcagaucgaccgccugaucaccggccggcuccagagccugcagaccuacgucacccagcagcugauccgcgccgcggagauccgggccagcgccaaccucgccgccaccaagauguccgagugcgugcuggggcagagcaagcgcguggacuucugcggcaagggguaccaccugauguccuucccccagagcgcgccgcacggcgucguguuccuccacgucacguacgugcccgcccaggagaagaacuucaccaccgcccccgccaucugccacgacgggaaggcgcacuucccccgggagggcguguucgucuccaacggcacccacugguucgugacgcagcgcaacuucuacgagccgcagaucaucaccaccgacaacaccuucgugagcgggaacugcgacgucgugaucggcaucgugaacaacacggucuacgacccccugcagcccgagcuggacuccuucaaggaggagcucgacaaguacuucaagaaccacaccagccccgacguggaccugggggacaucuccggcaucaacgccagcguggucaacauccagaaggagaucgaccggcugaacgagguggccaagaaccucaacgagucccugaucgaccugcaggagcucggcaaguacgagcaguacaucaaguggccgugguacaucuggcugggguucaucgccggccugaucgccaucgugauggucaccaucaugcucugcugcaugaccagcugcugcuccugccugaaggggugcugcagcugcggcuccugcugcaaguucgacgaggacgacagcgagcccgugcugaagggggugaagcuccacuacacgugaggacuaguuauaagacugacuagcccgaugggccucccaacgggcccuccuccccuccuugcaccgagauuaaucaaaggcucuuuucagagccaccaaaaaaaaaaaaaaaaaaaaaaaaaaaaaaaaaaaaaaaaaaaaaaaaaaaaaaaaaaaaaaaaaaaaaaaaaaaaaaaaaaaaaaaaaaaaaaaaaaaaa

SEQ ID NO: 24102 - RNA, 4035 nt, Artificial Sequence
  SARS-CoV-2/Wuhan/WIV05/2019__EPI_ISL_402128 spike protein mRNA gc (1-1273)(E484K_D614G)
aggagaaagcuuaccauguucguguuccugguccuccugccccuggugagcucccagugcgugaaccucaccacccgcacgcagcugccgcccgccuacaccaacagcuucacccggggcgucuacuaccccgacaagguguuccgcuccagcgugcugcacuccacccaggaccucuuccugcccuucuucagcaacgucacgugguuccacgccauccacguguccgggaccaacggcaccaagcgguucgacaacccggugcugcccuucaacgacggggucuacuucgcgagcaccgagaaguccaacaucauccgcggcuggaucuucgggacgacccucgacagcaagacccagucccugcugaucgugaacaacgccaccaacguggucaucaaggugugcgaguuccaguucugcaacgaccccuuccucggcguguacuaccacaagaacaacaagagcuggauggaguccgaguuccgggucuacagcuccgccaacaacugcacguucgaguacgugagccagcccuuccugauggaccuggagggcaagcaggggaacuucaagaaccuccgcgaguucguguucaagaacaucgacggcuacuucaagaucuacuccaagcacaccccgaucaaccugguccgggaccugccccagggguucagcgcccucgagccccugguggaccugcccaucggcaucaacaucacccgcuuccagacccuccuggcccugcaccgguccuaccucacgccgggggacagcagcuccggcuggaccgcgggcgccgccgccuacuacgugggguaccugcagccccgcaccuuccugcucaaguacaacgagaacggcaccaucacggacgcggucgacugcgcccuggacccccugagcgagaccaagugcacccucaaguccuucaccguggagaaggggaucuaccagacgagcaacuuccgggugcagcccaccgaguccaucguccgcuucccgaacaucaccaaccugugccccuucggcgagguguucaacgccacccgguucgccagcgucuacgccuggaaccgcaagcggaucuccaacugcguggcggacuacagcgugcuguacaacuccgccagcuucuccacguucaagugcuacggcgucagccccaccaagcucaacgaccugugcuucaccaacguguacgccgacuccuucgugauccgcggggacgagguccggcagaucgcccccggccagaccgggaagaucgccgacuacaacuacaagcugccggacgacuucacgggcugcgugaucgcguggaacagcaacaaccucgacuccaaggucgggggcaacuacaacuaccuguaccgccuguuccgcaagagcaaccucaagcccuucgagcgggacaucuccaccgagaucuaccaggccggcagcacccccugcaacggggugaagggcuucaacugcuacuucccccugcaguccuacggguuccagccgaccaacggcgugggguaccagcccuaccggguggucgugcugagcuucgagcuccugcacgcccccgccacggugugcggccccaagaaguccaccaaccuggucaagaacaagugcgugaacuucaacuucaacggccucaccgggaccggcgugcugaccgagagcaacaagaaguuccugccguuccagcaguucgggcgcgacaucgccgacacgaccgacgcgguccgcgacccccagacccuggagauccucgacaucacccccugcagcuucggcgggguguccgugaucacgccgggcaccaacaccagcaaccaggucgccgugcuguaccagggcgugaacugcaccgagguccccguggccauccacgccgaccagcugacgcccaccuggcggguguacuccaccgggagcaacgucuuccagacccgcgccggcugccucaucggggcggagcacgugaacaacuccuacgagugcgacauccccaucggcgccggcaucugcgccagcuaccagacgcagaccaacuccccgcggcgcgcccggagcguggcgucccagagcaucaucgccuacaccaugucccugggggccgagaacagcgucgccuacuccaacaacagcaucgccauccccaccaacuucacgaucuccgugaccaccgagauccugcccgugagcaugaccaagacgagcgucgacugcaccauguacaucugcggcgacuccaccgagugcagcaaccuccugcugcaguacggguccuucugcacccagcucaaccgcgcgcugacgggcaucgccguggagcaggacaagaacacccaggagguguucgcccaggucaagcagaucuacaagacgcccccgaucaaggacuucgggggcuucaacuucagccagauccugcccgaccccuccaagcccagcaagcgguccuucaucgaggaccuccuguucaacaaggugacccuggccgacgccggcuucaucaagcaguacggggacugccucggcgacaucgcggcccgcgaccugaucugcgcccagaaguucaacgggcugaccgugcucccgccccugcugaccgacgagaugaucgcccaguacaccagcgcccuccuggcgggcaccaucacguccggguggaccuucggcgccggcgccgcccugcagauccccuucgcgaugcagauggccuaccgguucaacgggaucggcgucacccagaacgugcucuacgagaaccagaagcugaucgccaaccaguucaacagcgccaucgggaagauccaggacucccugagcuccaccgccagcgcgcucggcaagcugcaggacguggucaaccagaacgcccaggcccugaacacgcucgugaagcagcuguccagcaacuucggggccaucuccagcgugcugaacgacauccucucccgccuggacaaggucgaggccgaggugcagaucgaccggcugaucaccggccgccuccagagccugcagaccuacgugacccagcagcugauccgggcggccgagauccgcgccagcgccaaccucgccgcgaccaagauguccgagugcguccugggccagagcaagcggguggacuucugcgggaagggcuaccaccugauguccuucccccagagcgccccgcacgggguggucuuccuccacgugacguacguccccgcccaggagaagaacuucaccaccgcccccgcgaucugccacgacggcaaggcccacuucccccgcgaggggguguucguguccaacggcacccacugguucgucacgcagcggaacuucuacgagccgcagaucaucaccaccgacaacaccuucgugagcggcaacugcgacguggucaucgggaucgugaacaacacgguguacgacccccugcagcccgagcuggacuccuucaaggaggagcucgacaaguacuucaagaaccacaccagccccgacgucgaccugggcgacaucuccgggaucaacgccagcguggugaacauccagaaggagaucgaccgccugaacgaggucgccaagaaccucaacgagucccugaucgaccugcaggagcucggcaaguacgagcaguacaucaaguggccgugguacaucuggcugggcuucaucgccgggcugaucgcgaucgugauggugaccaucaugcucugcugcaugaccagcugcugcuccugccugaagggcugcugcagcugcggguccugcugcaaguucgacgaggacgacagcgagcccguccugaagggcgugaagcuccacuacacgugaggacuaguuauaagacugacuagcccgaugggccucccaacgggcccuccuccccuccuugcaccgagauuaaucaaaggcucuuuucagagccaccaaaaaaaaaaaaaaaaaaaaaaaaaaaaaaaaaaaaaaaaaaaaaaaaaaaaaaaaaaaaaaaaaaaaaaaaaaaaaaaaaaaaaaaaaaaaaaaaaaaaa

SEQ ID NO: 24103 - RNA, 4035 nt, Artificial Sequence
  SARS-CoV-2/Wuhan/WIV05/2019__EPI_ISL_402128 spike protein mRNA gc (1-1273)(L18F_T20N_P26S_D138Y_R190S_K417T_E484K_N501Y_D614G_H655Y _T1027I)
aggagaaagcuuaccauguucguguuccugguccuccugccccuggugagcucccagugcgugaacuucaccaaccgcacccagcucccgagcgccuacacgaacuccuucacccggggcgucuacuaccccgacaagguguuccgcagcuccgugcugcacagcacccaggaccuguuccuccccuucuucuccaacgucaccugguuccacgccauccacgugagcgggacgaacggcaccaagcgguucgacaaccccgugcugccguucaacgacggggucuacuucgcguccaccgagaaguccaacaucauccgcggcuggaucuucgggaccacgcuggacuccaagacccagagccuccugaucgugaacaacgccaccaacguggucaucaaggugugcgaguuccaguucugcaacuaccccuuccugggcguguacuaccacaagaacaacaaguccuggauggagagcgaguuccgggucuacuccagcgccaacaacugcaccuucgaguacgugucccagcccuuccucauggaccuggagggcaagcaggggaacuucaagaaccugagcgaguucguguucaagaacaucgacggcuacuucaagaucuacuccaagcacacgcccaucaaccucguccgcgaccugccgcagggguucagcgcccuggagccccucguggaccugcccaucggcaucaacaucacccgguuccagacccugcucgcccugcaccgcagcuaccugacccccggggacuccagcuccggcuggacggcgggcgccgccgccuacuacgugggguaccuccagccgcggaccuuccugcugaaguacaacgagaacggcaccaucaccgacgcggucgacugcgcccucgacccccugagcgagacgaagugcacccugaaguccuucaccguggagaaggggaucuaccagaccagcaacuuccgcgugcagcccacggaguccaucguccgguuccccaacaucaccaaccucugcccguucggcgagguguucaacgccacccgcuucgccagcgucuacgccuggaaccggaagcgcaucuccaacugcguggcggacuacagcgugcuguacaacuccgccagcuucuccaccuucaagugcuacggcgucagccccacgaagcugaacgaccucugcuucaccaacguguacgccgacuccuucgugauccgcggggacgagguccggcagaucgcccccggccagaccgggaccaucgccgacuacaacuacaagcugcccgacgacuucacgggcugcgugaucgcguggaacagcaacaaccuggacuccaaggucgggggcaacuacaacuaccucuaccggcuguuccgcaagagcaaccugaagccguucgagcgggacaucuccaccgagaucuaccaggccggcagcacccccugcaacggggugaagggcuucaacugcuacuucccccuccagagcuacggguuccagcccaccuacggcgugggguaccagccguaccgcguggucgugcuguccuucgagcugcuccacgcccccgccacggugugcggccccaagaaguccaccaaccuggucaagaacaagugcgugaacuucaacuucaacggccugaccgggaccggcgugcucaccgagagcaacaagaaguuccugcccuuccagcaguucgggcgggacaucgccgacacgaccgacgcgguccgcgacccgcagacccuggagauccuggacaucacccccugcagcuucggcgggguguccgugaucacgcccggcaccaacaccagcaaccaggucgccgugcucuaccagggcgugaacugcaccgaggucccgguggccauccacgccgaccagcugacgcccaccuggcgcguguacuccaccgggagcaacgucuuccagacccgggccggcugccugaucggggcggaguacgugaacaacuccuacgagugcgacauccccaucggcgccggcaucugcgccagcuaccagacgcagaccaacagcccccgccgggcccgcagcguggcgucccagagcaucaucgccuacaccaugucccucggggccgagaacagcgucgccuacuccaacaacagcaucgccaucccgaccaacuucacgaucagcgugaccaccgagauccugcccguguccaugaccaagacgagcgucgacugcaccauguacaucugcggcgacuccaccgagugcagcaaccugcuccugcaguacggguccuucugcacccagcugaaccgggcgcucacgggcaucgccguggagcaggacaagaacacccaggagguguucgcccaggucaagcagaucuacaagaccccgcccaucaaggacuucgggggcuucaacuucagccagauccugcccgaccccuccaagcccagcaagcgcuccuucaucgaggaccuccuguucaacaaggugacccuggccgacgccggcuucaucaagcaguacggggacugccugggcgacaucgcggcccgggaccucaucugcgcccagaaguucaacgggcugacggugcugcccccgcuccugaccgacgagaugaucgcccaguacaccagcgcccugcucgcgggcaccaucacguccggguggaccuucggcgccggcgccgcccugcagauccccuucgcgaugcagauggccuaccgcuucaacgggaucggcgucacccagaacgugcuguacgagaaccagaagcucaucgccaaccaguucaacagcgccaucgggaagauccaggacucccugagcuccaccgccagcgcgcugggcaagcuccaggacguggucaaccagaacgcccaggcccugaacacgcuggugaagcagcucuccagcaacuucggggccaucuccagcgugcugaacgacauccugagccggcucgacaaggucgaggccgaggugcagaucgaccgccugaucaccggccggcugcagucccuccagaccuacgugacccagcagcugauccgcgcggccgagauccgggccagcgccaaccuggccgcgaucaagauguccgagugcguccucggccagagcaagcgcguggacuucugcgggaagggcuaccaccugauguccuucccccagagcgcgccccacgggguggucuuccugcacgugaccuacgucccggcccaggagaagaacuucacgaccgcccccgccaucugccacgacggcaaggcccacuucccccgggaggggguguucguguccaacggcacccacugguucgucacccagcgcaacuucuacgagccccagaucaucacgaccgacaacaccuucgugagcggcaacugcgacguggucaucgggaucgugaacaacaccguguacgacccgcuccagcccgagcuggacuccuucaaggaggagcuggacaaguacuucaagaaccacacgagccccgacgucgaccucggcgacaucuccgggaucaacgccagcguggugaacauccagaaggagaucgaccggcugaacgaggucgccaagaaccugaacgagucccucaucgaccugcaggagcugggcaaguacgagcaguacaucaaguggcccugguacaucuggcucggcuucaucgccgggcugaucgcgaucgugauggugaccaucaugcugugcugcaugaccagcugcugcuccugccucaagggcugcugcagcugcggguccugcugcaaguucgacgaggacgacagcgagccgguccugaagggcgugaagcugcacuacaccugaggacuaguuauaagacugacuagcccgaugggccucccaacgggcccuccuccccuccuugcaccgagauuaaucaaaggcucuuuucagagccaccaaaaaaaaaaaaaaaaaaaaaaaaaaaaaaaaaaaaaaaaaaaaaaaaaaaaaaaaaaaaaaaaaaaaaaaaaaaaaaaaaaaaaaaaaaaaaaaaaaaaa

SEQ ID NO: 24104 - RNA, 4035 nt, Artificial Sequence
  SARS-CoV-2/Wuhan/WIV05/2019__EPI_ISL_402128 spike protein mRNA gc (1-1273)(S13I_W152C_L452R_D614G)
aggagaaagcuuaccauguucguguuccugguccuccugccccuggugagcauccagugcgugaaccucaccacccgcacgcagcugccgcccgccuacaccaacuccuucacccggggcgucuacuaccccgacaagguguuccgcagcuccgugcugcacagcacccaggaccucuuccugcccuucuucuccaacgucacgugguuccacgccauccacgugagcgggaccaacggcaccaagcgguucgacaacccggugcugcccuucaacgacggggucuacuucgcguccaccgagaaguccaacaucauccgcggcuggaucuucgggacgacccucgacagcaagacccagagccugcugaucgugaacaacgccaccaacguggucaucaaggugugcgaguuccaguucugcaacgaccccuuccucggcguguacuaccacaagaacaacaaguccugcauggagagcgaguuccgggucuacuccagcgccaacaacugcacguucgaguacgugucccagcccuuccugauggaccuggagggcaagcaggggaacuucaagaaccuccgcgaguucguguucaagaacaucgacggcuacuucaagaucuacagcaagcacaccccgaucaaccugguccgggaccugccccagggguucuccgcccucgagccccugguggaccugcccaucggcaucaacaucacccgcuuccagacccuccuggcccugcaccggagcuaccucacgccgggggacuccagcagcggcuggaccgcgggcgccgccgccuacuacgugggguaccugcagccccgcaccuuccugcucaaguacaacgagaacggcaccaucacggacgcggucgacugcgcccuggacccccuguccgagaccaagugcacccucaagagcuucaccguggagaaggggaucuaccagacguccaacuuccgggugcagcccaccgagagcaucguccgcuucccgaacaucaccaaccugugccccuucggcgagguguucaacgccacccgguucgccuccgucuacgccuggaaccgcaagcggaucagcaacugcguggcggacuacuccgugcuguacaacagcgccuccuucagcacguucaagugcuacggcgucucccccaccaagcucaacgaccugugcuucaccaacguguacgccgacagcuucgugauccgcggggacgagguccggcagaucgcccccggccagaccgggaagaucgccgacuacaacuacaagcugccggacgacuucacgggcugcgugaucgcguggaacuccaacaaccucgacagcaaggucgggggcaacuacaacuaccgcuaccggcuguuccgcaaguccaaccugaagcccuucgagcgggacaucagcaccgagaucuaccaggccggcuccacccccugcaacgggguggagggcuucaacugcuacuucccccuccagagcuacggguuccagccgaccaacggcgugggguaccagcccuaccgcguggucgugcuguccuucgagcugcuccacgcccccgccacggugugcggccccaagaaguccaccaaccuggucaagaacaagugcgugaacuucaacuucaacggccugaccgggaccggcgugcucaccgagagcaacaagaaguuccugccguuccagcaguucgggcgcgacaucgccgacacgaccgacgcgguccgggacccccagacccuggagauccuggacaucacccccugcagcuucggcggggugagcgugaucacgccgggcaccaacaccuccaaccaggucgccgugcucuaccagggcgugaacugcaccgagguccccguggccauccacgccgaccagcugacgcccaccuggcgcguguacagcaccggguccaacgucuuccagacccgggccggcugccugaucggggcggagcacgugaacaacagcuacgagugcgacauccccaucggcgccggcaucugcgccuccuaccagacgcagaccaacagcccgcgccgggcccgcuccguggcgagccaguccaucaucgccuacaccaugagccucggggccgagaacuccgucgccuacagcaacaacuccaucgccauccccaccaacuucacgaucagcgugaccaccgagauccugcccguguccaugaccaagacgagcgucgacugcaccauguacaucugcggcgacagcaccgagugcuccaaccugcuccugcaguacgggagcuucugcacccagcugaaccgggcgcucacgggcaucgccguggagcaggacaagaacacccaggagguguucgcccaggucaagcagaucuacaagacgcccccgaucaaggacuucgggggcuucaacuucucccagauccugcccgaccccagcaagcccuccaagcgcagcuucaucgaggaccuccuguucaacaaggugacccuggccgacgccggcuucaucaagcaguacggggacugccugggcgacaucgcggcccgggaccucaucugcgcccagaaguucaacgggcugaccgugcugccgccccuccugaccgacgagaugaucgcccaguacaccuccgcccugcucgcgggcaccaucacgagcggguggaccuucggcgccggcgccgcccugcagauccccuucgcgaugcagauggccuaccgcuucaacgggaucggcgucacccagaacgugcuguacgagaaccagaagcucaucgccaaccaguucaacuccgccaucgggaagauccaggacagccuguccagcaccgccuccgcgcugggcaagcuccaggacguggucaaccagaacgcccaggcccugaacacgcuggugaagcagcucagcuccaacuucggggccaucagcuccgugcugaacgacauccugagccggcucgacaaggucgaggccgaggugcagaucgaccgccugaucaccggccggcugcagucccuccagaccuacgugacccagcagcugauccgcgcggccgagauccgggccagcgccaaccuggccgcgaccaagaugagcgagugcguccucggccaguccaagcgcguggacuucugcgggaagggcuaccaccugaugagcuucccccaguccgccccgcacgggguggucuuccugcacgugacguacguccccgcccaggagaagaacuucaccaccgcccccgcgaucugccacgacggcaaggcccacuucccccgggaggggguguucgugagcaacggcacccacugguucgucacgcagcgcaacuucuacgagccgcagaucaucaccaccgacaacaccuucguguccggcaacugcgacguggucaucgggaucgugaacaacacgguguacgacccccuccagcccgagcuggacagcuucaaggaggagcuggacaaguacuucaagaaccacaccucccccgacgucgaccucggcgacaucagcgggaucaacgccuccguggugaacauccagaaggagaucgaccggcugaacgaggucgccaagaaccugaacgagagccucaucgaccugcaggagcugggcaaguacgagcaguacaucaaguggccgugguacaucuggcucggcuucaucgccgggcugaucgcgaucgugauggugaccaucaugcugugcugcaugaccuccugcugcagcugccucaagggcugcugcuccugcgggagcugcugcaaguucgacgaggacgacuccgagcccguccugaagggcgugaagcugcacuacacgugaggacuaguuauaagacugacuagcccgaugggccucccaacgggcccuccuccccuccuugcaccgagauuaaucaaaggcucuuuucagagccaccaaaaaaaaaaaaaaaaaaaaaaaaaaaaaaaaaaaaaaaaaaaaaaaaaaaaaaaaaaaaaaaaaaaaaaaaaaaaaaaaaaaaaaaaaaaaaaaaaaaaa

SEQ ID NO: 24105 - RNA, 4035 nt, Artificial Sequence
  SARS-CoV-2/Wuhan/WIV05/2019__EPI_ISL_402128 spike protein mRNA gc (1-1273)
aggagaaagcuuaccauguucguguuccuggugcugcugccccuggugagcagccagugcgugaaccugaccacccggacccagcugccaccagccuacaccaacagcuucacccggggcgucuacuaccccgacaagguguuccggagcagcguccugcacagcacccaggaccuguuccugcccuucuucagcaacgugaccugguuccacgccauccacgugagcggcaccaacggcaccaagcgguucgacaaccccgugcugcccuucaacgacggcguguacuucgccagcaccgagaagagcaacaucauccggggcuggaucuucggcaccacccuggacagcaagacccagagccugcugaucgugaauaacgccaccaacguggugaucaaggugugcgaguuccaguucugcaacgaccccuuccugggcguguacuaccacaagaacaacaagagcuggauggagagcgaguuccggguguacagcagcgccaacaacugcaccuucgaguacgugagccagcccuuccugauggaccuggagggcaagcagggcaacuucaagaaccugcgggaguucguguucaagaacaucgacggcuacuucaagaucuacagcaagcacaccccaaucaaccuggugcgggaucugccccagggcuucucagcccuggagccccugguggaccugcccaucggcaucaacaucacccgguuccagacccugcuggcccugcaccggagcuaccugaccccaggcgacagcagcagcggguggacagcaggcgcggcugcuuacuacgugggcuaccugcagccccggaccuuccugcugaaguacaacgagaacggcaccaucaccgacgccguggacugcgcccuggacccucugagcgagaccaagugcacccugaagagcuucaccguggagaagggcaucuaccagaccagcaacuuccgggugcagcccaccgagagcaucgugcgguuccccaacaucaccaaccugugccccuucggcgagguguucaacgccacccgguucgccagcguguacgccuggaaccggaagcggaucagcaacugcguggccgacuacagcgugcuguacaacagcgccagcuucagcaccuucaagugcuacggcgugagccccaccaagcugaacgaccugugcuucaccaacguguacgccgacagcuucgugauccguggcgacgaggugcggcagaucgcacccggccagacaggcaagaucgccgacuacaacuacaagcugcccgacgacuucaccggcugcgugaucgccuggaacagcaacaaccucgacagcaaggugggcggcaacuacaacuaccuguaccggcuguuccggaagagcaaccugaagcccuucgagcgggacaucagcaccgagaucuaccaagccggcuccaccccuugcaacggcguggagggcuucaacugcuacuucccucugcagagcuacggcuuccagcccaccaacggcgugggcuaccagcccuaccgggugguggugcugagcuucgagcugcugcacgccccagccaccguguguggccccaagaagagcaccaaccuggugaagaacaagugcgugaacuucaacuucaacggccuuaccggcaccggcgugcugaccgagagcaacaagaaauuccugcccuuucagcaguucggccgggacaucgccgacaccaccgacgcugugcgggauccccagacccuggagauccuggacaucaccccuugcagcuucggcggcgugagcgugaucaccccaggcaccaacaccagcaaccagguggccgugcuguaccaggacgugaacugcaccgaggugcccguggccauccacgccgaccagcugacacccaccuggcgggucuacagcaccggcagcaacguguuccagacccgggccgguugccugaucggcgccgagcacgugaacaacagcuacgagugcgacauccccaucggcgccggcaucugugccagcuaccagacccagaccaauucaccccggagggcaaggagcguggccagccagagcaucaucgccuacaccaugagccugggcgccgagaacagcguggccuacagcaacaacagcaucgccauccccaccaacuucaccaucagcgugaccaccgagauucugcccgugagcaugaccaagaccagcguggacugcaccauguacaucugcggcgacagcaccgagugcagcaaccugcugcugcaguacggcagcuucugcacccagcugaaccgggcccugaccggcaucgccguggagcaggacaagaacacccaggagguguucgcccaggugaagcagaucuacaagaccccucccaucaaggacuucggcggcuucaacuucagccagauccugcccgaccccagcaagcccagcaagcggagcuucaucgaggaccugcuguucaacaaggugacccuagccgacgccggcuucaucaagcaguacggcgacugccucggcgacauagccgcccgggaccugaucugcgcccagaaguucaacggccugaccgugcugccuccccugcugaccgacgagaugaucgcccaguacaccagcgcccuguuagccggaaccaucaccagcggcuggacuuucggcgcuggagccgcucugcagauccccuucgccaugcagauggccuaccgguucaacggcaucggcgugacccagaacgugcuguacgagaaccagaagcugaucgccaaccaguucaacagcgccaucggcaagauccaggacagccugagcagcaccgcuagcgcccugggcaagcugcaggacguggugaaccagaacgcccaggcccugaacacccuggugaagcagcugagcagcaacuucggcgccaucagcagcgugcugaacgacauccugagccggcuggacaaggucgaggccgaggugcagaucgaccggcugaucacuggccggcugcagagccugcagaccuacgugacccagcagcugauccgggccgccgagauucgggccagcgccaaccuggccgccaccaagaugagcgagugcgugcugggccagagcaagcggguggacuucugcggcaagggcuaccaccugaugagcuuuccccagagcgcaccccacggagugguguuccugcacgugaccuacgugcccgcccaggagaagaacuucaccaccgccccagccaucugccacgacggcaaggcccacuuuccccgggagggcguguucgugagcaacggcacccacugguucgugacccagcggaacuucuacgagccccagaucaucaccaccgacaacaccuucgugagcggcaacugcgacguggugaucggcaucgugaacaacaccguguacgauccccugcagcccgagcuggacagcuucaaggaggagcuggacaaguacuucaagaaucacaccagccccgacguggaccugggcgacaucagcggcaucaacgccagcguggugaacauccagaaggagaucgaucggcugaacgagguggccaagaaccugaacgagagccugaucgaccugcaggagcugggcaaguacgagcaguacaucaaguggcccugguacaucuggcugggcuucaucgccggccugaucgccaucgugauggugaccaucaugcugugcugcaugaccagcugcugcagcugccugaagggcuguugcagcugcggcagcugcugcaaguucgacgaggacgacagcgagcccgugcugaagggcgugaagcugcacuacaccugaggacuaguuauaagacugacuagcccgaugggccucccaacgggcccuccuccccuccuugcaccgagauuaaucaaaggcucuuuucagagccaccaaaaaaaaaaaaaaaaaaaaaaaaaaaaaaaaaaaaaaaaaaaaaaaaaaaaaaaaaaaaaaaaaaaaaaaaaaaaaaaaaaaaaaaaaaaaaaaaaaaaa

SEQ ID NO: 24106 - RNA, 4035 nt, Artificial Sequence
  SARS-CoV-2/Wuhan/WIV05/2019__EPI_ISL_402128 spike protein mRNA gc (1-1273)(D614G)
aggagaaagcuuaccauguucguguuccuggugcugcugccccuggugagcagccagugcgugaaccugaccacccggacccagcugccaccagccuacaccaacagcuucacccggggcgucuacuaccccgacaagguguuccggagcagcguccugcacagcacccaggaccuguuccugcccuucuucagcaacgugaccugguuccacgccauccacgugagcggcaccaacggcaccaagcgguucgacaaccccgugcugcccuucaacgacggcguguacuucgccagcaccgagaagagcaacaucauccggggcuggaucuucggcaccacccuggacagcaagacccagagccugcugaucgugaauaacgccaccaacguggugaucaaggugugcgaguuccaguucugcaacgaccccuuccugggcguguacuaccacaagaacaacaagagcuggauggagagcgaguuccggguguacagcagcgccaacaacugcaccuucgaguacgugagccagcccuuccugauggaccuggagggcaagcagggcaacuucaagaaccugcgggaguucguguucaagaacaucgacggcuacuucaagaucuacagcaagcacaccccaaucaaccuggugcgggaucugccccagggcuucucagcccuggagccccugguggaccugcccaucggcaucaacaucacccgguuccagacccugcuggcccugcaccggagcuaccugaccccaggcgacagcagcagcggguggacagcaggcgcggcugcuuacuacgugggcuaccugcagccccggaccuuccugcugaaguacaacgagaacggcaccaucaccgacgccguggacugcgcccuggacccucugagcgagaccaagugcacccugaagagcuucaccguggagaagggcaucuaccagaccagcaacuuccgggugcagcccaccgagagcaucgugcgguuccccaacaucaccaaccugugccccuucggcgagguguucaacgccacccgguucgccagcguguacgccuggaaccggaagcggaucagcaacugcguggccgacuacagcgugcuguacaacagcgccagcuucagcaccuucaagugcuacggcgugagccccaccaagcugaacgaccugugcuucaccaacguguacgccgacagcuucgugauccguggcgacgaggugcggcagaucgcacccggccagacaggcaagaucgccgacuacaacuacaagcugcccgacgacuucaccggcugcgugaucgccuggaacagcaacaaccucgacagcaaggugggcggcaacuacaacuaccuguaccggcuguuccggaagagcaaccugaagcccuucgagcgggacaucagcaccgagaucuaccaagccggcuccaccccuugcaacggcguggagggcuucaacugcuacuucccucugcagagcuacggcuuccagcccaccaacggcgugggcuaccagcccuaccgggugguggugcugagcuucgagcugcugcacgccccagccaccguguguggccccaagaagagcaccaaccuggugaagaacaagugcgugaacuucaacuucaacggccuuaccggcaccggcgugcugaccgagagcaacaagaaauuccugcccuuucagcaguucggccgggacaucgccgacaccaccgacgcugugcgggauccccagacccuggagauccuggacaucaccccuugcagcuucggcggcgugagcgugaucaccccaggcaccaacaccagcaaccagguggccgugcuguaccagggcgugaacugcaccgaggugcccguggccauccacgccgaccagcugacacccaccuggcgggucuacagcaccggcagcaacguguuccagacccgggccgguugccugaucggcgccgagcacgugaacaacagcuacgagugcgacauccccaucggcgccggcaucugugccagcuaccagacccagaccaauucaccccggagggcaaggagcguggccagccagagcaucaucgccuacaccaugagccugggcgccgagaacagcguggccuacagcaacaacagcaucgccauccccaccaacuucaccaucagcgugaccaccgagauucugcccgugagcaugaccaagaccagcguggacugcaccauguacaucugcggcgacagcaccgagugcagcaaccugcugcugcaguacggcagcuucugcacccagcugaaccgggcccugaccggcaucgccguggagcaggacaagaacacccaggagguguucgcccaggugaagcagaucuacaagaccccucccaucaaggacuucggcggcuucaacuucagccagauccugcccgaccccagcaagcccagcaagcggagcuucaucgaggaccugcuguucaacaaggugacccuagccgacgccggcuucaucaagcaguacggcgacugccucggcgacauagccgcccgggaccugaucugcgcccagaaguucaacggccugaccgugcugccuccccugcugaccgacgagaugaucgcccaguacaccagcgcccuguuagccggaaccaucaccagcggcuggacuuucggcgcuggagccgcucugcagauccccuucgccaugcagauggccuaccgguucaacggcaucggcgugacccagaacgugcuguacgagaaccagaagcugaucgccaaccaguucaacagcgccaucggcaagauccaggacagccugagcagcaccgcuagcgcccugggcaagcugcaggacguggugaaccagaacgcccaggcccugaacacccuggugaagcagcugagcagcaacuucggcgccaucagcagcgugcugaacgacauccugagccggcuggacaaggucgaggccgaggugcagaucgaccggcugaucacuggccggcugcagagccugcagaccuacgugacccagcagcugauccgggccgccgagauucgggccagcgccaaccuggccgccaccaagaugagcgagugcgugcugggccagagcaagcggguggacuucugcggcaagggcuaccaccugaugagcuuuccccagagcgcaccccacggagugguguuccugcacgugaccuacgugcccgcccaggagaagaacuucaccaccgccccagccaucugccacgacggcaaggcccacuuuccccgggagggcguguucgugagcaacggcacccacugguucgugacccagcggaacuucuacgagccccagaucaucaccaccgacaacaccuucgugagcggcaacugcgacguggugaucggcaucgugaacaacaccguguacgauccccugcagcccgagcuggacagcuucaaggaggagcuggacaaguacuucaagaaucacaccagccccgacguggaccugggcgacaucagcggcaucaacgccagcguggugaacauccagaaggagaucgaucggcugaacgagguggccaagaaccugaacgagagccugaucgaccugcaggagcugggcaaguacgagcaguacaucaaguggcccugguacaucuggcugggcuucaucgccggccugaucgccaucgugauggugaccaucaugcugugcugcaugaccagcugcugcagcugccugaagggcuguugcagcugcggcagcugcugcaaguucgacgaggacgacagcgagcccgugcugaagggcgugaagcugcacuacaccugaggacuaguuauaagacugacuagcccgaugggccucccaacgggcccuccuccccuccuugcaccgagauuaaucaaaggcucuuuucagagccaccaaaaaaaaaaaaaaaaaaaaaaaaaaaaaaaaaaaaaaaaaaaaaaaaaaaaaaaaaaaaaaaaaaaaaaaaaaaaaaaaaaaaaaaaaaaaaaaaaaaaa

SEQ ID NO: 24107 - RNA, 4035 nt, Artificial Sequence
  SARS-CoV-2/Wuhan/WIV05/2019__EPI_ISL_402128 spike protein mRNA gc (1-1273)(A222V_D614G)
aggagaaagcuuaccauguucguguuccuggugcugcugccccuggugagcagccagugcgugaaccugaccacccggacccagcugccaccagccuacaccaacagcuucacccggggcgucuacuaccccgacaagguguuccggagcagcguccugcacagcacccaggaccuguuccugcccuucuucagcaacgugaccugguuccacgccauccacgugagcggcaccaacggcaccaagcgguucgacaaccccgugcugcccuucaacgacggcguguacuucgccagcaccgagaagagcaacaucauccggggcuggaucuucggcaccacccuggacagcaagacccagagccugcugaucgugaauaacgccaccaacguggugaucaaggugugcgaguuccaguucugcaacgaccccuuccugggcguguacuaccacaagaacaacaagagcuggauggagagcgaguuccggguguacagcagcgccaacaacugcaccuucgaguacgugagccagcccuuccugauggaccuggagggcaagcagggcaacuucaagaaccugcgggaguucguguucaagaacaucgacggcuacuucaagaucuacagcaagcacaccccaaucaaccuggugcgggaucugccccagggcuucucagugcuggagccccugguggaccugcccaucggcaucaacaucacccgguuccagacccugcuggcccugcaccggagcuaccugaccccaggcgacagcagcagcggguggacagcaggcgcggcugcuuacuacgugggcuaccugcagccccggaccuuccugcugaaguacaacgagaacggcaccaucaccgacgccguggacugcgcccuggacccucugagcgagaccaagugcacccugaagagcuucaccguggagaagggcaucuaccagaccagcaacuuccgggugcagcccaccgagagcaucgugcgguuccccaacaucaccaaccugugccccuucggcgagguguucaacgccacccgguucgccagcguguacgccuggaaccggaagcggaucagcaacugcguggccgacuacagcgugcuguacaacagcgccagcuucagcaccuucaagugcuacggcgugagccccaccaagcugaacgaccugugcuucaccaacguguacgccgacagcuucgugauccguggcgacgaggugcggcagaucgcacccggccagacaggcaagaucgccgacuacaacuacaagcugcccgacgacuucaccggcugcgugaucgccuggaacagcaacaaccucgacagcaaggugggcggcaacuacaacuaccuguaccggcuguuccggaagagcaaccugaagcccuucgagcgggacaucagcaccgagaucuaccaagccggcuccaccccuugcaacggcguggagggcuucaacugcuacuucccucugcagagcuacggcuuccagcccaccaacggcgugggcuaccagcccuaccgggugguggugcugagcuucgagcugcugcacgccccagccaccguguguggccccaagaagagcaccaaccuggugaagaacaagugcgugaacuucaacuucaacggccuuaccggcaccggcgugcugaccgagagcaacaagaaauuccugcccuuucagcaguucggccgggacaucgccgacaccaccgacgcugugcgggauccccagacccuggagauccuggacaucaccccuugcagcuucggcggcgugagcgugaucaccccaggcaccaacaccagcaaccagguggccgugcuguaccagggcgugaacugcaccgaggugcccguggccauccacgccgaccagcugacacccaccuggcgggucuacagcaccggcagcaacguguuccagacccgggccgguugccugaucggcgccgagcacgugaacaacagcuacgagugcgacauccccaucggcgccggcaucugugccagcuaccagacccagaccaauucaccccggagggcaaggagcguggccagccagagcaucaucgccuacaccaugagccugggcgccgagaacagcguggccuacagcaacaacagcaucgccauccccaccaacuucaccaucagcgugaccaccgagauucugcccgugagcaugaccaagaccagcguggacugcaccauguacaucugcggcgacagcaccgagugcagcaaccugcugcugcaguacggcagcuucugcacccagcugaaccgggcccugaccggcaucgccguggagcaggacaagaacacccaggagguguucgcccaggugaagcagaucuacaagaccccucccaucaaggacuucggcggcuucaacuucagccagauccugcccgaccccagcaagcccagcaagcggagcuucaucgaggaccugcuguucaacaaggugacccuagccgacgccggcuucaucaagcaguacggcgacugccucggcgacauagccgcccgggaccugaucugcgcccagaaguucaacggccugaccgugcugccuccccugcugaccgacgagaugaucgcccaguacaccagcgcccuguuagccggaaccaucaccagcggcuggacuuucggcgcuggagccgcucugcagauccccuucgccaugcagauggccuaccgguucaacggcaucggcgugacccagaacgugcuguacgagaaccagaagcugaucgccaaccaguucaacagcgccaucggcaagauccaggacagccugagcagcaccgcuagcgcccugggcaagcugcaggacguggugaaccagaacgcccaggcccugaacacccuggugaagcagcugagcagcaacuucggcgccaucagcagcgugcugaacgacauccugagccggcuggacaaggucgaggccgaggugcagaucgaccggcugaucacuggccggcugcagagccugcagaccuacgugacccagcagcugauccgggccgccgagauucgggccagcgccaaccuggccgccaccaagaugagcgagugcgugcugggccagagcaagcggguggacuucugcggcaagggcuaccaccugaugagcuuuccccagagcgcaccccacggagugguguuccugcacgugaccuacgugcccgcccaggagaagaacuucaccaccgccccagccaucugccacgacggcaaggcccacuuuccccgggagggcguguucgugagcaacggcacccacugguucgugacccagcggaacuucuacgagccccagaucaucaccaccgacaacaccuucgugagcggcaacugcgacguggugaucggcaucgugaacaacaccguguacgauccccugcagcccgagcuggacagcuucaaggaggagcuggacaaguacuucaagaaucacaccagccccgacguggaccugggcgacaucagcggcaucaacgccagcguggugaacauccagaaggagaucgaucggcugaacgagguggccaagaaccugaacgagagccugaucgaccugcaggagcugggcaaguacgagcaguacaucaaguggcccugguacaucuggcugggcuucaucgccggccugaucgccaucgugauggugaccaucaugcugugcugcaugaccagcugcugcagcugccugaagggcuguugcagcugcggcagcugcugcaaguucgacgaggacgacagcgagcccgugcugaagggcgugaagcugcacuacaccugaggacuaguuauaagacugacuagcccgaugggccucccaacgggcccuccuccccuccuugcaccgagauuaaucaaaggcucuuuucagagccaccaaaaaaaaaaaaaaaaaaaaaaaaaaaaaaaaaaaaaaaaaaaaaaaaaaaaaaaaaaaaaaaaaaaaaaaaaaaaaaaaaaaaaaaaaaaaaaaaaaaaa

SEQ ID NO: 24108 - RNA, 4035 nt, Artificial Sequence
  SARS-CoV-2/Wuhan/WIV05/2019__EPI_ISL_402128 spike protein mRNA gc (1-1273)(N439K_D614G)
aggagaaagcuuaccauguucguguuccuggugcugcugccccuggugagcagccagugcgugaaccugaccacccggacccagcugccaccagccuacaccaacagcuucacccggggcgucuacuaccccgacaagguguuccggagcagcguccugcacagcacccaggaccuguuccugcccuucuucagcaacgugaccugguuccacgccauccacgugagcggcaccaacggcaccaagcgguucgacaaccccgugcugcccuucaacgacggcguguacuucgccagcaccgagaagagcaacaucauccggggcuggaucuucggcaccacccuggacagcaagacccagagccugcugaucgugaauaacgccaccaacguggugaucaaggugugcgaguuccaguucugcaacgaccccuuccugggcguguacuaccacaagaacaacaagagcuggauggagagcgaguuccggguguacagcagcgccaacaacugcaccuucgaguacgugagccagcccuuccugauggaccuggagggcaagcagggcaacuucaagaaccugcgggaguucguguucaagaacaucgacggcuacuucaagaucuacagcaagcacaccccaaucaaccuggugcgggaucugccccagggcuucucagcccuggagccccugguggaccugcccaucggcaucaacaucacccgguuccagacccugcuggcccugcaccggagcuaccugaccccaggcgacagcagcagcggguggacagcaggcgcggcugcuuacuacgugggcuaccugcagccccggaccuuccugcugaaguacaacgagaacggcaccaucaccgacgccguggacugcgcccuggacccucugagcgagaccaagugcacccugaagagcuucaccguggagaagggcaucuaccagaccagcaacuuccgggugcagcccaccgagagcaucgugcgguuccccaacaucaccaaccugugccccuucggcgagguguucaacgccacccgguucgccagcguguacgccuggaaccggaagcggaucagcaacugcguggccgacuacagcgugcuguacaacagcgccagcuucagcaccuucaagugcuacggcgugagccccaccaagcugaacgaccugugcuucaccaacguguacgccgacagcuucgugauccguggcgacgaggugcggcagaucgcacccggccagacaggcaagaucgccgacuacaacuacaagcugcccgacgacuucaccggcugcgugaucgccuggaacagcaagaaccucgacagcaaggugggcggcaacuacaacuaccuguaccggcuguuccggaagagcaaccugaagcccuucgagcgggacaucagcaccgagaucuaccaagccggcuccaccccuugcaacggcguggagggcuucaacugcuacuucccucugcagagcuacggcuuccagcccaccaacggcgugggcuaccagcccuaccgggugguggugcugagcuucgagcugcugcacgccccagccaccguguguggccccaagaagagcaccaaccuggugaagaacaagugcgugaacuucaacuucaacggccuuaccggcaccggcgugcugaccgagagcaacaagaaauuccugcccuuucagcaguucggccgggacaucgccgacaccaccgacgcugugcgggauccccagacccuggagauccuggacaucaccccuugcagcuucggcggcgugagcgugaucaccccaggcaccaacaccagcaaccagguggccgugcuguaccagggcgugaacugcaccgaggugcccguggccauccacgccgaccagcugacacccaccuggcgggucuacagcaccggcagcaacguguuccagacccgggccgguugccugaucggcgccgagcacgugaacaacagcuacgagugcgacauccccaucggcgccggcaucugugccagcuaccagacccagaccaauucaccccggagggcaaggagcguggccagccagagcaucaucgccuacaccaugagccugggcgccgagaacagcguggccuacagcaacaacagcaucgccauccccaccaacuucaccaucagcgugaccaccgagauucugcccgugagcaugaccaagaccagcguggacugcaccauguacaucugcggcgacagcaccgagugcagcaaccugcugcugcaguacggcagcuucugcacccagcugaaccgggcccugaccggcaucgccguggagcaggacaagaacacccaggagguguucgcccaggugaagcagaucuacaagaccccucccaucaaggacuucggcggcuucaacuucagccagauccugcccgaccccagcaagcccagcaagcggagcuucaucgaggaccugcuguucaacaaggugacccuagccgacgccggcuucaucaagcaguacggcgacugccucggcgacauagccgcccgggaccugaucugcgcccagaaguucaacggccugaccgugcugccuccccugcugaccgacgagaugaucgcccaguacaccagcgcccuguuagccggaaccaucaccagcggcuggacuuucggcgcuggagccgcucugcagauccccuucgccaugcagauggccuaccgguucaacggcaucggcgugacccagaacgugcuguacgagaaccagaagcugaucgccaaccaguucaacagcgccaucggcaagauccaggacagccugagcagcaccgcuagcgcccugggcaagcugcaggacguggugaaccagaacgcccaggcccugaacacccuggugaagcagcugagcagcaacuucggcgccaucagcagcgugcugaacgacauccugagccggcuggacaaggucgaggccgaggugcagaucgaccggcugaucacuggccggcugcagagccugcagaccuacgugacccagcagcugauccgggccgccgagauucgggccagcgccaaccuggccgccaccaagaugagcgagugcgugcugggccagagcaagcggguggacuucugcggcaagggcuaccaccugaugagcuuuccccagagcgcaccccacggagugguguuccugcacgugaccuacgugcccgcccaggagaagaacuucaccaccgccccagccaucugccacgacggcaaggcccacuuuccccgggagggcguguucgugagcaacggcacccacugguucgugacccagcggaacuucuacgagccccagaucaucaccaccgacaacaccuucgugagcggcaacugcgacguggugaucggcaucgugaacaacaccguguacgauccccugcagcccgagcuggacagcuucaaggaggagcuggacaaguacuucaagaaucacaccagccccgacguggaccugggcgacaucagcggcaucaacgccagcguggugaacauccagaaggagaucgaucggcugaacgagguggccaagaaccugaacgagagccugaucgaccugcaggagcugggcaaguacgagcaguacaucaaguggcccugguacaucuggcugggcuucaucgccggccugaucgccaucgugauggugaccaucaugcugugcugcaugaccagcugcugcagcugccugaagggcuguugcagcugcggcagcugcugcaaguucgacgaggacgacagcgagcccgugcugaagggcgugaagcugcacuacaccugaggacuaguuauaagacugacuagcccgaugggccucccaacgggcccuccuccccuccuugcaccgagauuaaucaaaggcucuuuucagagccaccaaaaaaaaaaaaaaaaaaaaaaaaaaaaaaaaaaaaaaaaaaaaaaaaaaaaaaaaaaaaaaaaaaaaaaaaaaaaaaaaaaaaaaaaaaaaaaaaaaaaa

SEQ ID NO: 24109 - RNA, 4035 nt, Artificial Sequence
  SARS-CoV-2/Wuhan/WIV05/2019__EPI_ISL_402128 spike protein mRNA gc (1-1273)(S477N_D614G)
aggagaaagcuuaccauguucguguuccuggugcugcugccccuggugagcagccagugcgugaaccugaccacccggacccagcugccaccagccuacaccaacagcuucacccggggcgucuacuaccccgacaagguguuccggagcagcguccugcacagcacccaggaccuguuccugcccuucuucagcaacgugaccugguuccacgccauccacgugagcggcaccaacggcaccaagcgguucgacaaccccgugcugcccuucaacgacggcguguacuucgccagcaccgagaagagcaacaucauccggggcuggaucuucggcaccacccuggacagcaagacccagagccugcugaucgugaauaacgccaccaacguggugaucaaggugugcgaguuccaguucugcaacgaccccuuccugggcguguacuaccacaagaacaacaagagcuggauggagagcgaguuccggguguacagcagcgccaacaacugcaccuucgaguacgugagccagcccuuccugauggaccuggagggcaagcagggcaacuucaagaaccugcgggaguucguguucaagaacaucgacggcuacuucaagaucuacagcaagcacaccccaaucaaccuggugcgggaucugccccagggcuucucagcccuggagccccugguggaccugcccaucggcaucaacaucacccgguuccagacccugcuggcccugcaccggagcuaccugaccccaggcgacagcagcagcggguggacagcaggcgcggcugcuuacuacgugggcuaccugcagccccggaccuuccugcugaaguacaacgagaacggcaccaucaccgacgccguggacugcgcccuggacccucugagcgagaccaagugcacccugaagagcuucaccguggagaagggcaucuaccagaccagcaacuuccgggugcagcccaccgagagcaucgugcgguuccccaacaucaccaaccugugccccuucggcgagguguucaacgccacccgguucgccagcguguacgccuggaaccggaagcggaucagcaacugcguggccgacuacagcgugcuguacaacagcgccagcuucagcaccuucaagugcuacggcgugagccccaccaagcugaacgaccugugcuucaccaacguguacgccgacagcuucgugauccguggcgacgaggugcggcagaucgcacccggccagacaggcaagaucgccgacuacaacuacaagcugcccgacgacuucaccggcugcgugaucgccuggaacagcaacaaccucgacagcaaggugggcggcaacuacaacuaccuguaccggcuguuccggaagagcaaccugaagcccuucgagcgggacaucagcaccgagaucuaccaagccggcaacaccccuugcaacggcguggagggcuucaacugcuacuucccucugcagagcuacggcuuccagcccaccaacggcgugggcuaccagcccuaccgggugguggugcugagcuucgagcugcugcacgccccagccaccguguguggccccaagaagagcaccaaccuggugaagaacaagugcgugaacuucaacuucaacggccuuaccggcaccggcgugcugaccgagagcaacaagaaauuccugcccuuucagcaguucggccgggacaucgccgacaccaccgacgcugugcgggauccccagacccuggagauccuggacaucaccccuugcagcuucggcggcgugagcgugaucaccccaggcaccaacaccagcaaccagguggccgugcuguaccagggcgugaacugcaccgaggugcccguggccauccacgccgaccagcugacacccaccuggcgggucuacagcaccggcagcaacguguuccagacccgggccgguugccugaucggcgccgagcacgugaacaacagcuacgagugcgacauccccaucggcgccggcaucugugccagcuaccagacccagaccaauucaccccggagggcaaggagcguggccagccagagcaucaucgccuacaccaugagccugggcgccgagaacagcguggccuacagcaacaacagcaucgccauccccaccaacuucaccaucagcgugaccaccgagauucugcccgugagcaugaccaagaccagcguggacugcaccauguacaucugcggcgacagcaccgagugcagcaaccugcugcugcaguacggcagcuucugcacccagcugaaccgggcccugaccggcaucgccguggagcaggacaagaacacccaggagguguucgcccaggugaagcagaucuacaagaccccucccaucaaggacuucggcggcuucaacuucagccagauccugcccgaccccagcaagcccagcaagcggagcuucaucgaggaccugcuguucaacaaggugacccuagccgacgccggcuucaucaagcaguacggcgacugccucggcgacauagccgcccgggaccugaucugcgcccagaaguucaacggccugaccgugcugccuccccugcugaccgacgagaugaucgcccaguacaccagcgcccuguuagccggaaccaucaccagcggcuggacuuucggcgcuggagccgcucugcagauccccuucgccaugcagauggccuaccgguucaacggcaucggcgugacccagaacgugcuguacgagaaccagaagcugaucgccaaccaguucaacagcgccaucggcaagauccaggacagccugagcagcaccgcuagcgcccugggcaagcugcaggacguggugaaccagaacgcccaggcccugaacacccuggugaagcagcugagcagcaacuucggcgccaucagcagcgugcugaacgacauccugagccggcuggacaaggucgaggccgaggugcagaucgaccggcugaucacuggccggcugcagagccugcagaccuacgugacccagcagcugauccgggccgccgagauucgggccagcgccaaccuggccgccaccaagaugagcgagugcgugcugggccagagcaagcggguggacuucugcggcaagggcuaccaccugaugagcuuuccccagagcgcaccccacggagugguguuccugcacgugaccuacgugcccgcccaggagaagaacuucaccaccgccccagccaucugccacgacggcaaggcccacuuuccccgggagggcguguucgugagcaacggcacccacugguucgugacccagcggaacuucuacgagccccagaucaucaccaccgacaacaccuucgugagcggcaacugcgacguggugaucggcaucgugaacaacaccguguacgauccccugcagcccgagcuggacagcuucaaggaggagcuggacaaguacuucaagaaucacaccagccccgacguggaccugggcgacaucagcggcaucaacgccagcguggugaacauccagaaggagaucgaucggcugaacgagguggccaagaaccugaacgagagccugaucgaccugcaggagcugggcaaguacgagcaguacaucaaguggcccugguacaucuggcugggcuucaucgccggccugaucgccaucgugauggugaccaucaugcugugcugcaugaccagcugcugcagcugccugaagggcuguugcagcugcggcagcugcugcaaguucgacgaggacgacagcgagcccgugcugaagggcgugaagcugcacuacaccugaggacuaguuauaagacugacuagcccgaugggccucccaacgggcccuccuccccuccuugcaccgagauuaaucaaaggcucuuuucagagccaccaaaaaaaaaaaaaaaaaaaaaaaaaaaaaaaaaaaaaaaaaaaaaaaaaaaaaaaaaaaaaaaaaaaaaaaaaaaaaaaaaaaaaaaaaaaaaaaaaaaaa

SEQ ID NO: 24110 - RNA, 4035 nt, Artificial Sequence
  SARS-CoV-2/Wuhan/WIV05/2019__EPI_ISL_402128 spike protein mRNA gc (1-1273)(N501Y_D614G)
aggagaaagcuuaccauguucguguuccuggugcugcugccccuggugagcagccagugcgugaaccugaccacccggacccagcugccaccagccuacaccaacagcuucacccggggcgucuacuaccccgacaagguguuccggagcagcguccugcacagcacccaggaccuguuccugcccuucuucagcaacgugaccugguuccacgccauccacgugagcggcaccaacggcaccaagcgguucgacaaccccgugcugcccuucaacgacggcguguacuucgccagcaccgagaagagcaacaucauccggggcuggaucuucggcaccacccuggacagcaagacccagagccugcugaucgugaauaacgccaccaacguggugaucaaggugugcgaguuccaguucugcaacgaccccuuccugggcguguacuaccacaagaacaacaagagcuggauggagagcgaguuccggguguacagcagcgccaacaacugcaccuucgaguacgugagccagcccuuccugauggaccuggagggcaagcagggcaacuucaagaaccugcgggaguucguguucaagaacaucgacggcuacuucaagaucuacagcaagcacaccccaaucaaccuggugcgggaucugccccagggcuucucagcccuggagccccugguggaccugcccaucggcaucaacaucacccgguuccagacccugcuggcccugcaccggagcuaccugaccccaggcgacagcagcagcggguggacagcaggcgcggcugcuuacuacgugggcuaccugcagccccggaccuuccugcugaaguacaacgagaacggcaccaucaccgacgccguggacugcgcccuggacccucugagcgagaccaagugcacccugaagagcuucaccguggagaagggcaucuaccagaccagcaacuuccgggugcagcccaccgagagcaucgugcgguuccccaacaucaccaaccugugccccuucggcgagguguucaacgccacccgguucgccagcguguacgccuggaaccggaagcggaucagcaacugcguggccgacuacagcgugcuguacaacagcgccagcuucagcaccuucaagugcuacggcgugagccccaccaagcugaacgaccugugcuucaccaacguguacgccgacagcuucgugauccguggcgacgaggugcggcagaucgcacccggccagacaggcaagaucgccgacuacaacuacaagcugcccgacgacuucaccggcugcgugaucgccuggaacagcaacaaccucgacagcaaggugggcggcaacuacaacuaccuguaccggcuguuccggaagagcaaccugaagcccuucgagcgggacaucagcaccgagaucuaccaagccggcuccaccccuugcaacggcguggagggcuucaacugcuacuucccucugcagagcuacggcuuccagcccaccuacggcgugggcuaccagcccuaccgggugguggugcugagcuucgagcugcugcacgccccagccaccguguguggccccaagaagagcaccaaccuggugaagaacaagugcgugaacuucaacuucaacggccuuaccggcaccggcgugcugaccgagagcaacaagaaauuccugcccuuucagcaguucggccgggacaucgccgacaccaccgacgcugugcgggauccccagacccuggagauccuggacaucaccccuugcagcuucggcggcgugagcgugaucaccccaggcaccaacaccagcaaccagguggccgugcuguaccagggcgugaacugcaccgaggugcccguggccauccacgccgaccagcugacacccaccuggcgggucuacagcaccggcagcaacguguuccagacccgggccgguugccugaucggcgccgagcacgugaacaacagcuacgagugcgacauccccaucggcgccggcaucugugccagcuaccagacccagaccaauucaccccggagggcaaggagcguggccagccagagcaucaucgccuacaccaugagccugggcgccgagaacagcguggccuacagcaacaacagcaucgccauccccaccaacuucaccaucagcgugaccaccgagauucugcccgugagcaugaccaagaccagcguggacugcaccauguacaucugcggcgacagcaccgagugcagcaaccugcugcugcaguacggcagcuucugcacccagcugaaccgggcccugaccggcaucgccguggagcaggacaagaacacccaggagguguucgcccaggugaagcagaucuacaagaccccucccaucaaggacuucggcggcuucaacuucagccagauccugcccgaccccagcaagcccagcaagcggagcuucaucgaggaccugcuguucaacaaggugacccuagccgacgccggcuucaucaagcaguacggcgacugccucggcgacauagccgcccgggaccugaucugcgcccagaaguucaacggccugaccgugcugccuccccugcugaccgacgagaugaucgcccaguacaccagcgcccuguuagccggaaccaucaccagcggcuggacuuucggcgcuggagccgcucugcagauccccuucgccaugcagauggccuaccgguucaacggcaucggcgugacccagaacgugcuguacgagaaccagaagcugaucgccaaccaguucaacagcgccaucggcaagauccaggacagccugagcagcaccgcuagcgcccugggcaagcugcaggacguggugaaccagaacgcccaggcccugaacacccuggugaagcagcugagcagcaacuucggcgccaucagcagcgugcugaacgacauccugagccggcuggacaaggucgaggccgaggugcagaucgaccggcugaucacuggccggcugcagagccugcagaccuacgugacccagcagcugauccgggccgccgagauucgggccagcgccaaccuggccgccaccaagaugagcgagugcgugcugggccagagcaagcggguggacuucugcggcaagggcuaccaccugaugagcuuuccccagagcgcaccccacggagugguguuccugcacgugaccuacgugcccgcccaggagaagaacuucaccaccgccccagccaucugccacgacggcaaggcccacuuuccccgggagggcguguucgugagcaacggcacccacugguucgugacccagcggaacuucuacgagccccagaucaucaccaccgacaacaccuucgugagcggcaacugcgacguggugaucggcaucgugaacaacaccguguacgauccccugcagcccgagcuggacagcuucaaggaggagcuggacaaguacuucaagaaucacaccagccccgacguggaccugggcgacaucagcggcaucaacgccagcguggugaacauccagaaggagaucgaucggcugaacgagguggccaagaaccugaacgagagccugaucgaccugcaggagcugggcaaguacgagcaguacaucaaguggcccugguacaucuggcugggcuucaucgccggccugaucgccaucgugauggugaccaucaugcugugcugcaugaccagcugcugcagcugccugaagggcuguugcagcugcggcagcugcugcaaguucgacgaggacgacagcgagcccgugcugaagggcgugaagcugcacuacaccugaggacuaguuauaagacugacuagcccgaugggccucccaacgggcccuccuccccuccuugcaccgagauuaaucaaaggcucuuuucagagccaccaaaaaaaaaaaaaaaaaaaaaaaaaaaaaaaaaaaaaaaaaaaaaaaaaaaaaaaaaaaaaaaaaaaaaaaaaaaaaaaaaaaaaaaaaaaaaaaaaaaaa

SEQ ID NO: 24111 - RNA, 4029 nt, Artificial Sequence
  SARS-CoV-2/Wuhan/WIV05/2019__EPI_ISL_402128 spike protein mRNA gc (1-1273)(H69del_V70del_D614G)
aggagaaagcuuaccauguucguguuccuggugcugcugccccuggugagcagccagugcgugaaccugaccacccggacccagcugccaccagccuacaccaacagcuucacccggggcgucuacuaccccgacaagguguuccggagcagcguccugcacagcacccaggaccuguuccugcccuucuucagcaacgugaccugguuccacgccaucagcggcaccaacggcaccaagcgguucgacaaccccgugcugcccuucaacgacggcguguacuucgccagcaccgagaagagcaacaucauccggggcuggaucuucggcaccacccuggacagcaagacccagagccugcugaucgugaauaacgccaccaacguggugaucaaggugugcgaguuccaguucugcaacgaccccuuccugggcguguacuaccacaagaacaacaagagcuggauggagagcgaguuccggguguacagcagcgccaacaacugcaccuucgaguacgugagccagcccuuccugauggaccuggagggcaagcagggcaacuucaagaaccugcgggaguucguguucaagaacaucgacggcuacuucaagaucuacagcaagcacaccccaaucaaccuggugcgggaucugccccagggcuucucagcccuggagccccugguggaccugcccaucggcaucaacaucacccgguuccagacccugcuggcccugcaccggagcuaccugaccccaggcgacagcagcagcggguggacagcaggcgcggcugcuuacuacgugggcuaccugcagccccggaccuuccugcugaaguacaacgagaacggcaccaucaccgacgccguggacugcgcccuggacccucugagcgagaccaagugcacccugaagagcuucaccguggagaagggcaucuaccagaccagcaacuuccgggugcagcccaccgagagcaucgugcgguuccccaacaucaccaaccugugccccuucggcgagguguucaacgccacccgguucgccagcguguacgccuggaaccggaagcggaucagcaacugcguggccgacuacagcgugcuguacaacagcgccagcuucagcaccuucaagugcuacggcgugagccccaccaagcugaacgaccugugcuucaccaacguguacgccgacagcuucgugauccguggcgacgaggugcggcagaucgcacccggccagacaggcaagaucgccgacuacaacuacaagcugcccgacgacuucaccggcugcgugaucgccuggaacagcaacaaccucgacagcaaggugggcggcaacuacaacuaccuguaccggcuguuccggaagagcaaccugaagcccuucgagcgggacaucagcaccgagaucuaccaagccggcuccaccccuugcaacggcguggagggcuucaacugcuacuucccucugcagagcuacggcuuccagcccaccaacggcgugggcuaccagcccuaccgggugguggugcugagcuucgagcugcugcacgccccagccaccguguguggccccaagaagagcaccaaccuggugaagaacaagugcgugaacuucaacuucaacggccuuaccggcaccggcgugcugaccgagagcaacaagaaauuccugcccuuucagcaguucggccgggacaucgccgacaccaccgacgcugugcgggauccccagacccuggagauccuggacaucaccccuugcagcuucggcggcgugagcgugaucaccccaggcaccaacaccagcaaccagguggccgugcuguaccagggcgugaacugcaccgaggugcccguggccauccacgccgaccagcugacacccaccuggcgggucuacagcaccggcagcaacguguuccagacccgggccgguugccugaucggcgccgagcacgugaacaacagcuacgagugcgacauccccaucggcgccggcaucugugccagcuaccagacccagaccaauucaccccggagggcaaggagcguggccagccagagcaucaucgccuacaccaugagccugggcgccgagaacagcguggccuacagcaacaacagcaucgccauccccaccaacuucaccaucagcgugaccaccgagauucugcccgugagcaugaccaagaccagcguggacugcaccauguacaucugcggcgacagcaccgagugcagcaaccugcugcugcaguacggcagcuucugcacccagcugaaccgggcccugaccggcaucgccguggagcaggacaagaacacccaggagguguucgcccaggugaagcagaucuacaagaccccucccaucaaggacuucggcggcuucaacuucagccagauccugcccgaccccagcaagcccagcaagcggagcuucaucgaggaccugcuguucaacaaggugacccuagccgacgccggcuucaucaagcaguacggcgacugccucggcgacauagccgcccgggaccugaucugcgcccagaaguucaacggccugaccgugcugccuccccugcugaccgacgagaugaucgcccaguacaccagcgcccuguuagccggaaccaucaccagcggcuggacuuucggcgcuggagccgcucugcagauccccuucgccaugcagauggccuaccgguucaacggcaucggcgugacccagaacgugcuguacgagaaccagaagcugaucgccaaccaguucaacagcgccaucggcaagauccaggacagccugagcagcaccgcuagcgcccugggcaagcugcaggacguggugaaccagaacgcccaggcccugaacacccuggugaagcagcugagcagcaacuucggcgccaucagcagcgugcugaacgacauccugagccggcuggacaaggucgaggccgaggugcagaucgaccggcugaucacuggccggcugcagagccugcagaccuacgugacccagcagcugauccgggccgccgagauucgggccagcgccaaccuggccgccaccaagaugagcgagugcgugcugggccagagcaagcggguggacuucugcggcaagggcuaccaccugaugagcuuuccccagagcgcaccccacggagugguguuccugcacgugaccuacgugcccgcccaggagaagaacuucaccaccgccccagccaucugccacgacggcaaggcccacuuuccccgggagggcguguucgugagcaacggcacccacugguucgugacccagcggaacuucuacgagccccagaucaucaccaccgacaacaccuucgugagcggcaacugcgacguggugaucggcaucgugaacaacaccguguacgauccccugcagcccgagcuggacagcuucaaggaggagcuggacaaguacuucaagaaucacaccagccccgacguggaccugggcgacaucagcggcaucaacgccagcguggugaacauccagaaggagaucgaucggcugaacgagguggccaagaaccugaacgagagccugaucgaccugcaggagcugggcaaguacgagcaguacaucaaguggcccugguacaucuggcugggcuucaucgccggccugaucgccaucgugauggugaccaucaugcugugcugcaugaccagcugcugcagcugccugaagggcuguugcagcugcggcagcugcugcaaguucgacgaggacgacagcgagcccgugcugaagggcgugaagcugcacuacaccugaggacuaguuauaagacugacuagcccgaugggccucccaacgggcccuccuccccuccuugcaccgagauuaaucaaaggcucuuuucagagccaccaaaaaaaaaaaaaaaaaaaaaaaaaaaaaaaaaaaaaaaaaaaaaaaaaaaaaaaaaaaaaaaaaaaaaaaaaaaaaaaaaaaaaaaaaaaaaaaaaaaaa

SEQ ID NO: 24112 - RNA, 4035 nt, Artificial Sequence
  SARS-CoV-2/Wuhan/WIV05/2019__EPI_ISL_402128 spike protein mRNA gc (1-1273)(Y453F_D614G)
aggagaaagcuuaccauguucguguuccuggugcugcugccccuggugagcagccagugcgugaaccugaccacccggacccagcugccaccagccuacaccaacagcuucacccggggcgucuacuaccccgacaagguguuccggagcagcguccugcacagcacccaggaccuguuccugcccuucuucagcaacgugaccugguuccacgccauccacgugagcggcaccaacggcaccaagcgguucgacaaccccgugcugcccuucaacgacggcguguacuucgccagcaccgagaagagcaacaucauccggggcuggaucuucggcaccacccuggacagcaagacccagagccugcugaucgugaauaacgccaccaacguggugaucaaggugugcgaguuccaguucugcaacgaccccuuccugggcguguacuaccacaagaacaacaagagcuggauggagagcgaguuccggguguacagcagcgccaacaacugcaccuucgaguacgugagccagcccuuccugauggaccuggagggcaagcagggcaacuucaagaaccugcgggaguucguguucaagaacaucgacggcuacuucaagaucuacagcaagcacaccccaaucaaccuggugcgggaucugccccagggcuucucagcccuggagccccugguggaccugcccaucggcaucaacaucacccgguuccagacccugcuggcccugcaccggagcuaccugaccccaggcgacagcagcagcggguggacagcaggcgcggcugcuuacuacgugggcuaccugcagccccggaccuuccugcugaaguacaacgagaacggcaccaucaccgacgccguggacugcgcccuggacccucugagcgagaccaagugcacccugaagagcuucaccguggagaagggcaucuaccagaccagcaacuuccgggugcagcccaccgagagcaucgugcgguuccccaacaucaccaaccugugccccuucggcgagguguucaacgccacccgguucgccagcguguacgccuggaaccggaagcggaucagcaacugcguggccgacuacagcgugcuguacaacagcgccagcuucagcaccuucaagugcuacggcgugagccccaccaagcugaacgaccugugcuucaccaacguguacgccgacagcuucgugauccguggcgacgaggugcggcagaucgcacccggccagacaggcaagaucgccgacuacaacuacaagcugcccgacgacuucaccggcugcgugaucgccuggaacagcaacaaccucgacagcaaggugggcggcaacuacaacuaccuguuccggcuguuccggaagagcaaccugaagcccuucgagcgggacaucagcaccgagaucuaccaagccggcuccaccccuugcaacggcguggagggcuucaacugcuacuucccucugcagagcuacggcuuccagcccaccaacggcgugggcuaccagcccuaccgggugguggugcugagcuucgagcugcugcacgccccagccaccguguguggccccaagaagagcaccaaccuggugaagaacaagugcgugaacuucaacuucaacggccuuaccggcaccggcgugcugaccgagagcaacaagaaauuccugcccuuucagcaguucggccgggacaucgccgacaccaccgacgcugugcgggauccccagacccuggagauccuggacaucaccccuugcagcuucggcggcgugagcgugaucaccccaggcaccaacaccagcaaccagguggccgugcuguaccagggcgugaacugcaccgaggugcccguggccauccacgccgaccagcugacacccaccuggcgggucuacagcaccggcagcaacguguuccagacccgggccgguugccugaucggcgccgagcacgugaacaacagcuacgagugcgacauccccaucggcgccggcaucugugccagcuaccagacccagaccaauucaccccggagggcaaggagcguggccagccagagcaucaucgccuacaccaugagccugggcgccgagaacagcguggccuacagcaacaacagcaucgccauccccaccaacuucaccaucagcgugaccaccgagauucugcccgugagcaugaccaagaccagcguggacugcaccauguacaucugcggcgacagcaccgagugcagcaaccugcugcugcaguacggcagcuucugcacccagcugaaccgggcccugaccggcaucgccguggagcaggacaagaacacccaggagguguucgcccaggugaagcagaucuacaagaccccucccaucaaggacuucggcggcuucaacuucagccagauccugcccgaccccagcaagcccagcaagcggagcuucaucgaggaccugcuguucaacaaggugacccuagccgacgccggcuucaucaagcaguacggcgacugccucggcgacauagccgcccgggaccugaucugcgcccagaaguucaacggccugaccgugcugccuccccugcugaccgacgagaugaucgcccaguacaccagcgcccuguuagccggaaccaucaccagcggcuggacuuucggcgcuggagccgcucugcagauccccuucgccaugcagauggccuaccgguucaacggcaucggcgugacccagaacgugcuguacgagaaccagaagcugaucgccaaccaguucaacagcgccaucggcaagauccaggacagccugagcagcaccgcuagcgcccugggcaagcugcaggacguggugaaccagaacgcccaggcccugaacacccuggugaagcagcugagcagcaacuucggcgccaucagcagcgugcugaacgacauccugagccggcuggacaaggucgaggccgaggugcagaucgaccggcugaucacuggccggcugcagagccugcagaccuacgugacccagcagcugauccgggccgccgagauucgggccagcgccaaccuggccgccaccaagaugagcgagugcgugcugggccagagcaagcggguggacuucugcggcaagggcuaccaccugaugagcuuuccccagagcgcaccccacggagugguguuccugcacgugaccuacgugcccgcccaggagaagaacuucaccaccgccccagccaucugccacgacggcaaggcccacuuuccccgggagggcguguucgugagcaacggcacccacugguucgugacccagcggaacuucuacgagccccagaucaucaccaccgacaacaccuucgugagcggcaacugcgacguggugaucggcaucgugaacaacaccguguacgauccccugcagcccgagcuggacagcuucaaggaggagcuggacaaguacuucaagaaucacaccagccccgacguggaccugggcgacaucagcggcaucaacgccagcguggugaacauccagaaggagaucgaucggcugaacgagguggccaagaaccugaacgagagccugaucgaccugcaggagcugggcaaguacgagcaguacaucaaguggcccugguacaucuggcugggcuucaucgccggccugaucgccaucgugauggugaccaucaugcugugcugcaugaccagcugcugcagcugccugaagggcuguugcagcugcggcagcugcugcaaguucgacgaggacgacagcgagcccgugcugaagggcgugaagcugcacuacaccugaggacuaguuauaagacugacuagcccgaugggccucccaacgggcccuccuccccuccuugcaccgagauuaaucaaaggcucuuuucagagccaccaaaaaaaaaaaaaaaaaaaaaaaaaaaaaaaaaaaaaaaaaaaaaaaaaaaaaaaaaaaaaaaaaaaaaaaaaaaaaaaaaaaaaaaaaaaaaaaaaaaaa

SEQ ID NO: 24113 - RNA, 4035 nt, Artificial Sequence
  SARS-CoV-2/Wuhan/WIV05/2019__EPI_ISL_402128 spike protein mRNA gc (1-1273)(D614G_I692V)
aggagaaagcuuaccauguucguguuccuggugcugcugccccuggugagcagccagugcgugaaccugaccacccggacccagcugccaccagccuacaccaacagcuucacccggggcgucuacuaccccgacaagguguuccggagcagcguccugcacagcacccaggaccuguuccugcccuucuucagcaacgugaccugguuccacgccauccacgugagcggcaccaacggcaccaagcgguucgacaaccccgugcugcccuucaacgacggcguguacuucgccagcaccgagaagagcaacaucauccggggcuggaucuucggcaccacccuggacagcaagacccagagccugcugaucgugaauaacgccaccaacguggugaucaaggugugcgaguuccaguucugcaacgaccccuuccugggcguguacuaccacaagaacaacaagagcuggauggagagcgaguuccggguguacagcagcgccaacaacugcaccuucgaguacgugagccagcccuuccugauggaccuggagggcaagcagggcaacuucaagaaccugcgggaguucguguucaagaacaucgacggcuacuucaagaucuacagcaagcacaccccaaucaaccuggugcgggaucugccccagggcuucucagcccuggagccccugguggaccugcccaucggcaucaacaucacccgguuccagacccugcuggcccugcaccggagcuaccugaccccaggcgacagcagcagcggguggacagcaggcgcggcugcuuacuacgugggcuaccugcagccccggaccuuccugcugaaguacaacgagaacggcaccaucaccgacgccguggacugcgcccuggacccucugagcgagaccaagugcacccugaagagcuucaccguggagaagggcaucuaccagaccagcaacuuccgggugcagcccaccgagagcaucgugcgguuccccaacaucaccaaccugugccccuucggcgagguguucaacgccacccgguucgccagcguguacgccuggaaccggaagcggaucagcaacugcguggccgacuacagcgugcuguacaacagcgccagcuucagcaccuucaagugcuacggcgugagccccaccaagcugaacgaccugugcuucaccaacguguacgccgacagcuucgugauccguggcgacgaggugcggcagaucgcacccggccagacaggcaagaucgccgacuacaacuacaagcugcccgacgacuucaccggcugcgugaucgccuggaacagcaacaaccucgacagcaaggugggcggcaacuacaacuaccuguaccggcuguuccggaagagcaaccugaagcccuucgagcgggacaucagcaccgagaucuaccaagccggcuccaccccuugcaacggcguggagggcuucaacugcuacuucccucugcagagcuacggcuuccagcccaccaacggcgugggcuaccagcccuaccgggugguggugcugagcuucgagcugcugcacgccccagccaccguguguggccccaagaagagcaccaaccuggugaagaacaagugcgugaacuucaacuucaacggccuuaccggcaccggcgugcugaccgagagcaacaagaaauuccugcccuuucagcaguucggccgggacaucgccgacaccaccgacgcugugcgggauccccagacccuggagauccuggacaucaccccuugcagcuucggcggcgugagcgugaucaccccaggcaccaacaccagcaaccagguggccgugcuguaccagggcgugaacugcaccgaggugcccguggccauccacgccgaccagcugacacccaccuggcgggucuacagcaccggcagcaacguguuccagacccgggccgguugccugaucggcgccgagcacgugaacaacagcuacgagugcgacauccccaucggcgccggcaucugugccagcuaccagacccagaccaauucaccccggagggcaaggagcguggccagccagagcgugaucgccuacaccaugagccugggcgccgagaacagcguggccuacagcaacaacagcaucgccauccccaccaacuucaccaucagcgugaccaccgagauucugcccgugagcaugaccaagaccagcguggacugcaccauguacaucugcggcgacagcaccgagugcagcaaccugcugcugcaguacggcagcuucugcacccagcugaaccgggcccugaccggcaucgccguggagcaggacaagaacacccaggagguguucgcccaggugaagcagaucuacaagaccccucccaucaaggacuucggcggcuucaacuucagccagauccugcccgaccccagcaagcccagcaagcggagcuucaucgaggaccugcuguucaacaaggugacccuagccgacgccggcuucaucaagcaguacggcgacugccucggcgacauagccgcccgggaccugaucugcgcccagaaguucaacggccugaccgugcugccuccccugcugaccgacgagaugaucgcccaguacaccagcgcccuguuagccggaaccaucaccagcggcuggacuuucggcgcuggagccgcucugcagauccccuucgccaugcagauggccuaccgguucaacggcaucggcgugacccagaacgugcuguacgagaaccagaagcugaucgccaaccaguucaacagcgccaucggcaagauccaggacagccugagcagcaccgcuagcgcccugggcaagcugcaggacguggugaaccagaacgcccaggcccugaacacccuggugaagcagcugagcagcaacuucggcgccaucagcagcgugcugaacgacauccugagccggcuggacaaggucgaggccgaggugcagaucgaccggcugaucacuggccggcugcagagccugcagaccuacgugacccagcagcugauccgggccgccgagauucgggccagcgccaaccuggccgccaccaagaugagcgagugcgugcugggccagagcaagcggguggacuucugcggcaagggcuaccaccugaugagcuuuccccagagcgcaccccacggagugguguuccugcacgugaccuacgugcccgcccaggagaagaacuucaccaccgccccagccaucugccacgacggcaaggcccacuuuccccgggagggcguguucgugagcaacggcacccacugguucgugacccagcggaacuucuacgagccccagaucaucaccaccgacaacaccuucgugagcggcaacugcgacguggugaucggcaucgugaacaacaccguguacgauccccugcagcccgagcuggacagcuucaaggaggagcuggacaaguacuucaagaaucacaccagccccgacguggaccugggcgacaucagcggcaucaacgccagcguggugaacauccagaaggagaucgaucggcugaacgagguggccaagaaccugaacgagagccugaucgaccugcaggagcugggcaaguacgagcaguacaucaaguggcccugguacaucuggcugggcuucaucgccggccugaucgccaucgugauggugaccaucaugcugugcugcaugaccagcugcugcagcugccugaagggcuguugcagcugcggcagcugcugcaaguucgacgaggacgacagcgagcccgugcugaagggcgugaagcugcacuacaccugaggacuaguuauaagacugacuagcccgaugggccucccaacgggcccuccuccccuccuugcaccgagauuaaucaaaggcucuuuucagagccaccaaaaaaaaaaaaaaaaaaaaaaaaaaaaaaaaaaaaaaaaaaaaaaaaaaaaaaaaaaaaaaaaaaaaaaaaaaaaaaaaaaaaaaaaaaaaaaaaaaaaa

SEQ ID NO: 24114 - RNA, 4035 nt, Artificial Sequence
  SARS-CoV-2/Wuhan/WIV05/2019__EPI_ISL_402128 spike protein mRNA gc (1-1273)(D614G_M1229I)
aggagaaagcuuaccauguucguguuccuggugcugcugccccuggugagcagccagugcgugaaccugaccacccggacccagcugccaccagccuacaccaacagcuucacccggggcgucuacuaccccgacaagguguuccggagcagcguccugcacagcacccaggaccuguuccugcccuucuucagcaacgugaccugguuccacgccauccacgugagcggcaccaacggcaccaagcgguucgacaaccccgugcugcccuucaacgacggcguguacuucgccagcaccgagaagagcaacaucauccggggcuggaucuucggcaccacccuggacagcaagacccagagccugcugaucgugaauaacgccaccaacguggugaucaaggugugcgaguuccaguucugcaacgaccccuuccugggcguguacuaccacaagaacaacaagagcuggauggagagcgaguuccggguguacagcagcgccaacaacugcaccuucgaguacgugagccagcccuuccugauggaccuggagggcaagcagggcaacuucaagaaccugcgggaguucguguucaagaacaucgacggcuacuucaagaucuacagcaagcacaccccaaucaaccuggugcgggaucugccccagggcuucucagcccuggagccccugguggaccugcccaucggcaucaacaucacccgguuccagacccugcuggcccugcaccggagcuaccugaccccaggcgacagcagcagcggguggacagcaggcgcggcugcuuacuacgugggcuaccugcagccccggaccuuccugcugaaguacaacgagaacggcaccaucaccgacgccguggacugcgcccuggacccucugagcgagaccaagugcacccugaagagcuucaccguggagaagggcaucuaccagaccagcaacuuccgggugcagcccaccgagagcaucgugcgguuccccaacaucaccaaccugugccccuucggcgagguguucaacgccacccgguucgccagcguguacgccuggaaccggaagcggaucagcaacugcguggccgacuacagcgugcuguacaacagcgccagcuucagcaccuucaagugcuacggcgugagccccaccaagcugaacgaccugugcuucaccaacguguacgccgacagcuucgugauccguggcgacgaggugcggcagaucgcacccggccagacaggcaagaucgccgacuacaacuacaagcugcccgacgacuucaccggcugcgugaucgccuggaacagcaacaaccucgacagcaaggugggcggcaacuacaacuaccuguaccggcuguuccggaagagcaaccugaagcccuucgagcgggacaucagcaccgagaucuaccaagccggcuccaccccuugcaacggcguggagggcuucaacugcuacuucccucugcagagcuacggcuuccagcccaccaacggcgugggcuaccagcccuaccgggugguggugcugagcuucgagcugcugcacgccccagccaccguguguggccccaagaagagcaccaaccuggugaagaacaagugcgugaacuucaacuucaacggccuuaccggcaccggcgugcugaccgagagcaacaagaaauuccugcccuuucagcaguucggccgggacaucgccgacaccaccgacgcugugcgggauccccagacccuggagauccuggacaucaccccuugcagcuucggcggcgugagcgugaucaccccaggcaccaacaccagcaaccagguggccgugcuguaccagggcgugaacugcaccgaggugcccguggccauccacgccgaccagcugacacccaccuggcgggucuacagcaccggcagcaacguguuccagacccgggccgguugccugaucggcgccgagcacgugaacaacagcuacgagugcgacauccccaucggcgccggcaucugugccagcuaccagacccagaccaauucaccccggagggcaaggagcguggccagccagagcaucaucgccuacaccaugagccugggcgccgagaacagcguggccuacagcaacaacagcaucgccauccccaccaacuucaccaucagcgugaccaccgagauucugcccgugagcaugaccaagaccagcguggacugcaccauguacaucugcggcgacagcaccgagugcagcaaccugcugcugcaguacggcagcuucugcacccagcugaaccgggcccugaccggcaucgccguggagcaggacaagaacacccaggagguguucgcccaggugaagcagaucuacaagaccccucccaucaaggacuucggcggcuucaacuucagccagauccugcccgaccccagcaagcccagcaagcggagcuucaucgaggaccugcuguucaacaaggugacccuagccgacgccggcuucaucaagcaguacggcgacugccucggcgacauagccgcccgggaccugaucugcgcccagaaguucaacggccugaccgugcugccuccccugcugaccgacgagaugaucgcccaguacaccagcgcccuguuagccggaaccaucaccagcggcuggacuuucggcgcuggagccgcucugcagauccccuucgccaugcagauggccuaccgguucaacggcaucggcgugacccagaacgugcuguacgagaaccagaagcugaucgccaaccaguucaacagcgccaucggcaagauccaggacagccugagcagcaccgcuagcgcccugggcaagcugcaggacguggugaaccagaacgcccaggcccugaacacccuggugaagcagcugagcagcaacuucggcgccaucagcagcgugcugaacgacauccugagccggcuggacaaggucgaggccgaggugcagaucgaccggcugaucacuggccggcugcagagccugcagaccuacgugacccagcagcugauccgggccgccgagauucgggccagcgccaaccuggccgccaccaagaugagcgagugcgugcugggccagagcaagcggguggacuucugcggcaagggcuaccaccugaugagcuuuccccagagcgcaccccacggagugguguuccugcacgugaccuacgugcccgcccaggagaagaacuucaccaccgccccagccaucugccacgacggcaaggcccacuuuccccgggagggcguguucgugagcaacggcacccacugguucgugacccagcggaacuucuacgagccccagaucaucaccaccgacaacaccuucgugagcggcaacugcgacguggugaucggcaucgugaacaacaccguguacgauccccugcagcccgagcuggacagcuucaaggaggagcuggacaaguacuucaagaaucacaccagccccgacguggaccugggcgacaucagcggcaucaacgccagcguggugaacauccagaaggagaucgaucggcugaacgagguggccaagaaccugaacgagagccugaucgaccugcaggagcugggcaaguacgagcaguacaucaaguggcccugguacaucuggcugggcuucaucgccggccugaucgccaucgugaucgugaccaucaugcugugcugcaugaccagcugcugcagcugccugaagggcuguugcagcugcggcagcugcugcaaguucgacgaggacgacagcgagcccgugcugaagggcgugaagcugcacuacaccugaggacuaguuauaagacugacuagcccgaugggccucccaacgggcccuccuccccuccuugcaccgagauuaaucaaaggcucuuuucagagccaccaaaaaaaaaaaaaaaaaaaaaaaaaaaaaaaaaaaaaaaaaaaaaaaaaaaaaaaaaaaaaaaaaaaaaaaaaaaaaaaaaaaaaaaaaaaaaaaaaaaaa

SEQ ID NO: 24115 - RNA, 4029 nt, Artificial Sequence
  SARS-CoV-2/Wuhan/WIV05/2019__EPI_ISL_402128 spike protein mRNA gc (1-1273)(H69del_V70del_A222V_Y453F_S477N_D614G_I692V)
aggagaaagcuuaccauguucguguuccuggugcugcugccccuggugagcagccagugcgugaaccugaccacccggacccagcugccaccagccuacaccaacagcuucacccggggcgucuacuaccccgacaagguguuccggagcagcguccugcacagcacccaggaccuguuccugcccuucuucagcaacgugaccugguuccacgccaucagcggcaccaacggcaccaagcgguucgacaaccccgugcugcccuucaacgacggcguguacuucgccagcaccgagaagagcaacaucauccggggcuggaucuucggcaccacccuggacagcaagacccagagccugcugaucgugaauaacgccaccaacguggugaucaaggugugcgaguuccaguucugcaacgaccccuuccugggcguguacuaccacaagaacaacaagagcuggauggagagcgaguuccggguguacagcagcgccaacaacugcaccuucgaguacgugagccagcccuuccugauggaccuggagggcaagcagggcaacuucaagaaccugcgggaguucguguucaagaacaucgacggcuacuucaagaucuacagcaagcacaccccaaucaaccuggugcgggaucugccccagggcuucucagugcuggagccccugguggaccugcccaucggcaucaacaucacccgguuccagacccugcuggcccugcaccggagcuaccugaccccaggcgacagcagcagcggguggacagcaggcgcggcugcuuacuacgugggcuaccugcagccccggaccuuccugcugaaguacaacgagaacggcaccaucaccgacgccguggacugcgcccuggacccucugagcgagaccaagugcacccugaagagcuucaccguggagaagggcaucuaccagaccagcaacuuccgggugcagcccaccgagagcaucgugcgguuccccaacaucaccaaccugugccccuucggcgagguguucaacgccacccgguucgccagcguguacgccuggaaccggaagcggaucagcaacugcguggccgacuacagcgugcuguacaacagcgccagcuucagcaccuucaagugcuacggcgugagccccaccaagcugaacgaccugugcuucaccaacguguacgccgacagcuucgugauccguggcgacgaggugcggcagaucgcacccggccagacaggcaagaucgccgacuacaacuacaagcugcccgacgacuucaccggcugcgugaucgccuggaacagcaacaaccucgacagcaaggugggcggcaacuacaacuaccuguuccggcuguuccggaagagcaaccugaagcccuucgagcgggacaucagcaccgagaucuaccaagccggcaacaccccuugcaacggcguggagggcuucaacugcuacuucccucugcagagcuacggcuuccagcccaccaacggcgugggcuaccagcccuaccgggugguggugcugagcuucgagcugcugcacgccccagccaccguguguggccccaagaagagcaccaaccuggugaagaacaagugcgugaacuucaacuucaacggccuuaccggcaccggcgugcugaccgagagcaacaagaaauuccugcccuuucagcaguucggccgggacaucgccgacaccaccgacgcugugcgggauccccagacccuggagauccuggacaucaccccuugcagcuucggcggcgugagcgugaucaccccaggcaccaacaccagcaaccagguggccgugcuguaccagggcgugaacugcaccgaggugcccguggccauccacgccgaccagcugacacccaccuggcgggucuacagcaccggcagcaacguguuccagacccgggccgguugccugaucggcgccgagcacgugaacaacagcuacgagugcgacauccccaucggcgccggcaucugugccagcuaccagacccagaccaauucaccccggagggcaaggagcguggccagccagagcgugaucgccuacaccaugagccugggcgccgagaacagcguggccuacagcaacaacagcaucgccauccccaccaacuucaccaucagcgugaccaccgagauucugcccgugagcaugaccaagaccagcguggacugcaccauguacaucugcggcgacagcaccgagugcagcaaccugcugcugcaguacggcagcuucugcacccagcugaaccgggcccugaccggcaucgccguggagcaggacaagaacacccaggagguguucgcccaggugaagcagaucuacaagaccccucccaucaaggacuucggcggcuucaacuucagccagauccugcccgaccccagcaagcccagcaagcggagcuucaucgaggaccugcuguucaacaaggugacccuagccgacgccggcuucaucaagcaguacggcgacugccucggcgacauagccgcccgggaccugaucugcgcccagaaguucaacggccugaccgugcugccuccccugcugaccgacgagaugaucgcccaguacaccagcgcccuguuagccggaaccaucaccagcggcuggacuuucggcgcuggagccgcucugcagauccccuucgccaugcagauggccuaccgguucaacggcaucggcgugacccagaacgugcuguacgagaaccagaagcugaucgccaaccaguucaacagcgccaucggcaagauccaggacagccugagcagcaccgcuagcgcccugggcaagcugcaggacguggugaaccagaacgcccaggcccugaacacccuggugaagcagcugagcagcaacuucggcgccaucagcagcgugcugaacgacauccugagccggcuggacaaggucgaggccgaggugcagaucgaccggcugaucacuggccggcugcagagccugcagaccuacgugacccagcagcugauccgggccgccgagauucgggccagcgccaaccuggccgccaccaagaugagcgagugcgugcugggccagagcaagcggguggacuucugcggcaagggcuaccaccugaugagcuuuccccagagcgcaccccacggagugguguuccugcacgugaccuacgugcccgcccaggagaagaacuucaccaccgccccagccaucugccacgacggcaaggcccacuuuccccgggagggcguguucgugagcaacggcacccacugguucgugacccagcggaacuucuacgagccccagaucaucaccaccgacaacaccuucgugagcggcaacugcgacguggugaucggcaucgugaacaacaccguguacgauccccugcagcccgagcuggacagcuucaaggaggagcuggacaaguacuucaagaaucacaccagccccgacguggaccugggcgacaucagcggcaucaacgccagcguggugaacauccagaaggagaucgaucggcugaacgagguggccaagaaccugaacgagagccugaucgaccugcaggagcugggcaaguacgagcaguacaucaaguggcccugguacaucuggcugggcuucaucgccggccugaucgccaucgugauggugaccaucaugcugugcugcaugaccagcugcugcagcugccugaagggcuguugcagcugcggcagcugcugcaaguucgacgaggacgacagcgagcccgugcugaagggcgugaagcugcacuacaccugaggacuaguuauaagacugacuagcccgaugggccucccaacgggcccuccuccccuccuugcaccgagauuaaucaaaggcucuuuucagagccaccaaaaaaaaaaaaaaaaaaaaaaaaaaaaaaaaaaaaaaaaaaaaaaaaaaaaaaaaaaaaaaaaaaaaaaaaaaaaaaaaaaaaaaaaaaaaaaaaaaaaa

SEQ ID NO: 24116 - RNA, 4029 nt, Artificial Sequence
  SARS-CoV-2/Wuhan/WIV05/2019__EPI_ISL_402128 spike protein mRNA gc (1-1273)(H69del_V70del_Y453F_D614G_I692V_M1229I)
aggagaaagcuuaccauguucguguuccuggugcugcugccccuggugagcagccagugcgugaaccugaccacccggacccagcugccaccagccuacaccaacagcuucacccggggcgucuacuaccccgacaagguguuccggagcagcguccugcacagcacccaggaccuguuccugcccuucuucagcaacgugaccugguuccacgccaucagcggcaccaacggcaccaagcgguucgacaaccccgugcugcccuucaacgacggcguguacuucgccagcaccgagaagagcaacaucauccggggcuggaucuucggcaccacccuggacagcaagacccagagccugcugaucgugaauaacgccaccaacguggugaucaaggugugcgaguuccaguucugcaacgaccccuuccugggcguguacuaccacaagaacaacaagagcuggauggagagcgaguuccggguguacagcagcgccaacaacugcaccuucgaguacgugagccagcccuuccugauggaccuggagggcaagcagggcaacuucaagaaccugcgggaguucguguucaagaacaucgacggcuacuucaagaucuacagcaagcacaccccaaucaaccuggugcgggaucugccccagggcuucucagcccuggagccccugguggaccugcccaucggcaucaacaucacccgguuccagacccugcuggcccugcaccggagcuaccugaccccaggcgacagcagcagcggguggacagcaggcgcggcugcuuacuacgugggcuaccugcagccccggaccuuccugcugaaguacaacgagaacggcaccaucaccgacgccguggacugcgcccuggacccucugagcgagaccaagugcacccugaagagcuucaccguggagaagggcaucuaccagaccagcaacuuccgggugcagcccaccgagagcaucgugcgguuccccaacaucaccaaccugugccccuucggcgagguguucaacgccacccgguucgccagcguguacgccuggaaccggaagcggaucagcaacugcguggccgacuacagcgugcuguacaacagcgccagcuucagcaccuucaagugcuacggcgugagccccaccaagcugaacgaccugugcuucaccaacguguacgccgacagcuucgugauccguggcgacgaggugcggcagaucgcacccggccagacaggcaagaucgccgacuacaacuacaagcugcccgacgacuucaccggcugcgugaucgccuggaacagcaacaaccucgacagcaaggugggcggcaacuacaacuaccuguuccggcuguuccggaagagcaaccugaagcccuucgagcgggacaucagcaccgagaucuaccaagccggcuccaccccuugcaacggcguggagggcuucaacugcuacuucccucugcagagcuacggcuuccagcccaccaacggcgugggcuaccagcccuaccgggugguggugcugagcuucgagcugcugcacgccccagccaccguguguggccccaagaagagcaccaaccuggugaagaacaagugcgugaacuucaacuucaacggccuuaccggcaccggcgugcugaccgagagcaacaagaaauuccugcccuuucagcaguucggccgggacaucgccgacaccaccgacgcugugcgggauccccagacccuggagauccuggacaucaccccuugcagcuucggcggcgugagcgugaucaccccaggcaccaacaccagcaaccagguggccgugcuguaccagggcgugaacugcaccgaggugcccguggccauccacgccgaccagcugacacccaccuggcgggucuacagcaccggcagcaacguguuccagacccgggccgguugccugaucggcgccgagcacgugaacaacagcuacgagugcgacauccccaucggcgccggcaucugugccagcuaccagacccagaccaauucaccccggagggcaaggagcguggccagccagagcgugaucgccuacaccaugagccugggcgccgagaacagcguggccuacagcaacaacagcaucgccauccccaccaacuucaccaucagcgugaccaccgagauucugcccgugagcaugaccaagaccagcguggacugcaccauguacaucugcggcgacagcaccgagugcagcaaccugcugcugcaguacggcagcuucugcacccagcugaaccgggcccugaccggcaucgccguggagcaggacaagaacacccaggagguguucgcccaggugaagcagaucuacaagaccccucccaucaaggacuucggcggcuucaacuucagccagauccugcccgaccccagcaagcccagcaagcggagcuucaucgaggaccugcuguucaacaaggugacccuagccgacgccggcuucaucaagcaguacggcgacugccucggcgacauagccgcccgggaccugaucugcgcccagaaguucaacggccugaccgugcugccuccccugcugaccgacgagaugaucgcccaguacaccagcgcccuguuagccggaaccaucaccagcggcuggacuuucggcgcuggagccgcucugcagauccccuucgccaugcagauggccuaccgguucaacggcaucggcgugacccagaacgugcuguacgagaaccagaagcugaucgccaaccaguucaacagcgccaucggcaagauccaggacagccugagcagcaccgcuagcgcccugggcaagcugcaggacguggugaaccagaacgcccaggcccugaacacccuggugaagcagcugagcagcaacuucggcgccaucagcagcgugcugaacgacauccugagccggcuggacaaggucgaggccgaggugcagaucgaccggcugaucacuggccggcugcagagccugcagaccuacgugacccagcagcugauccgggccgccgagauucgggccagcgccaaccuggccgccaccaagaugagcgagugcgugcugggccagagcaagcggguggacuucugcggcaagggcuaccaccugaugagcuuuccccagagcgcaccccacggagugguguuccugcacgugaccuacgugcccgcccaggagaagaacuucaccaccgccccagccaucugccacgacggcaaggcccacuuuccccgggagggcguguucgugagcaacggcacccacugguucgugacccagcggaacuucuacgagccccagaucaucaccaccgacaacaccuucgugagcggcaacugcgacguggugaucggcaucgugaacaacaccguguacgauccccugcagcccgagcuggacagcuucaaggaggagcuggacaaguacuucaagaaucacaccagccccgacguggaccugggcgacaucagcggcaucaacgccagcguggugaacauccagaaggagaucgaucggcugaacgagguggccaagaaccugaacgagagccugaucgaccugcaggagcugggcaaguacgagcaguacaucaaguggcccugguacaucuggcugggcuucaucgccggccugaucgccaucgugaucgugaccaucaugcugugcugcaugaccagcugcugcagcugccugaagggcuguugcagcugcggcagcugcugcaaguucgacgaggacgacagcgagcccgugcugaagggcgugaagcugcacuacaccugaggacuaguuauaagacugacuagcccgaugggccucccaacgggcccuccuccccuccuugcaccgagauuaaucaaaggcucuuuucagagccaccaaaaaaaaaaaaaaaaaaaaaaaaaaaaaaaaaaaaaaaaaaaaaaaaaaaaaaaaaaaaaaaaaaaaaaaaaaaaaaaaaaaaaaaaaaaaaaaaaaaaa

SEQ ID NO: 24117 - RNA, 4026 nt, Artificial Sequence
  SARS-CoV-2/Wuhan/WIV05/2019__EPI_ISL_402128 spike protein mRNA gc (1-1273)(H69del_V70del_Y144del_N501Y_A570D_D614G_P681H_T716I_S982 A_D1118H)
aggagaaagcuuaccauguucguguuccuggugcugcugccccuggugagcagccagugcgugaaccugaccacccggacccagcugccaccagccuacaccaacagcuucacccggggcgucuacuaccccgacaagguguuccggagcagcguccugcacagcacccaggaccuguuccugcccuucuucagcaacgugaccugguuccacgccaucagcggcaccaacggcaccaagcgguucgacaaccccgugcugcccuucaacgacggcguguacuucgccagcaccgagaagagcaacaucauccggggcuggaucuucggcaccacccuggacagcaagacccagagccugcugaucgugaauaacgccaccaacguggugaucaaggugugcgaguuccaguucugcaacgaccccuuccugggcguguaccacaagaacaacaagagcuggauggagagcgaguuccggguguacagcagcgccaacaacugcaccuucgaguacgugagccagcccuuccugauggaccuggagggcaagcagggcaacuucaagaaccugcgggaguucguguucaagaacaucgacggcuacuucaagaucuacagcaagcacaccccaaucaaccuggugcgggaucugccccagggcuucucagcccuggagccccugguggaccugcccaucggcaucaacaucacccgguuccagacccugcuggcccugcaccggagcuaccugaccccaggcgacagcagcagcggguggacagcaggcgcggcugcuuacuacgugggcuaccugcagccccggaccuuccugcugaaguacaacgagaacggcaccaucaccgacgccguggacugcgcccuggacccucugagcgagaccaagugcacccugaagagcuucaccguggagaagggcaucuaccagaccagcaacuuccgggugcagcccaccgagagcaucgugcgguuccccaacaucaccaaccugugccccuucggcgagguguucaacgccacccgguucgccagcguguacgccuggaaccggaagcggaucagcaacugcguggccgacuacagcgugcuguacaacagcgccagcuucagcaccuucaagugcuacggcgugagccccaccaagcugaacgaccugugcuucaccaacguguacgccgacagcuucgugauccguggcgacgaggugcggcagaucgcacccggccagacaggcaagaucgccgacuacaacuacaagcugcccgacgacuucaccggcugcgugaucgccuggaacagcaacaaccucgacagcaaggugggcggcaacuacaacuaccuguaccggcuguuccggaagagcaaccugaagcccuucgagcgggacaucagcaccgagaucuaccaagccggcuccaccccuugcaacggcguggagggcuucaacugcuacuucccucugcagagcuacggcuuccagcccaccuacggcgugggcuaccagcccuaccgggugguggugcugagcuucgagcugcugcacgccccagccaccguguguggccccaagaagagcaccaaccuggugaagaacaagugcgugaacuucaacuucaacggccuuaccggcaccggcgugcugaccgagagcaacaagaaauuccugcccuuucagcaguucggccgggacaucgacgacaccaccgacgcugugcgggauccccagacccuggagauccuggacaucaccccuugcagcuucggcggcgugagcgugaucaccccaggcaccaacaccagcaaccagguggccgugcuguaccagggcgugaacugcaccgaggugcccguggccauccacgccgaccagcugacacccaccuggcgggucuacagcaccggcagcaacguguuccagacccgggccgguugccugaucggcgccgagcacgugaacaacagcuacgagugcgacauccccaucggcgccggcaucugugccagcuaccagacccagaccaauucacaccggagggcaaggagcguggccagccagagcaucaucgccuacaccaugagccugggcgccgagaacagcguggccuacagcaacaacagcaucgccauccccaucaacuucaccaucagcgugaccaccgagauucugcccgugagcaugaccaagaccagcguggacugcaccauguacaucugcggcgacagcaccgagugcagcaaccugcugcugcaguacggcagcuucugcacccagcugaaccgggcccugaccggcaucgccguggagcaggacaagaacacccaggagguguucgcccaggugaagcagaucuacaagaccccucccaucaaggacuucggcggcuucaacuucagccagauccugcccgaccccagcaagcccagcaagcggagcuucaucgaggaccugcuguucaacaaggugacccuagccgacgccggcuucaucaagcaguacggcgacugccucggcgacauagccgcccgggaccugaucugcgcccagaaguucaacggccugaccgugcugccuccccugcugaccgacgagaugaucgcccaguacaccagcgcccuguuagccggaaccaucaccagcggcuggacuuucggcgcuggagccgcucugcagauccccuucgccaugcagauggccuaccgguucaacggcaucggcgugacccagaacgugcuguacgagaaccagaagcugaucgccaaccaguucaacagcgccaucggcaagauccaggacagccugagcagcaccgcuagcgcccugggcaagcugcaggacguggugaaccagaacgcccaggcccugaacacccuggugaagcagcugagcagcaacuucggcgccaucagcagcgugcugaacgacauccuggcccggcuggacaaggucgaggccgaggugcagaucgaccggcugaucacuggccggcugcagagccugcagaccuacgugacccagcagcugauccgggccgccgagauucgggccagcgccaaccuggccgccaccaagaugagcgagugcgugcugggccagagcaagcggguggacuucugcggcaagggcuaccaccugaugagcuuuccccagagcgcaccccacggagugguguuccugcacgugaccuacgugcccgcccaggagaagaacuucaccaccgccccagccaucugccacgacggcaaggcccacuuuccccgggagggcguguucgugagcaacggcacccacugguucgugacccagcggaacuucuacgagccccagaucaucaccacccacaacaccuucgugagcggcaacugcgacguggugaucggcaucgugaacaacaccguguacgauccccugcagcccgagcuggacagcuucaaggaggagcuggacaaguacuucaagaaucacaccagccccgacguggaccugggcgacaucagcggcaucaacgccagcguggugaacauccagaaggagaucgaucggcugaacgagguggccaagaaccugaacgagagccugaucgaccugcaggagcugggcaaguacgagcaguacaucaaguggcccugguacaucuggcugggcuucaucgccggccugaucgccaucgugauggugaccaucaugcugugcugcaugaccagcugcugcagcugccugaagggcuguugcagcugcggcagcugcugcaaguucgacgaggacgacagcgagcccgugcugaagggcgugaagcugcacuacaccugaggacuaguuauaagacugacuagcccgaugggccucccaacgggcccuccuccccuccuugcaccgagauuaaucaaaggcucuuuucagagccaccaaaaaaaaaaaaaaaaaaaaaaaaaaaaaaaaaaaaaaaaaaaaaaaaaaaaaaaaaaaaaaaaaaaaaaaaaaaaaaaaaaaaaaaaaaaaaaaaaaaaa

SEQ ID NO: 24118 - RNA, 4035 nt, Artificial Sequence
  SARS-CoV-2/Wuhan/WIV05/2019__EPI_ISL_402128 spike protein mRNA gc (1-1273)(K417N_E484K_N501Y_D614G)
aggagaaagcuuaccauguucguguuccuggugcugcugccccuggugagcagccagugcgugaaccugaccacccggacccagcugccaccagccuacaccaacagcuucacccggggcgucuacuaccccgacaagguguuccggagcagcguccugcacagcacccaggaccuguuccugcccuucuucagcaacgugaccugguuccacgccauccacgugagcggcaccaacggcaccaagcgguucgacaaccccgugcugcccuucaacgacggcguguacuucgccagcaccgagaagagcaacaucauccggggcuggaucuucggcaccacccuggacagcaagacccagagccugcugaucgugaauaacgccaccaacguggugaucaaggugugcgaguuccaguucugcaacgaccccuuccugggcguguacuaccacaagaacaacaagagcuggauggagagcgaguuccggguguacagcagcgccaacaacugcaccuucgaguacgugagccagcccuuccugauggaccuggagggcaagcagggcaacuucaagaaccugcgggaguucguguucaagaacaucgacggcuacuucaagaucuacagcaagcacaccccaaucaaccuggugcgggaucugccccagggcuucucagcccuggagccccugguggaccugcccaucggcaucaacaucacccgguuccagacccugcuggcccugcaccggagcuaccugaccccaggcgacagcagcagcggguggacagcaggcgcggcugcuuacuacgugggcuaccugcagccccggaccuuccugcugaaguacaacgagaacggcaccaucaccgacgccguggacugcgcccuggacccucugagcgagaccaagugcacccugaagagcuucaccguggagaagggcaucuaccagaccagcaacuuccgggugcagcccaccgagagcaucgugcgguuccccaacaucaccaaccugugccccuucggcgagguguucaacgccacccgguucgccagcguguacgccuggaaccggaagcggaucagcaacugcguggccgacuacagcgugcuguacaacagcgccagcuucagcaccuucaagugcuacggcgugagccccaccaagcugaacgaccugugcuucaccaacguguacgccgacagcuucgugauccguggcgacgaggugcggcagaucgcacccggccagacaggcaacaucgccgacuacaacuacaagcugcccgacgacuucaccggcugcgugaucgccuggaacagcaacaaccucgacagcaaggugggcggcaacuacaacuaccuguaccggcuguuccggaagagcaaccugaagcccuucgagcgggacaucagcaccgagaucuaccaagccggcuccaccccuugcaacggcgugaagggcuucaacugcuacuucccucugcagagcuacggcuuccagcccaccuacggcgugggcuaccagcccuaccgggugguggugcugagcuucgagcugcugcacgccccagccaccguguguggccccaagaagagcaccaaccuggugaagaacaagugcgugaacuucaacuucaacggccuuaccggcaccggcgugcugaccgagagcaacaagaaauuccugcccuuucagcaguucggccgggacaucgccgacaccaccgacgcugugcgggauccccagacccuggagauccuggacaucaccccuugcagcuucggcggcgugagcgugaucaccccaggcaccaacaccagcaaccagguggccgugcuguaccagggcgugaacugcaccgaggugcccguggccauccacgccgaccagcugacacccaccuggcgggucuacagcaccggcagcaacguguuccagacccgggccgguugccugaucggcgccgagcacgugaacaacagcuacgagugcgacauccccaucggcgccggcaucugugccagcuaccagacccagaccaauucaccccggagggcaaggagcguggccagccagagcaucaucgccuacaccaugagccugggcgccgagaacagcguggccuacagcaacaacagcaucgccauccccaccaacuucaccaucagcgugaccaccgagauucugcccgugagcaugaccaagaccagcguggacugcaccauguacaucugcggcgacagcaccgagugcagcaaccugcugcugcaguacggcagcuucugcacccagcugaaccgggcccugaccggcaucgccguggagcaggacaagaacacccaggagguguucgcccaggugaagcagaucuacaagaccccucccaucaaggacuucggcggcuucaacuucagccagauccugcccgaccccagcaagcccagcaagcggagcuucaucgaggaccugcuguucaacaaggugacccuagccgacgccggcuucaucaagcaguacggcgacugccucggcgacauagccgcccgggaccugaucugcgcccagaaguucaacggccugaccgugcugccuccccugcugaccgacgagaugaucgcccaguacaccagcgcccuguuagccggaaccaucaccagcggcuggacuuucggcgcuggagccgcucugcagauccccuucgccaugcagauggccuaccgguucaacggcaucggcgugacccagaacgugcuguacgagaaccagaagcugaucgccaaccaguucaacagcgccaucggcaagauccaggacagccugagcagcaccgcuagcgcccugggcaagcugcaggacguggugaaccagaacgcccaggcccugaacacccuggugaagcagcugagcagcaacuucggcgccaucagcagcgugcugaacgacauccugagccggcuggacaaggucgaggccgaggugcagaucgaccggcugaucacuggccggcugcagagccugcagaccuacgugacccagcagcugauccgggccgccgagauucgggccagcgccaaccuggccgccaccaagaugagcgagugcgugcugggccagagcaagcggguggacuucugcggcaagggcuaccaccugaugagcuuuccccagagcgcaccccacggagugguguuccugcacgugaccuacgugcccgcccaggagaagaacuucaccaccgccccagccaucugccacgacggcaaggcccacuuuccccgggagggcguguucgugagcaacggcacccacugguucgugacccagcggaacuucuacgagccccagaucaucaccaccgacaacaccuucgugagcggcaacugcgacguggugaucggcaucgugaacaacaccguguacgauccccugcagcccgagcuggacagcuucaaggaggagcuggacaaguacuucaagaaucacaccagccccgacguggaccugggcgacaucagcggcaucaacgccagcguggugaacauccagaaggagaucgaucggcugaacgagguggccaagaaccugaacgagagccugaucgaccugcaggagcugggcaaguacgagcaguacaucaaguggcccugguacaucuggcugggcuucaucgccggccugaucgccaucgugauggugaccaucaugcugugcugcaugaccagcugcugcagcugccugaagggcuguugcagcugcggcagcugcugcaaguucgacgaggacgacagcgagcccgugcugaagggcgugaagcugcacuacaccugaggacuaguuauaagacugacuagcccgaugggccucccaacgggcccuccuccccuccuugcaccgagauuaaucaaaggcucuuuucagagccaccaaaaaaaaaaaaaaaaaaaaaaaaaaaaaaaaaaaaaaaaaaaaaaaaaaaaaaaaaaaaaaaaaaaaaaaaaaaaaaaaaaaaaaaaaaaaaaaaaaaaa

SEQ ID NO: 24119 - RNA, 4026 nt, Artificial Sequence
  SARS-CoV-2/Wuhan/WIV05/2019__EPI_ISL_402128 spike protein mRNA gc (1-1273)(L18F_D80A_D215G_L242del_A243del_L244del_R246I_K417N_E484 K_N501Y_D614G_A701V)
aggagaaagcuuaccauguucguguuccuggugcugcugccccuggugagcagccagugcgugaacuucaccacccggacccagcugccaccagccuacaccaacagcuucacccggggcgucuacuaccccgacaagguguuccggagcagcguccugcacagcacccaggaccuguuccugcccuucuucagcaacgugaccugguuccacgccauccacgugagcggcaccaacggcaccaagcgguucgccaaccccgugcugcccuucaacgacggcguguacuucgccagcaccgagaagagcaacaucauccggggcuggaucuucggcaccacccuggacagcaagacccagagccugcugaucgugaauaacgccaccaacguggugaucaaggugugcgaguuccaguucugcaacgaccccuuccugggcguguacuaccacaagaacaacaagagcuggauggagagcgaguuccggguguacagcagcgccaacaacugcaccuucgaguacgugagccagcccuuccugauggaccuggagggcaagcagggcaacuucaagaaccugcgggaguucguguucaagaacaucgacggcuacuucaagaucuacagcaagcacaccccaaucaaccuggugcggggccugccccagggcuucucagcccuggagccccugguggaccugcccaucggcaucaacaucacccgguuccagacccugcacaucagcuaccugaccccaggcgacagcagcagcggguggacagcaggcgcggcugcuuacuacgugggcuaccugcagccccggaccuuccugcugaaguacaacgagaacggcaccaucaccgacgccguggacugcgcccuggacccucugagcgagaccaagugcacccugaagagcuucaccguggagaagggcaucuaccagaccagcaacuuccgggugcagcccaccgagagcaucgugcgguuccccaacaucaccaaccugugccccuucggcgagguguucaacgccacccgguucgccagcguguacgccuggaaccggaagcggaucagcaacugcguggccgacuacagcgugcuguacaacagcgccagcuucagcaccuucaagugcuacggcgugagccccaccaagcugaacgaccugugcuucaccaacguguacgccgacagcuucgugauccguggcgacgaggugcggcagaucgcacccggccagacaggcaacaucgccgacuacaacuacaagcugcccgacgacuucaccggcugcgugaucgccuggaacagcaacaaccucgacagcaaggugggcggcaacuacaacuaccuguaccggcuguuccggaagagcaaccugaagcccuucgagcgggacaucagcaccgagaucuaccaagccggcuccaccccuugcaacggcgugaagggcuucaacugcuacuucccucugcagagcuacggcuuccagcccaccuacggcgugggcuaccagcccuaccgggugguggugcugagcuucgagcugcugcacgccccagccaccguguguggccccaagaagagcaccaaccuggugaagaacaagugcgugaacuucaacuucaacggccuuaccggcaccggcgugcugaccgagagcaacaagaaauuccugcccuuucagcaguucggccgggacaucgccgacaccaccgacgcugugcgggauccccagacccuggagauccuggacaucaccccuugcagcuucggcggcgugagcgugaucaccccaggcaccaacaccagcaaccagguggccgugcuguaccagggcgugaacugcaccgaggugcccguggccauccacgccgaccagcugacacccaccuggcgggucuacagcaccggcagcaacguguuccagacccgggccgguugccugaucggcgccgagcacgugaacaacagcuacgagugcgacauccccaucggcgccggcaucugugccagcuaccagacccagaccaauucaccccggagggcaaggagcguggccagccagagcaucaucgccuacaccaugagccugggcguggagaacagcguggccuacagcaacaacagcaucgccauccccaccaacuucaccaucagcgugaccaccgagauucugcccgugagcaugaccaagaccagcguggacugcaccauguacaucugcggcgacagcaccgagugcagcaaccugcugcugcaguacggcagcuucugcacccagcugaaccgggcccugaccggcaucgccguggagcaggacaagaacacccaggagguguucgcccaggugaagcagaucuacaagaccccucccaucaaggacuucggcggcuucaacuucagccagauccugcccgaccccagcaagcccagcaagcggagcuucaucgaggaccugcuguucaacaaggugacccuagccgacgccggcuucaucaagcaguacggcgacugccucggcgacauagccgcccgggaccugaucugcgcccagaaguucaacggccugaccgugcugccuccccugcugaccgacgagaugaucgcccaguacaccagcgcccuguuagccggaaccaucaccagcggcuggacuuucggcgcuggagccgcucugcagauccccuucgccaugcagauggccuaccgguucaacggcaucggcgugacccagaacgugcuguacgagaaccagaagcugaucgccaaccaguucaacagcgccaucggcaagauccaggacagccugagcagcaccgcuagcgcccugggcaagcugcaggacguggugaaccagaacgcccaggcccugaacacccuggugaagcagcugagcagcaacuucggcgccaucagcagcgugcugaacgacauccugagccggcuggacaaggucgaggccgaggugcagaucgaccggcugaucacuggccggcugcagagccugcagaccuacgugacccagcagcugauccgggccgccgagauucgggccagcgccaaccuggccgccaccaagaugagcgagugcgugcugggccagagcaagcggguggacuucugcggcaagggcuaccaccugaugagcuuuccccagagcgcaccccacggagugguguuccugcacgugaccuacgugcccgcccaggagaagaacuucaccaccgccccagccaucugccacgacggcaaggcccacuuuccccgggagggcguguucgugagcaacggcacccacugguucgugacccagcggaacuucuacgagccccagaucaucaccaccgacaacaccuucgugagcggcaacugcgacguggugaucggcaucgugaacaacaccguguacgauccccugcagcccgagcuggacagcuucaaggaggagcuggacaaguacuucaagaaucacaccagccccgacguggaccugggcgacaucagcggcaucaacgccagcguggugaacauccagaaggagaucgaucggcugaacgagguggccaagaaccugaacgagagccugaucgaccugcaggagcugggcaaguacgagcaguacaucaaguggcccugguacaucuggcugggcuucaucgccggccugaucgccaucgugauggugaccaucaugcugugcugcaugaccagcugcugcagcugccugaagggcuguugcagcugcggcagcugcugcaaguucgacgaggacgacagcgagcccgugcugaagggcgugaagcugcacuacaccugaggacuaguuauaagacugacuagcccgaugggccucccaacgggcccuccuccccuccuugcaccgagauuaaucaaaggcucuuuucagagccaccaaaaaaaaaaaaaaaaaaaaaaaaaaaaaaaaaaaaaaaaaaaaaaaaaaaaaaaaaaaaaaaaaaaaaaaaaaaaaaaaaaaaaaaaaaaaaaaaaaaaa

SEQ ID NO: 24120 - RNA, 4035 nt, Artificial Sequence
  SARS-CoV-2/Wuhan/WIV05/2019__EPI_ISL_402128 spike protein mRNA gc (1-1273)(E484K_D614G)
aggagaaagcuuaccauguucguguuccuggugcugcugccccuggugagcagccagugcgugaaccugaccacccggacccagcugccaccagccuacaccaacagcuucacccggggcgucuacuaccccgacaagguguuccggagcagcguccugcacagcacccaggaccuguuccugcccuucuucagcaacgugaccugguuccacgccauccacgugagcggcaccaacggcaccaagcgguucgacaaccccgugcugcccuucaacgacggcguguacuucgccagcaccgagaagagcaacaucauccggggcuggaucuucggcaccacccuggacagcaagacccagagccugcugaucgugaauaacgccaccaacguggugaucaaggugugcgaguuccaguucugcaacgaccccuuccugggcguguacuaccacaagaacaacaagagcuggauggagagcgaguuccggguguacagcagcgccaacaacugcaccuucgaguacgugagccagcccuuccugauggaccuggagggcaagcagggcaacuucaagaaccugcgggaguucguguucaagaacaucgacggcuacuucaagaucuacagcaagcacaccccaaucaaccuggugcgggaucugccccagggcuucucagcccuggagccccugguggaccugcccaucggcaucaacaucacccgguuccagacccugcuggcccugcaccggagcuaccugaccccaggcgacagcagcagcggguggacagcaggcgcggcugcuuacuacgugggcuaccugcagccccggaccuuccugcugaaguacaacgagaacggcaccaucaccgacgccguggacugcgcccuggacccucugagcgagaccaagugcacccugaagagcuucaccguggagaagggcaucuaccagaccagcaacuuccgggugcagcccaccgagagcaucgugcgguuccccaacaucaccaaccugugccccuucggcgagguguucaacgccacccgguucgccagcguguacgccuggaaccggaagcggaucagcaacugcguggccgacuacagcgugcuguacaacagcgccagcuucagcaccuucaagugcuacggcgugagccccaccaagcugaacgaccugugcuucaccaacguguacgccgacagcuucgugauccguggcgacgaggugcggcagaucgcacccggccagacaggcaagaucgccgacuacaacuacaagcugcccgacgacuucaccggcugcgugaucgccuggaacagcaacaaccucgacagcaaggugggcggcaacuacaacuaccuguaccggcuguuccggaagagcaaccugaagcccuucgagcgggacaucagcaccgagaucuaccaagccggcuccaccccuugcaacggcgugaagggcuucaacugcuacuucccucugcagagcuacggcuuccagcccaccaacggcgugggcuaccagcccuaccgggugguggugcugagcuucgagcugcugcacgccccagccaccguguguggccccaagaagagcaccaaccuggugaagaacaagugcgugaacuucaacuucaacggccuuaccggcaccggcgugcugaccgagagcaacaagaaauuccugcccuuucagcaguucggccgggacaucgccgacaccaccgacgcugugcgggauccccagacccuggagauccuggacaucaccccuugcagcuucggcggcgugagcgugaucaccccaggcaccaacaccagcaaccagguggccgugcuguaccagggcgugaacugcaccgaggugcccguggccauccacgccgaccagcugacacccaccuggcgggucuacagcaccggcagcaacguguuccagacccgggccgguugccugaucggcgccgagcacgugaacaacagcuacgagugcgacauccccaucggcgccggcaucugugccagcuaccagacccagaccaauucaccccggagggcaaggagcguggccagccagagcaucaucgccuacaccaugagccugggcgccgagaacagcguggccuacagcaacaacagcaucgccauccccaccaacuucaccaucagcgugaccaccgagauucugcccgugagcaugaccaagaccagcguggacugcaccauguacaucugcggcgacagcaccgagugcagcaaccugcugcugcaguacggcagcuucugcacccagcugaaccgggcccugaccggcaucgccguggagcaggacaagaacacccaggagguguucgcccaggugaagcagaucuacaagaccccucccaucaaggacuucggcggcuucaacuucagccagauccugcccgaccccagcaagcccagcaagcggagcuucaucgaggaccugcuguucaacaaggugacccuagccgacgccggcuucaucaagcaguacggcgacugccucggcgacauagccgcccgggaccugaucugcgcccagaaguucaacggccugaccgugcugccuccccugcugaccgacgagaugaucgcccaguacaccagcgcccuguuagccggaaccaucaccagcggcuggacuuucggcgcuggagccgcucugcagauccccuucgccaugcagauggccuaccgguucaacggcaucggcgugacccagaacgugcuguacgagaaccagaagcugaucgccaaccaguucaacagcgccaucggcaagauccaggacagccugagcagcaccgcuagcgcccugggcaagcugcaggacguggugaaccagaacgcccaggcccugaacacccuggugaagcagcugagcagcaacuucggcgccaucagcagcgugcugaacgacauccugagccggcuggacaaggucgaggccgaggugcagaucgaccggcugaucacuggccggcugcagagccugcagaccuacgugacccagcagcugauccgggccgccgagauucgggccagcgccaaccuggccgccaccaagaugagcgagugcgugcugggccagagcaagcggguggacuucugcggcaagggcuaccaccugaugagcuuuccccagagcgcaccccacggagugguguuccugcacgugaccuacgugcccgcccaggagaagaacuucaccaccgccccagccaucugccacgacggcaaggcccacuuuccccgggagggcguguucgugagcaacggcacccacugguucgugacccagcggaacuucuacgagccccagaucaucaccaccgacaacaccuucgugagcggcaacugcgacguggugaucggcaucgugaacaacaccguguacgauccccugcagcccgagcuggacagcuucaaggaggagcuggacaaguacuucaagaaucacaccagccccgacguggaccugggcgacaucagcggcaucaacgccagcguggugaacauccagaaggagaucgaucggcugaacgagguggccaagaaccugaacgagagccugaucgaccugcaggagcugggcaaguacgagcaguacaucaaguggcccugguacaucuggcugggcuucaucgccggccugaucgccaucgugauggugaccaucaugcugugcugcaugaccagcugcugcagcugccugaagggcuguugcagcugcggcagcugcugcaaguucgacgaggacgacagcgagcccgugcugaagggcgugaagcugcacuacaccugaggacuaguuauaagacugacuagcccgaugggccucccaacgggcccuccuccccuccuugcaccgagauuaaucaaaggcucuuuucagagccaccaaaaaaaaaaaaaaaaaaaaaaaaaaaaaaaaaaaaaaaaaaaaaaaaaaaaaaaaaaaaaaaaaaaaaaaaaaaaaaaaaaaaaaaaaaaaaaaaaaaaa

SEQ ID NO: 24121 - RNA, 4035 nt, Artificial Sequence
  SARS-CoV-2/Wuhan/WIV05/2019__EPI_ISL_402128 spike protein mRNA gc (1-1273)(L18F_T20N_P26S_D138Y_R190S_K417T_E484K_N501Y_D614G_H655Y _T1027I)
aggagaaagcuuaccauguucguguuccuggugcugcugccccuggugagcagccagugcgugaacuucaccaaccggacccagcugccaagcgccuacaccaacagcuucacccggggcgucuacuaccccgacaagguguuccggagcagcguccugcacagcacccaggaccuguuccugcccuucuucagcaacgugaccugguuccacgccauccacgugagcggcaccaacggcaccaagcgguucgacaaccccgugcugcccuucaacgacggcguguacuucgccagcaccgagaagagcaacaucauccggggcuggaucuucggcaccacccuggacagcaagacccagagccugcugaucgugaauaacgccaccaacguggugaucaaggugugcgaguuccaguucugcaacuaccccuuccugggcguguacuaccacaagaacaacaagagcuggauggagagcgaguuccggguguacagcagcgccaacaacugcaccuucgaguacgugagccagcccuuccugauggaccuggagggcaagcagggcaacuucaagaaccugagcgaguucguguucaagaacaucgacggcuacuucaagaucuacagcaagcacaccccaaucaaccuggugcgggaucugccccagggcuucucagcccuggagccccugguggaccugcccaucggcaucaacaucacccgguuccagacccugcuggcccugcaccggagcuaccugaccccaggcgacagcagcagcggguggacagcaggcgcggcugcuuacuacgugggcuaccugcagccccggaccuuccugcugaaguacaacgagaacggcaccaucaccgacgccguggacugcgcccuggacccucugagcgagaccaagugcacccugaagagcuucaccguggagaagggcaucuaccagaccagcaacuuccgggugcagcccaccgagagcaucgugcgguuccccaacaucaccaaccugugccccuucggcgagguguucaacgccacccgguucgccagcguguacgccuggaaccggaagcggaucagcaacugcguggccgacuacagcgugcuguacaacagcgccagcuucagcaccuucaagugcuacggcgugagccccaccaagcugaacgaccugugcuucaccaacguguacgccgacagcuucgugauccguggcgacgaggugcggcagaucgcacccggccagacaggcaccaucgccgacuacaacuacaagcugcccgacgacuucaccggcugcgugaucgccuggaacagcaacaaccucgacagcaaggugggcggcaacuacaacuaccuguaccggcuguuccggaagagcaaccugaagcccuucgagcgggacaucagcaccgagaucuaccaagccggcuccaccccuugcaacggcgugaagggcuucaacugcuacuucccucugcagagcuacggcuuccagcccaccuacggcgugggcuaccagcccuaccgggugguggugcugagcuucgagcugcugcacgccccagccaccguguguggccccaagaagagcaccaaccuggugaagaacaagugcgugaacuucaacuucaacggccuuaccggcaccggcgugcugaccgagagcaacaagaaauuccugcccuuucagcaguucggccgggacaucgccgacaccaccgacgcugugcgggauccccagacccuggagauccuggacaucaccccuugcagcuucggcggcgugagcgugaucaccccaggcaccaacaccagcaaccagguggccgugcuguaccagggcgugaacugcaccgaggugcccguggccauccacgccgaccagcugacacccaccuggcgggucuacagcaccggcagcaacguguuccagacccgggccgguugccugaucggcgccgaguacgugaacaacagcuacgagugcgacauccccaucggcgccggcaucugugccagcuaccagacccagaccaauucaccccggagggcaaggagcguggccagccagagcaucaucgccuacaccaugagccugggcgccgagaacagcguggccuacagcaacaacagcaucgccauccccaccaacuucaccaucagcgugaccaccgagauucugcccgugagcaugaccaagaccagcguggacugcaccauguacaucugcggcgacagcaccgagugcagcaaccugcugcugcaguacggcagcuucugcacccagcugaaccgggcccugaccggcaucgccguggagcaggacaagaacacccaggagguguucgcccaggugaagcagaucuacaagaccccucccaucaaggacuucggcggcuucaacuucagccagauccugcccgaccccagcaagcccagcaagcggagcuucaucgaggaccugcuguucaacaaggugacccuagccgacgccggcuucaucaagcaguacggcgacugccucggcgacauagccgcccgggaccugaucugcgcccagaaguucaacggccugaccgugcugccuccccugcugaccgacgagaugaucgcccaguacaccagcgcccuguuagccggaaccaucaccagcggcuggacuuucggcgcuggagccgcucugcagauccccuucgccaugcagauggccuaccgguucaacggcaucggcgugacccagaacgugcuguacgagaaccagaagcugaucgccaaccaguucaacagcgccaucggcaagauccaggacagccugagcagcaccgcuagcgcccugggcaagcugcaggacguggugaaccagaacgcccaggcccugaacacccuggugaagcagcugagcagcaacuucggcgccaucagcagcgugcugaacgacauccugagccggcuggacaaggucgaggccgaggugcagaucgaccggcugaucacuggccggcugcagagccugcagaccuacgugacccagcagcugauccgggccgccgagauucgggccagcgccaaccuggccgccaucaagaugagcgagugcgugcugggccagagcaagcggguggacuucugcggcaagggcuaccaccugaugagcuuuccccagagcgcaccccacggagugguguuccugcacgugaccuacgugcccgcccaggagaagaacuucaccaccgccccagccaucugccacgacggcaaggcccacuuuccccgggagggcguguucgugagcaacggcacccacugguucgugacccagcggaacuucuacgagccccagaucaucaccaccgacaacaccuucgugagcggcaacugcgacguggugaucggcaucgugaacaacaccguguacgauccccugcagcccgagcuggacagcuucaaggaggagcuggacaaguacuucaagaaucacaccagccccgacguggaccugggcgacaucagcggcaucaacgccagcguggugaacauccagaaggagaucgaucggcugaacgagguggccaagaaccugaacgagagccugaucgaccugcaggagcugggcaaguacgagcaguacaucaaguggcccugguacaucuggcugggcuucaucgccggccugaucgccaucgugauggugaccaucaugcugugcugcaugaccagcugcugcagcugccugaagggcuguugcagcugcggcagcugcugcaaguucgacgaggacgacagcgagcccgugcugaagggcgugaagcugcacuacaccugaggacuaguuauaagacugacuagcccgaugggccucccaacgggcccuccuccccuccuugcaccgagauuaaucaaaggcucuuuucagagccaccaaaaaaaaaaaaaaaaaaaaaaaaaaaaaaaaaaaaaaaaaaaaaaaaaaaaaaaaaaaaaaaaaaaaaaaaaaaaaaaaaaaaaaaaaaaaaaaaaaaaa

SEQ ID NO: 24122 - RNA, 4035 nt, Artificial Sequence
  SARS-CoV-2/Wuhan/WIV05/2019__EPI_ISL_402128 spike protein mRNA gc (1-1273)(S13I_W152C_L452R_D614G)
aggagaaagcuuaccauguucguguuccuggugcugcugccccuggugagcauccagugcgugaaccugaccacccggacccagcugccaccagccuacaccaacagcuucacccggggcgucuacuaccccgacaagguguuccggagcagcguccugcacagcacccaggaccuguuccugcccuucuucagcaacgugaccugguuccacgccauccacgugagcggcaccaacggcaccaagcgguucgacaaccccgugcugcccuucaacgacggcguguacuucgccagcaccgagaagagcaacaucauccggggcuggaucuucggcaccacccuggacagcaagacccagagccugcugaucgugaauaacgccaccaacguggugaucaaggugugcgaguuccaguucugcaacgaccccuuccugggcguguacuaccacaagaacaacaagagcugcauggagagcgaguuccggguguacagcagcgccaacaacugcaccuucgaguacgugagccagcccuuccugauggaccuggagggcaagcagggcaacuucaagaaccugcgggaguucguguucaagaacaucgacggcuacuucaagaucuacagcaagcacaccccaaucaaccuggugcgggaucugccccagggcuucucagcccuggagccccugguggaccugcccaucggcaucaacaucacccgguuccagacccugcuggcccugcaccggagcuaccugaccccaggcgacagcagcagcggguggacagcaggcgcggcugcuuacuacgugggcuaccugcagccccggaccuuccugcugaaguacaacgagaacggcaccaucaccgacgccguggacugcgcccuggacccucugagcgagaccaagugcacccugaagagcuucaccguggagaagggcaucuaccagaccagcaacuuccgggugcagcccaccgagagcaucgugcgguuccccaacaucaccaaccugugccccuucggcgagguguucaacgccacccgguucgccagcguguacgccuggaaccggaagcggaucagcaacugcguggccgacuacagcgugcuguacaacagcgccagcuucagcaccuucaagugcuacggcgugagccccaccaagcugaacgaccugugcuucaccaacguguacgccgacagcuucgugauccguggcgacgaggugcggcagaucgcacccggccagacaggcaagaucgccgacuacaacuacaagcugcccgacgacuucaccggcugcgugaucgccuggaacagcaacaaccucgacagcaaggugggcggcaacuacaacuaccgcuaccggcuguuccggaagagcaaccugaagcccuucgagcgggacaucagcaccgagaucuaccaagccggcuccaccccuugcaacggcguggagggcuucaacugcuacuucccucugcagagcuacggcuuccagcccaccaacggcgugggcuaccagcccuaccgggugguggugcugagcuucgagcugcugcacgccccagccaccguguguggccccaagaagagcaccaaccuggugaagaacaagugcgugaacuucaacuucaacggccuuaccggcaccggcgugcugaccgagagcaacaagaaauuccugcccuuucagcaguucggccgggacaucgccgacaccaccgacgcugugcgggauccccagacccuggagauccuggacaucaccccuugcagcuucggcggcgugagcgugaucaccccaggcaccaacaccagcaaccagguggccgugcuguaccagggcgugaacugcaccgaggugcccguggccauccacgccgaccagcugacacccaccuggcgggucuacagcaccggcagcaacguguuccagacccgggccgguugccugaucggcgccgagcacgugaacaacagcuacgagugcgacauccccaucggcgccggcaucugugccagcuaccagacccagaccaauucaccccggagggcaaggagcguggccagccagagcaucaucgccuacaccaugagccugggcgccgagaacagcguggccuacagcaacaacagcaucgccauccccaccaacuucaccaucagcgugaccaccgagauucugcccgugagcaugaccaagaccagcguggacugcaccauguacaucugcggcgacagcaccgagugcagcaaccugcugcugcaguacggcagcuucugcacccagcugaaccgggcccugaccggcaucgccguggagcaggacaagaacacccaggagguguucgcccaggugaagcagaucuacaagaccccucccaucaaggacuucggcggcuucaacuucagccagauccugcccgaccccagcaagcccagcaagcggagcuucaucgaggaccugcuguucaacaaggugacccuagccgacgccggcuucaucaagcaguacggcgacugccucggcgacauagccgcccgggaccugaucugcgcccagaaguucaacggccugaccgugcugccuccccugcugaccgacgagaugaucgcccaguacaccagcgcccuguuagccggaaccaucaccagcggcuggacuuucggcgcuggagccgcucugcagauccccuucgccaugcagauggccuaccgguucaacggcaucggcgugacccagaacgugcuguacgagaaccagaagcugaucgccaaccaguucaacagcgccaucggcaagauccaggacagccugagcagcaccgcuagcgcccugggcaagcugcaggacguggugaaccagaacgcccaggcccugaacacccuggugaagcagcugagcagcaacuucggcgccaucagcagcgugcugaacgacauccugagccggcuggacaaggucgaggccgaggugcagaucgaccggcugaucacuggccggcugcagagccugcagaccuacgugacccagcagcugauccgggccgccgagauucgggccagcgccaaccuggccgccaccaagaugagcgagugcgugcugggccagagcaagcggguggacuucugcggcaagggcuaccaccugaugagcuuuccccagagcgcaccccacggagugguguuccugcacgugaccuacgugcccgcccaggagaagaacuucaccaccgccccagccaucugccacgacggcaaggcccacuuuccccgggagggcguguucgugagcaacggcacccacugguucgugacccagcggaacuucuacgagccccagaucaucaccaccgacaacaccuucgugagcggcaacugcgacguggugaucggcaucgugaacaacaccguguacgauccccugcagcccgagcuggacagcuucaaggaggagcuggacaaguacuucaagaaucacaccagccccgacguggaccugggcgacaucagcggcaucaacgccagcguggugaacauccagaaggagaucgaucggcugaacgagguggccaagaaccugaacgagagccugaucgaccugcaggagcugggcaaguacgagcaguacaucaaguggcccugguacaucuggcugggcuucaucgccggccugaucgccaucgugauggugaccaucaugcugugcugcaugaccagcugcugcagcugccugaagggcuguugcagcugcggcagcugcugcaaguucgacgaggacgacagcgagcccgugcugaagggcgugaagcugcacuacaccugaggacuaguuauaagacugacuagcccgaugggccucccaacgggcccuccuccccuccuugcaccgagauuaaucaaaggcucuuuucagagccaccaaaaaaaaaaaaaaaaaaaaaaaaaaaaaaaaaaaaaaaaaaaaaaaaaaaaaaaaaaaaaaaaaaaaaaaaaaaaaaaaaaaaaaaaaaaaaaaaaaaaa

SEQ ID NO: 24123 - RNA, 4035 nt, Artificial Sequence
  SARS-CoV-2/Wuhan/WIV05/2019__EPI_ISL_402128 spike protein mRNA gc (1-1273)
aggagaaagcuuaccauguucguguuccuggugcugcugccccuggugagcagccagugcgugaaccugaccacccggacccagcugcccccugccuacaccaacagcuucacccggggcguguacuaccccgacaagguguuccggagcagcgugcugcacagcacccaggaccuguuccugcccuucuucagcaacgugaccugguuccacgccauccacgugagcggcaccaacggcaccaagcgguucgacaacccagugcugcccuucaacgacggcguguacuucgccagcaccgagaagucaaacaucauccggggcuggaucuucggcaccacccuggacagcaagacacagagccugcugaucgugaacaacgccaccaacguggugaucaaggugugcgaguuucaguucugcaacgaccccuuccugggcguguacuaccacaagaacaacaagagcuggauggagagcgaguuccgggucuacagcagcgcuaacaauugcaccuucgaguacgugagccagcccuuccugauggaccucgagggcaagcagggcaacuucaagaaccugcgggaguucguguucaagaacaucgauggcuacuucaagaucuacagcaagcacacccccaucaaccuggugcgggaccugccccagggauucagcgcccuggagccucugguggaccugcccaucggcaucaacaucaccagguuccagacccugcuggcccugcaccggagcuaccugacccccggcgacagcagcagcggcuggaccgccggcgccgccgcauacuacgugggcuaccugcagccacggaccuuccugcugaaguacaacgagaacggcaccaucaccgacgccguggacugcgcccuggacccccugagcgagaccaagugcacccuaaagagcuucaccguggagaagggcaucuaccagaccagcaacuuccgggugcagcccacugagagcaucgugcgguuccccaacauuaccaaccugugucccuucggcgagguguucaacgccacccgguucgccagcguguacgccuggaaccggaagcggaucagcaacugcguggccgacuacagcgugcuguacaacagcgccagcuucagcaccuucaagugcuacggcgugagcccuaccaagcugaacgaccugugcuucaccaacguguacgcugacagcuucgugauccggggcgacgaggugcggcagaucgcccccggccagaccggcaagaucgccgacuacaacuacaagcugcccgacgacuucaccggcugcgugaucgccuggaacagcaacaaccuggacagcaaggugggcggcaacuacaacuaccuguaccggcuguuccguaagagcaaccugaagccauucgagcgggacaucagcaccgagaucuaccaggccggcagcacccccugcaacgguguggagggcuuuaacugcuacuucccccugcagagcuacggcuuccagcccaccaacggcgugggcuaccagcccuaccgggugguggugcugagcuucgagcugcugcacgcccccgccaccgugugcggcccuaaaaagagcaccaaccuggugaagaacaagugcgugaacuucaauuucaacggccugaccggcaccggcgugcugaccgagagcaacaagaaguuccugcccuuccagcaguucggccgggauaucgccgacaccaccgacgcagugcgggacccccagacccuggagauccuggacaucaccccaugcagcuucggcggcgugagcgucaucacccccggcacaaacaccagcaaccagguggccgugcuguaccaggacgugaacugcaccgaggugcccguggccauccacgccgaccagcugacccccaccuggcggguguacagcaccggaagcaacguguuccagacccgggccggcugccugaucggcgccgagcacgugaacaacuccuacgagugcgacauccccaucggcgcuggcaucugcgccagcuaccagacccagaccaacagcccccggcgggcccggagcguggccagccagagcaucaucgccuacaccaugagcuuaggcgccgagaacagcguggccuacagcaacaacagcaucgcgaucccuaccaacuucaccaucagcgugaccaccgagauacugcccgugagcaugaccaagaccagcguggacuguaccauguacaucugcggcgacagcaccgagugcagcaaccugcugcugcaguacggcagcuucugcacccagcugaaccgggcccugaccggcaucgccguggagcaggacaagaacacccaagagguguucgcccaggugaagcagaucuacaagacucccccaaucaaggacuucggcggcuucaacuucagccagauccugcccgaccccagcaagcccagcaagcggagcuucaucgaggaccugcuguucaacaaggugacccuggccgacgccggcuucaucaagcaguacggcgauugccugggcgacaucgccgcucgggaccugaucugcgcccagaaguucaacgggcugaccgugcugcccccucugcugaccgacgagaugaucgcccaguacaccagcgcccugcuugccggcaccaucaccagcggcuggaccuucggcgccggcgcagcccugcagauccccuucgccaugcagauggccuaccgguucaacggcaucggcgugacccagaacgugcuguacgagaaccagaagcugaucgccaaccaguucaacagcgccaucggcaagauccaggacagccugagcagcaccgccagcgcccugggcaagcugcaggacguggugaaccagaacgcucaggcccugaacacccuggugaagcagcugagcagcaacuucggcgccaucagcucagugcugaaugacauccugagcaggcuggacaagguggaggccgaggugcagaucgaccggcugaucaccggccggcugcagagccugcagaccuacgugacccagcagcugauccgggccgccgagauccgggccagcgccaaccuggcagccaccaagaugagcgagugcgugcugggccagagcaagcggguggacuuuugcggcaagggcuaccaccugaugagcuucccccagagcgccccacacggcgugguguuccuccacgucacauacgugcccgcccaggagaagaacuucaccaccgcccccgccauuugccacgacggcaaggcucacuucccccgggagggcguguucgugagcaacggaacccacugguucgugacccagcggaacuucuacgagccccagaucaucaccaccgacaacaccuucgugagcggcaacugcgacguggugaucggcaucgugaacaacaccguguacgacccccugcagccugagcuggacagcuucaaggaggagcuggacaaguacuucaagaaccacaccagccccgauguggaccugggcgacaucagcggcaucaacgccagcguggugaacauccagaaggagaucgaccggcugaacgagguggccaagaaccugaacgagagccugaucgaccugcaggagcugggcaaguacgagcaguacaucaaguggcccugguacaucuggcugggcuucaucgccggccugaucgccaucgugauggugaccaucaugcugugcugcaugaccagcugcuguagcugccugaagggcugcugcagcugcggcagcugcugcaaguucgacgaggacgacagcgagccagugcugaagggcgugaagcugcacuacaccugaggacuaguuauaagacugacuagcccgaugggccucccaacgggcccuccuccccuccuugcaccgagauuaaucaaaggcucuuuucagagccaccaaaaaaaaaaaaaaaaaaaaaaaaaaaaaaaaaaaaaaaaaaaaaaaaaaaaaaaaaaaaaaaaaaaaaaaaaaaaaaaaaaaaaaaaaaaaaaaaaaaaa

SEQ ID NO: 24124 - RNA, 4035 nt, Artificial Sequence
  SARS-CoV-2/Wuhan/WIV05/2019__EPI_ISL_402128 spike protein mRNA gc (1-1273)(D614G)
aggagaaagcuuaccauguucguguuccuggugcugcugccccuggugagcagccagugcgugaaccugaccacccggacccagcugcccccugccuacaccaacagcuucacccggggcguguacuaccccgacaagguguuccggagcagcgugcugcacagcacccaggaccuguuccugcccuucuucagcaacgugaccugguuccacgccauccacgugagcggcaccaacggcaccaagcgguucgacaacccagugcugcccuucaacgacggcguguacuucgccagcaccgagaagucaaacaucauccggggcuggaucuucggcaccacccuggacagcaagacacagagccugcugaucgugaacaacgccaccaacguggugaucaaggugugcgaguuucaguucugcaacgaccccuuccugggcguguacuaccacaagaacaacaagagcuggauggagagcgaguuccgggucuacagcagcgcuaacaauugcaccuucgaguacgugagccagcccuuccugauggaccucgagggcaagcagggcaacuucaagaaccugcgggaguucguguucaagaacaucgauggcuacuucaagaucuacagcaagcacacccccaucaaccuggugcgggaccugccccagggauucagcgcccuggagccucugguggaccugcccaucggcaucaacaucaccagguuccagacccugcuggcccugcaccggagcuaccugacccccggcgacagcagcagcggcuggaccgccggcgccgccgcauacuacgugggcuaccugcagccacggaccuuccugcugaaguacaacgagaacggcaccaucaccgacgccguggacugcgcccuggacccccugagcgagaccaagugcacccuaaagagcuucaccguggagaagggcaucuaccagaccagcaacuuccgggugcagcccacugagagcaucgugcgguuccccaacauuaccaaccugugucccuucggcgagguguucaacgccacccgguucgccagcguguacgccuggaaccggaagcggaucagcaacugcguggccgacuacagcgugcuguacaacagcgccagcuucagcaccuucaagugcuacggcgugagcccuaccaagcugaacgaccugugcuucaccaacguguacgcugacagcuucgugauccggggcgacgaggugcggcagaucgcccccggccagaccggcaagaucgccgacuacaacuacaagcugcccgacgacuucaccggcugcgugaucgccuggaacagcaacaaccuggacagcaaggugggcggcaacuacaacuaccuguaccggcuguuccguaagagcaaccugaagccauucgagcgggacaucagcaccgagaucuaccaggccggcagcacccccugcaacgguguggagggcuuuaacugcuacuucccccugcagagcuacggcuuccagcccaccaacggcgugggcuaccagcccuaccgggugguggugcugagcuucgagcugcugcacgcccccgccaccgugugcggcccuaaaaagagcaccaaccuggugaagaacaagugcgugaacuucaauuucaacggccugaccggcaccggcgugcugaccgagagcaacaagaaguuccugcccuuccagcaguucggccgggauaucgccgacaccaccgacgcagugcgggacccccagacccuggagauccuggacaucaccccaugcagcuucggcggcgugagcgucaucacccccggcacaaacaccagcaaccagguggccgugcuguaccagggagugaacugcaccgaggugcccguggccauccacgccgaccagcugacccccaccuggcggguguacagcaccggcagcaacguguuccagacccgggccggcugccugaucggcgccgagcacgugaacaacuccuacgagugcgacauccccaucggcgcuggcaucugcgccagcuaccagacccagaccaacagcccccggcgggcccggagcguggccagccagagcaucaucgccuacaccaugagcuuaggcgccgagaacagcguggccuacagcaacaacagcaucgcgaucccuaccaacuucaccaucagcgugaccaccgagauacugcccgugagcaugaccaagaccagcguggacuguaccauguacaucugcggcgacagcaccgagugcagcaaccugcugcugcaguacggcagcuucugcacccagcugaaccgggcccugaccggcaucgccguggagcaggacaagaacacccaagagguguucgcccaggugaagcagaucuacaagacucccccaaucaaggacuucggcggcuucaacuucagccagauccugcccgaccccagcaagcccagcaagcggagcuucaucgaggaccugcuguucaacaaggugacccuggccgacgccggcuucaucaagcaguacggcgacugccugggggauaucgccgcucgggaccugaucugcgcccagaaguucaacggccugaccgugcugcccccucugcugaccgacgagaugaucgcccaguacaccagcgcccugcuugccggcaccaucaccagcggcuggaccuucggcgccggcgcagcccugcagauccccuucgccaugcagauggccuaccgguucaacggcaucggcgugacccagaacgugcuguacgagaaccagaagcugaucgccaaccaguucaacagcgccaucggcaagauccaggacagccugagcagcaccgccagcgcccugggcaagcugcaggacguggugaaccagaacgcucaggcccugaacacccuggugaagcagcugagcagcaacuucggcgccaucagcucagugcugaaugacauccugagcaggcuggacaagguggaggccgaggugcagaucgaccggcugaucaccggccggcugcagagccugcagaccuacgugacccagcagcugauccgggccgccgagauccgggccagcgccaaccuggcagccaccaagaugagcgagugcgugcugggccagagcaagcggguggacuuuugcggcaagggcuaccaccugaugagcuucccccagagcgccccacacggcgugguguuccuccacgucacauacgugcccgcccaggagaagaacuucaccaccgcccccgccauuugccacgacggcaaggcucacuucccccgggagggaguguucgugagcaacggcacccacugguucgugacccagcggaacuucuacgagccccagaucaucaccaccgacaacaccuucgugagcggcaacugcgacguggugaucggcaucgugaacaacaccguguacgacccccugcagccugagcuggacagcuucaaggaggagcuggacaaguacuucaagaaccacaccagccccgacguggaucugggcgacaucagcggcaucaacgccagcguggugaacauccagaaggagaucgaccggcugaacgagguggccaagaaccugaacgagagccugaucgaccugcaggagcugggcaaguacgagcaguacaucaaguggcccugguacaucuggcugggcuucaucgccggccugaucgccaucgugauggugaccaucaugcugugcugcaugaccagcugcuguagcugccugaagggcugcugcagcugcggcagcugcugcaaguucgacgaggacgacagcgagccagugcugaagggcgugaagcugcacuacaccugaggacuaguuauaagacugacuagcccgaugggccucccaacgggcccuccuccccuccuugcaccgagauuaaucaaaggcucuuuucagagccaccaaaaaaaaaaaaaaaaaaaaaaaaaaaaaaaaaaaaaaaaaaaaaaaaaaaaaaaaaaaaaaaaaaaaaaaaaaaaaaaaaaaaaaaaaaaaaaaaaaaaa

SEQ ID NO: 24125 - RNA, 4035 nt, Artificial Sequence
  SARS-CoV-2/Wuhan/WIV05/2019__EPI_ISL_402128 spike protein mRNA gc (1-1273)(A222V_D614G)
aggagaaagcuuaccauguucguguuccuggugcugcugccccuggugagcagccagugcgugaaccugaccacccggacccagcugcccccugccuacaccaacagcuucacccggggcguguacuaccccgacaagguguuccggagcagcgugcugcacagcacccaggaccuguuccugcccuucuucagcaacgugaccugguuccacgccauccacgugagcggcaccaacggcaccaagcgguucgacaacccagugcugcccuucaacgacggcguguacuucgccagcaccgagaagucaaacaucauccggggcuggaucuucggcaccacccuggacagcaagacacagagccugcugaucgugaacaacgccaccaacguggugaucaaggugugcgaguuucaguucugcaacgaccccuuccugggcguguacuaccacaagaacaacaagagcuggauggagagcgaguuccgggucuacagcagcgcuaacaauugcaccuucgaguacgugagccagcccuuccugauggaccucgagggcaagcagggcaacuucaagaaccugcgggaguucguguucaagaacaucgauggcuacuucaagaucuacagcaagcacacccccaucaaccuggugcgggaccugccccagggauucagcgugcuggagccucugguggaccugcccaucggcaucaacaucaccagguuccagacccugcuggcccugcaccggagcuaccugacccccggcgacagcagcagcggcuggaccgccggcgccgccgccuacuacgugggcuaccugcagccacggaccuuccugcugaaguacaacgagaacggcaccaucaccgacgcaguggacugcgcccuggacccccugagcgagaccaagugcacccuaaagagcuucaccguggagaagggcaucuaccagaccagcaacuuccgggugcagcccacugagagcaucgugcgguuccccaacauuaccaaccugugucccuucggcgagguguucaacgccacccgguucgccagcguguacgccuggaaccggaagcggaucagcaacugcguggccgacuacagcgugcuguacaacagcgccagcuucagcaccuucaagugcuacggcgugagcccuaccaagcugaacgaccugugcuucaccaacguguacgccgacagcuucgugauccggggcgacgaggugcggcagaucgcucccggccagaccggcaagaucgccgacuacaacuacaagcugcccgacgacuucaccggcugcgugaucgccuggaacagcaacaaccuggacagcaaggugggcggcaacuacaacuaccuguaccggcuguuccguaagagcaaccugaagccauucgagcgggacaucagcaccgagaucuaccaggccggcagcacccccugcaacgguguggagggcuuuaacugcuacuucccccugcagagcuacggcuuccagcccaccaacggcgugggcuaccagcccuaccgggugguggugcugagcuucgagcugcugcacgcccccgccaccgugugcggcccuaaaaagagcaccaaccuggugaagaacaagugcgugaacuucaauuucaacggccugaccggcaccggcgugcugaccgagagcaacaagaaguuccugcccuuccagcaguucggccgggauaucgccgacaccaccgacgccgugcgggacccccagacccuggagauccuggacaucaccccaugcagcuucggcggcgucagcgugaucacccccggcacaaacaccagcaaccagguggcagugcuguaccagggagugaacugcaccgaggugcccguggccauccacgccgaccagcugacccccaccuggcggguguacagcaccggcagcaacguguuccagacccgggccggcugccugaucggcgccgagcacgugaacaacuccuacgagugcgacauccccaucggcgccggcaucugcgcuagcuaccagacccagaccaacagcccccggcgggcccggagcguggccagccagagcaucaucgccuacaccaugagcuuaggcgccgagaacagcguggccuacagcaacaacagcaucgccaucccuaccaacuucaccaucagcgugaccaccgagauacugcccgugagcaugaccaagaccagcguggacuguaccauguacaucugcggcgacagcaccgagugcagcaaccugcugcugcaguacggcagcuucugcacccagcugaaccgggcgcugaccggcaucgccguggagcaggacaagaacacccaagagguguucgcccaggugaagcagaucuacaagacucccccaaucaaggacuucggcggcuucaacuucagccagauccugcccgaccccagcaagcccagcaagcggagcuucaucgaggaccugcuguucaacaaggugacccuggccgacgccggcuucaucaagcaguacggcgacugccugggggauaucgccgcccgggaccugaucugcgcucagaaguucaacggccugaccgugcugcccccucugcugaccgacgagaugaucgcccaguacaccagcgcccugcuugccggcaccaucaccagcggcuggaccuucggcgccggcgccgcacugcagauccccuucgccaugcagauggccuaccgguucaacggcaucggcgugacccagaacgugcuguacgagaaccagaagcugaucgccaaccaguucaacagcgccaucggcaagauccaggacagccugagcagcaccgccagcgcccugggcaagcugcaggacguggugaaccagaacgcccaggcucugaacacccuggugaagcagcugagcagcaacuucggcgccaucagcucagugcugaaugacauccugagcaggcuggacaagguggaggccgaggugcagaucgaccggcugaucaccggccggcugcagagccugcagaccuacgugacccagcagcugauccgggccgccgagauccgggccagcgccaaccuggccgcaaccaagaugagcgagugcgugcugggccagagcaagcggguggacuuuugcggcaagggcuaccaccugaugagcuucccccagagcgccccacacggcguggucuuccuccacgugacauacgugcccgcccaggagaagaacuucaccaccgcccccgccauuugccacgacggcaaggcccacuucccccgggagggaguguucgugagcaacggcacccacugguucgugacccagcggaacuucuacgagccccagaucaucaccaccgacaacaccuucgugagcggcaacugcgacguggugaucggcaucgugaacaacaccguguacgacccccugcagccugagcuggacagcuucaaggaggagcuggacaaguacuucaagaaccacaccagccccgacguggaucugggcgacaucagcggcaucaacgcuagcguggugaacauccagaaggagaucgaccggcugaacgagguggccaagaaccugaacgagagccugaucgaccugcaggagcugggcaaguacgagcaguacaucaaguggcccugguacaucuggcugggcuucaucgccggccugaucgccaucgugauggugaccaucaugcugugcugcaugaccagcugcuguagcugccugaagggcugcugcagcugcggcagcugcugcaaguucgacgaggacgacagcgagccagugcugaagggcgugaagcugcacuacaccugaggacuaguuauaagacugacuagcccgaugggccucccaacgggcccuccuccccuccuugcaccgagauuaaucaaaggcucuuuucagagccaccaaaaaaaaaaaaaaaaaaaaaaaaaaaaaaaaaaaaaaaaaaaaaaaaaaaaaaaaaaaaaaaaaaaaaaaaaaaaaaaaaaaaaaaaaaaaaaaaaaaaa

SEQ ID NO: 24126 - RNA, 4035 nt, Artificial Sequence
  SARS-CoV-2/Wuhan/WIV05/2019__EPI_ISL_402128 spike protein mRNA gc (1-1273)(N439K_D614G)
aggagaaagcuuaccauguucguguuccuggugcugcugccccuggugagcagccagugcgugaaccugaccacccggacccagcugcccccugccuacaccaacagcuucacccggggcguguacuaccccgacaagguguuccggagcagcgugcugcacagcacccaggaccuguuccugcccuucuucagcaacgugaccugguuccacgccauccacgugagcggcaccaacggcaccaagcgguucgacaacccagugcugcccuucaacgacggcguguacuucgccagcaccgagaagucaaacaucauccggggcuggaucuucggcaccacccuggacagcaagacacagagccugcugaucgugaacaacgccaccaacguggugaucaaggugugcgaguuucaguucugcaacgaccccuuccugggcguguacuaccacaagaacaacaagagcuggauggagagcgaguuccgggucuacagcagcgcuaacaauugcaccuucgaguacgugagccagcccuuccugauggaccucgagggcaagcagggcaacuucaagaaccugcgggaguucguguucaagaacaucgauggcuacuucaagaucuacagcaagcacacccccaucaaccuggugcgggaccugccccagggauucagcgcccuggagccucugguggaccugcccaucggcaucaacaucaccagguuccagacccugcuggcccugcaccggagcuaccugacccccggcgacagcagcagcggcuggaccgccggcgccgccgcauacuacgugggcuaccugcagccacggaccuuccugcugaaguacaacgagaacggcaccaucaccgacgccguggacugcgcccuggacccccugagcgagaccaagugcacccuaaagagcuucaccguggagaagggcaucuaccagaccagcaacuuccgggugcagcccacugagagcaucgugcgguuccccaacauuaccaaccugugucccuucggcgagguguucaacgccacccgguucgccagcguguacgccuggaaccggaagcggaucagcaacugcguggccgacuacagcgugcuguacaacagcgccagcuucagcaccuucaagugcuacggcgugagcccuaccaagcugaacgaccugugcuucaccaacguguacgcugacagcuucgugauccggggcgacgaggugcggcagaucgcccccggccagaccggcaagaucgccgacuacaacuacaagcugcccgacgacuucaccggcugcgugaucgccuggaacagcaagaaccuggacagcaaggugggcggcaacuacaacuaccuguaccggcuguuccguaagagcaaccugaagccauucgagcgggacaucagcaccgagaucuaccaggccggcagcacccccugcaacgguguggagggcuuuaacugcuacuucccccugcagagcuacggcuuccagcccaccaacggcgugggcuaccagcccuaccgggugguggugcugagcuucgagcugcugcacgcccccgccaccgugugcggcccuaaaaagagcaccaaccuggugaagaacaagugcgugaacuucaacuucaauggccugaccggcaccggcgugcugaccgagagcaacaagaaguuccugcccuuccagcaguucggccgggauaucgccgacaccaccgacgcagugcgggacccccagacccuggagauccuggacaucaccccaugcagcuucggcggcgugagcgucaucacccccggcacaaacaccagcaaccagguggccgugcuguaccagggagugaacugcaccgaggugcccguggccauccacgccgaccagcugacccccaccuggcggguguacagcaccggcagcaacguguuccagacccgggccggcugccugaucggcgccgagcacgugaacaacuccuacgagugcgacauccccaucggcgcuggcaucugcgccagcuaccagacccagaccaacagcccccggcgggcccggagcguggccagccagagcaucaucgccuacaccaugagcuuaggcgccgagaacagcguggccuacagcaacaacagcaucgcgaucccuaccaacuucaccaucagcgugaccaccgagauacugcccgugagcaugaccaagaccagcguggacuguaccauguacaucugcggcgacagcaccgagugcagcaaccugcugcugcaguacggcagcuucugcacccagcugaaccgggcccugaccggcaucgccguggagcaggacaagaacacccaagagguguucgcccaggugaagcagaucuacaagacucccccaaucaaggacuucggcggcuucaacuucagccagauccugcccgaccccagcaagcccagcaagcggagcuucaucgaggaccugcuguucaacaaggugacccuggccgacgccggcuucaucaagcaguacggcgacugccugggggauaucgccgcucgggaccugaucugcgcccagaaguucaacggccugaccgugcugcccccucugcugaccgacgagaugaucgcccaguacaccagcgcccugcuugccggcaccaucaccagcggcuggaccuucggcgccggcgcagcccugcagauccccuucgccaugcagauggccuaccgguucaacggcaucggcgugacccagaacgugcuguacgagaaccagaagcugaucgccaaccaguucaacagcgccaucggcaagauccaggacagccugagcagcaccgccagcgcccugggcaagcugcaggacguggugaaccagaacgcucaggcccugaacacccuggugaagcagcugagcagcaacuucggcgccaucagcucagugcugaacgacauccugagcaggcuggacaagguggaggccgaggugcagaucgaccggcugaucaccggccggcugcagagccugcagaccuacgugacccagcagcugauccgggccgccgagauccgggccagcgccaaucuggcagccaccaagaugagcgagugcgugcugggccagagcaagcggguggacuuuugcggcaagggcuaccaccugaugagcuucccccagagcgccccacacggcgugguguuccuccacgucacauacgugcccgcccaggagaagaacuucaccaccgcccccgccauuugccacgacggcaaggcucacuucccccgggagggaguguucgugagcaacggcacccacugguucgugacccagcggaacuucuacgagccccagaucaucaccaccgacaacaccuucgugagcggcaacugcgacguggugaucggcaucgugaacaacaccguguacgacccccugcagccugagcuggacagcuucaaggaggagcuggacaaguacuucaagaaccacaccagccccgacguggaucugggcgacaucagcggcaucaacgccagcguggugaacauccagaaggagaucgaccggcugaacgagguggccaagaaccugaacgagagccugaucgaccugcaggagcugggcaaguacgagcaguacaucaaguggcccugguacaucuggcugggcuucaucgccggccugaucgccaucgugauggugaccaucaugcugugcugcaugaccagcugcuguagcugccugaagggcugcugcagcugcggcagcugcugcaaguucgacgaggacgacagcgagccagugcugaagggcgugaagcugcacuacaccugaggacuaguuauaagacugacuagcccgaugggccucccaacgggcccuccuccccuccuugcaccgagauuaaucaaaggcucuuuucagagccaccaaaaaaaaaaaaaaaaaaaaaaaaaaaaaaaaaaaaaaaaaaaaaaaaaaaaaaaaaaaaaaaaaaaaaaaaaaaaaaaaaaaaaaaaaaaaaaaaaaaaa

SEQ ID NO: 24127 - RNA, 4035 nt, Artificial Sequence
  SARS-CoV-2/Wuhan/WIV05/2019__EPI_ISL_402128 spike protein mRNA gc (1-1273)(S477N_D614G)
aggagaaagcuuaccauguucguguuccuggugcugcugccccuggugagcagccagugcgugaaccugaccacccggacccagcugcccccugccuacaccaacagcuucacccggggcguguacuaccccgacaagguguuccggagcagcgugcugcacagcacccaggaccuguuccugcccuucuucagcaacgugaccugguuccacgccauccacgugagcggcaccaacggcaccaagcgguucgacaacccagugcugcccuucaacgacggcguguacuucgccagcaccgagaagucaaacaucauccggggcuggaucuucggcaccacccuggacagcaagacacagagccugcugaucgugaacaacgccaccaacguggugaucaaggugugcgaguuucaguucugcaacgaccccuuccugggcguguacuaccacaagaacaacaagagcuggauggagagcgaguuccgggucuacagcagcgcuaacaauugcaccuucgaguacgugagccagcccuuccugauggaccucgagggcaagcagggcaacuucaagaaccugcgggaguucguguucaagaacaucgauggcuacuucaagaucuacagcaagcacacccccaucaaccuggugcgggaccugccccagggauucagcgcccuggagccucugguggaccugcccaucggcaucaacaucaccagguuccagacccugcuggcccugcaccggagcuaccugacccccggcgacagcagcagcggcuggaccgccggcgccgccgcauacuacgugggcuaccugcagccacggaccuuccugcugaaguacaacgagaacggcaccaucaccgacgccguggacugcgcccuggacccccugagcgagaccaagugcacccuaaagagcuucaccguggagaagggcaucuaccagaccagcaacuuccgggugcagcccacugagagcaucgugcgguuccccaacauuaccaaccugugucccuucggcgagguguucaacgccacccgguucgccagcguguacgccuggaaccggaagcggaucagcaacugcguggccgacuacagcgugcuguacaacagcgccagcuucagcaccuucaagugcuacggcgugagcccuaccaagcugaacgaccugugcuucaccaacguguacgcugacagcuucgugauccggggcgacgaggugcggcagaucgcccccggccagaccggcaagaucgccgacuacaacuacaagcugcccgacgacuucaccggcugcgugaucgccuggaacagcaacaaccuggacagcaaggugggcggcaacuacaacuaccuguaccggcuguuccguaagagcaaccugaagccauucgagcgggacaucagcaccgagaucuaccaggccggcaacacccccugcaacgguguggagggcuuuaacugcuacuucccccugcagagcuacggcuuccagcccaccaacggcgugggcuaccagcccuaccgggugguggugcugagcuucgagcugcugcacgcccccgccaccgugugcggcccuaaaaagagcaccaaccuggugaagaacaagugcgugaauuucaacuucaacggccugaccggcaccggcgugcugaccgagagcaacaagaaguuccugcccuuccagcaguucggccgggauaucgccgacaccaccgacgcagugcgggacccccagacccuggagauccuggacaucaccccaugcagcuucggcggcgugagcgucaucacccccggcacaaacaccagcaaccagguggccgugcuguaccagggagugaacugcaccgaggugcccguggccauccacgccgaccagcugacccccaccuggcggguguacagcaccggcagcaacguguuccagacccgggccggcugccugaucggcgccgagcacgugaacaacagcuacgagugcgacauccccaucggcgcuggcaucugcgccuccuaccagacccagaccaacagcccccggcgggcccggagcguggccagccagagcaucaucgccuacaccaugagcuuaggcgccgagaacagcguggccuacagcaacaacagcaucgcgaucccuaccaacuucaccaucagcgugaccaccgagauacugcccgugagcaugaccaagaccagcguggacuguaccauguacaucugcggcgacagcaccgagugcagcaaccugcugcugcaguacggcagcuucugcacccagcugaaccgggcccugaccggcaucgccguggagcaggacaagaacacccaagagguguucgcccaggugaagcagaucuacaagacucccccaaucaaggacuucggcggcuucaacuucagccagauccugcccgaccccagcaagcccagcaagcggagcuucaucgaggaccugcuguucaacaaggugacccuggccgacgccggcuucaucaagcaguacggcgacugccugggggauaucgccgcucgggaccugaucugcgcccagaaguucaacggccugaccgugcugcccccucugcugaccgacgagaugaucgcccaguacaccagcgcccugcuugccggcaccaucaccagcggcuggaccuucggcgccggcgcagcccugcagauccccuucgccaugcagauggccuaccgguucaacggcaucggcgugacccagaacgugcuguacgagaaccagaagcugaucgccaaccaguucaacagcgccaucggcaagauccaggacagccugagcagcaccgccagcgcccugggcaagcugcaggacguggugaaccagaacgcucaggcccugaacacccuggugaagcagcugagcagcaauuucggcgccaucagcagcgugcugaacgacauccugucaaggcuggacaagguggaggccgaggugcagaucgaccggcugaucaccggccggcugcagagccugcagaccuacgugacccagcagcugauccgggccgccgagauccgggccagcgccaaccuggcagccaccaagaugagcgagugcgugcugggccagagcaagcggguggacuuuugcggcaagggcuaccaccugaugagcuucccccagagcgccccacacggcgugguguuccuccacgucacauacgugcccgcccaggagaagaacuucaccaccgcccccgccauuugccacgacggcaaggcucacuucccccgggagggaguguucgugagcaacggcacccacugguucgugacccagcggaacuucuacgagccccagaucaucaccaccgacaacaccuucgugagcggcaacugcgacguggugaucggcaucgugaacaacaccguguacgacccccugcagccugagcuggacagcuucaaggaggagcuggacaaguacuucaagaaccacaccagccccgacguggaucugggcgacaucagcggcaucaacgccagcguggugaacauccagaaggagaucgaccggcugaacgagguggccaagaaccugaacgagagccugaucgaccugcaggagcugggcaaguacgagcaguacaucaaguggcccugguacaucuggcugggcuucaucgccggccugaucgccaucgugauggugaccaucaugcugugcugcaugaccagcugcuguagcugccugaagggcugcugcagcugcggcagcugcugcaaguucgacgaggacgacagcgagccagugcugaagggcgugaagcugcacuacaccugaggacuaguuauaagacugacuagcccgaugggccucccaacgggcccuccuccccuccuugcaccgagauuaaucaaaggcucuuuucagagccaccaaaaaaaaaaaaaaaaaaaaaaaaaaaaaaaaaaaaaaaaaaaaaaaaaaaaaaaaaaaaaaaaaaaaaaaaaaaaaaaaaaaaaaaaaaaaaaaaaaaaa

SEQ ID NO: 24128 - RNA, 4035 nt, Artificial Sequence
  SARS-CoV-2/Wuhan/WIV05/2019__EPI_ISL_402128 spike protein mRNA gc (1-1273)(N501Y_D614G)
aggagaaagcuuaccauguucguguuccuggugcugcugccccuggugagcagccagugcgugaaccugaccacccggacccagcugcccccugccuacaccaacagcuucacccggggcguguacuaccccgacaagguguuccggagcagcgugcugcacagcacccaggaccuguuccugcccuucuucagcaacgugaccugguuccacgccauccacgugagcggcaccaacggcaccaagcgguucgacaacccagugcugcccuucaacgacggcguguacuucgccagcaccgagaagucaaacaucauccggggcuggaucuucggcaccacccuggacagcaagacacagagccugcugaucgugaacaacgccaccaacguggugaucaaggugugcgaguuucaguucugcaacgaccccuuccugggcguguacuaccacaagaacaacaagagcuggauggagagcgaguuccgggucuacagcagcgcuaacaauugcaccuucgaguacgugagccagcccuuccugauggaccucgagggcaagcagggcaacuucaagaaccugcgggaguucguguucaagaacaucgauggcuacuucaagaucuacagcaagcacacccccaucaaccuggugcgggaccugccccagggauucagcgcccuggagccucugguggaccugcccaucggcaucaacaucaccagguuccagacccugcuggcccugcaccggagcuaccugacccccggcgacagcagcagcggcuggaccgccggcgccgccgcauacuacgugggcuaccugcagccacggaccuuccugcugaaguacaacgagaacggcaccaucaccgacgccguggacugcgcccuggacccccugagcgagaccaagugcacccuaaagagcuucaccguggagaagggcaucuaccagaccagcaacuuccgggugcagcccacugagagcaucgugcgguuccccaacauuaccaaccugugucccuucggcgagguguucaacgccacccgguucgccagcguguacgccuggaaccggaagcggaucagcaacugcguggccgacuacagcgugcuguacaacagcgccagcuucagcaccuucaagugcuacggcgugagcccuaccaagcugaacgaccugugcuucaccaacguguacgcugacagcuucgugauccggggcgacgaggugcggcagaucgcccccggccagaccggcaagaucgccgacuacaacuacaagcugcccgacgacuucaccggcugcgugaucgccuggaacagcaacaaccuggacagcaaggugggcggcaacuacaacuaccuguaccggcuguuccguaagagcaaccugaagccauucgagcgggacaucagcaccgagaucuaccaggccggcagcacccccugcaacgguguggagggcuuuaacugcuacuucccccugcagagcuacggcuuccagcccaccuacggcgugggcuaccagcccuaccgggugguggugcugagcuucgagcugcugcacgcccccgccaccgugugcggcccuaaaaagagcaccaaccuggugaagaacaagugcgugaacuucaacuucaauggccugaccggcaccggcgugcugaccgagagcaacaagaaguuccugcccuuccagcaguucggccgggauaucgccgacaccaccgacgcagugcgggacccccagacccuggagauccuggacaucaccccaugcagcuucggcggcgugagcgucaucacccccggcacaaacaccagcaaccagguggccgugcuguaccagggagugaacugcaccgaggugcccguggccauccacgccgaccagcugacccccaccuggcggguguacagcaccggcagcaacguguuccagacccgggccggcugccugaucggcgccgagcacgugaacaacuccuacgagugcgacauccccaucggcgcuggcaucugcgccagcuaccagacccagaccaacagcccccggcgggcccggagcguggccagccagagcaucaucgccuacaccaugagcuuaggcgccgagaacagcguggccuacagcaacaacagcaucgcgaucccuaccaacuucaccaucagcgugaccaccgagauacugcccgugagcaugaccaagaccagcguggacuguaccauguacaucugcggcgacagcaccgagugcagcaaccugcugcugcaguacggcagcuucugcacccagcugaaccgggcccugaccggcaucgccguggagcaggacaagaacacccaagagguguucgcccaggugaagcagaucuacaagacucccccaaucaaggacuucggcggcuucaacuucagccagauccugcccgaccccagcaagcccagcaagcggagcuucaucgaggaccugcuguucaacaaggugacccuggccgacgccggcuucaucaagcaguacggcgacugccugggggauaucgccgcucgggaccugaucugcgcccagaaguucaacggccugaccgugcugcccccucugcugaccgacgagaugaucgcccaguacaccagcgcccugcuugccggcaccaucaccagcggcuggaccuucggcgccggcgcagcccugcagauccccuucgccaugcagauggccuaccgguucaacggcaucggcgugacccagaacgugcuguacgagaaccagaagcugaucgccaaccaguucaacagcgccaucggcaagauccaggacagccugagcagcaccgccagcgcccugggcaagcugcaggacguggugaaccagaacgcucaggcccugaacacccuggugaagcagcugagcagcaacuucggcgccaucagcucagugcugaacgacauccugagcaggcuggacaagguggaggccgaggugcagaucgaccggcugaucaccggccggcugcagagccugcagaccuacgugacccagcagcugauccgggccgccgagauccgggccagcgccaaucuggcagccaccaagaugagcgagugcgugcugggccagagcaagcggguggacuuuugcggcaagggcuaccaccugaugagcuucccccagagcgccccacacggcgugguguuccuccacgucacauacgugcccgcccaggagaagaacuucaccaccgcccccgccauuugccacgacggcaaggcucacuucccccgggagggaguguucgugagcaacggcacccacugguucgugacccagcggaacuucuacgagccccagaucaucaccaccgacaacaccuucgugagcggcaacugcgacguggugaucggcaucgugaacaacaccguguacgacccccugcagccugagcuggacagcuucaaggaggagcuggacaaguacuucaagaaccacaccagccccgacguggaucugggcgacaucagcggcaucaacgccagcguggugaacauccagaaggagaucgaccggcugaacgagguggccaagaaccugaacgagagccugaucgaccugcaggagcugggcaaguacgagcaguacaucaaguggcccugguacaucuggcugggcuucaucgccggccugaucgccaucgugauggugaccaucaugcugugcugcaugaccagcugcuguagcugccugaagggcugcugcagcugcggcagcugcugcaaguucgacgaggacgacagcgagccagugcugaagggcgugaagcugcacuacaccugaggacuaguuauaagacugacuagcccgaugggccucccaacgggcccuccuccccuccuugcaccgagauuaaucaaaggcucuuuucagagccaccaaaaaaaaaaaaaaaaaaaaaaaaaaaaaaaaaaaaaaaaaaaaaaaaaaaaaaaaaaaaaaaaaaaaaaaaaaaaaaaaaaaaaaaaaaaaaaaaaaaaa

SEQ ID NO: 24129 - RNA, 4029 nt, Artificial Sequence
  SARS-CoV-2/Wuhan/WIV05/2019__EPI_ISL_402128 spike protein mRNA gc (1-1273)(H69del_V70del_D614G)
aggagaaagcuuaccauguucguguuccuggugcugcugccccuggugagcagccagugcgugaaccugaccacccggacccagcugcccccugccuacaccaacagcuucacccggggcguguacuaccccgacaagguguuccggagcagcgugcugcacagcacccaggaccuguuccugcccuucuucagcaacgugaccugguuccacgccaucagcggcaccaacggcaccaagcgguucgacaacccagugcugcccuucaacgacggcguguacuucgccagcaccgagaagucaaacaucauccggggcuggaucuucggcaccacccuggacagcaagacacagagccugcugaucgugaacaacgccaccaacguggugaucaaggugugcgaguuucaguucugcaacgaccccuuccugggcguguacuaccacaagaacaacaagagcuggauggagagcgaguuccggguguacagcagcgcuaacaauugcaccuucgaguacgucagccagcccuuccugauggaccucgagggcaagcagggcaacuucaagaaccugcgggaguucguguucaagaacaucgauggcuacuucaagaucuacagcaagcacacccccaucaaccuggugcgggaccugccccagggauucagcgcccuggagccucugguggaccugcccaucggcaucaacaucaccagguuccagacccugcuggcccugcaccggagcuaccugacccccggcgacagcagcagcggcuggaccgccggcgccgccgcauacuacgugggcuaccugcagccacggaccuuccugcugaaguacaacgagaacggcaccaucaccgacgccguggacugcgcccuggacccccugagcgagaccaagugcacccuaaagagcuucaccguggagaagggcaucuaccagaccagcaacuuccgggugcagcccacugagagcaucgugcgguuccccaacauuaccaaccugugucccuucggcgagguguucaacgccacccgguucgccagcguguacgccuggaaccggaagcggaucagcaacugcguggccgacuacagcgugcuguacaacagcgccagcuucagcaccuucaagugcuacggcgugagcccuaccaagcugaacgaccugugcuucaccaacguguacgcugacagcuucgugauccggggcgacgaggugcggcagaucgcccccggccagaccggcaagaucgccgacuacaacuacaagcugcccgacgacuucaccggcugcgugaucgccuggaacagcaacaaccuggacagcaaggugggcggcaacuacaacuaccuguaccggcuguuccguaagagcaaccugaagccauucgagcgggacaucagcaccgagaucuaccaggccggcagcacccccugcaacgguguggagggcuuuaacugcuacuucccccugcagagcuacggcuuccagcccaccaacggcgugggcuaccagcccuaccgggugguggugcugagcuucgagcugcugcacgcccccgccaccgugugcggcccuaaaaagagcaccaaccuggugaagaacaagugcgugaacuucaauuucaacggccugaccggcaccggcgugcugaccgagagcaacaagaaguuccugcccuuccagcaguucggccgggauaucgccgacaccaccgacgcagugcgggacccccagacccuggagauccuggacaucaccccaugcagcuucggcggcgugagcgugaucacccccggcacaaacaccagcaaccaggucgccgugcuguaccagggagugaacugcaccgaggugcccguggccauccacgccgaccagcugacccccaccuggcggguguacagcaccggcagcaacguguuccagacccgggccggcugccugaucggcgccgagcacgugaacaacuccuacgagugcgacauccccaucggcgcuggcaucugcgccagcuaccagacccagaccaacagcccccggcgggcccggagcguggccagccagagcaucaucgccuacaccaugagcuuaggcgccgagaacagcguggccuacagcaacaacagcaucgcgaucccuaccaacuucaccaucagcgugaccaccgagauacugcccgugagcaugaccaagaccagcguggacuguaccauguacaucugcggcgacagcaccgagugcagcaaccugcugcugcaguacggcagcuucugcacccagcugaaccgggcccugaccggcaucgccguggagcaggacaagaacacccaagagguguucgcccaggugaagcagaucuacaagacucccccaaucaaggacuucggcggcuucaacuucagccagauccugcccgaccccagcaagcccagcaagcggagcuucaucgaggaccugcuguucaacaaggugacccuggccgacgccggcuucaucaagcaguacggcgacugccugggggauaucgccgcucgggaccugaucugcgcccagaaguucaacggccugaccgugcugcccccucugcugaccgacgagaugaucgcccaguacaccagcgcccugcuugccggcaccaucaccagcggcuggaccuucggcgccggcgcagcccugcagauccccuucgccaugcagauggccuaccgguucaacggcaucggcgugacccagaacgugcuguacgagaaccagaagcugaucgccaaccaguucaacagcgccaucggcaagauccaggacagccugagcagcaccgccagcgcccugggcaagcugcaggacguggugaaccagaacgcucaggcccugaacacccuggugaagcagcugagcagcaacuucggcgccaucagcucagugcugaaugacauccugagcaggcuggacaagguggaggccgaggugcagaucgaccggcugaucaccggccggcugcagagccugcagaccuacgugacccagcagcugauccgggccgccgagauccgggccagcgccaaccuggcagccaccaagaugagcgagugcgugcugggccagagcaagcggguggacuuuugcggcaagggcuaccaccugaugagcuucccccagagcgccccacacggcgugguguuccuccacgugacauacguccccgcccaggagaagaacuucaccaccgcccccgccauuugccacgacggcaaggcucacuucccccgggagggaguguucgugagcaacggcacccacugguucgugacccagcggaacuucuacgagccccagaucaucaccaccgacaacaccuucgugagcggcaacugcgacguggugaucggcaucgugaacaacaccguguacgacccccugcagccugagcuggacagcuucaaggaggagcuggacaaguacuucaagaaccacaccagccccgacguggaucugggcgacaucagcggcaucaacgccagcguggugaacauccagaaggagaucgaccggcugaacgagguggccaagaaccugaacgagagccugaucgaccugcaggagcugggcaaguacgagcaguacaucaaguggcccugguacaucuggcugggcuucaucgccggccugaucgccaucgugauggugaccaucaugcugugcugcaugaccagcugcuguagcugccugaagggcugcugcagcugcggcagcugcugcaaguucgacgaggacgacagcgagccagugcugaagggcgugaagcugcacuacaccugaggacuaguuauaagacugacuagcccgaugggccucccaacgggcccuccuccccuccuugcaccgagauuaaucaaaggcucuuuucagagccaccaaaaaaaaaaaaaaaaaaaaaaaaaaaaaaaaaaaaaaaaaaaaaaaaaaaaaaaaaaaaaaaaaaaaaaaaaaaaaaaaaaaaaaaaaaaaaaaaaaaaa

SEQ ID NO: 24130 - RNA, 4035 nt, Artificial Sequence
  SARS-CoV-2/Wuhan/WIV05/2019__EPI_ISL_402128 spike protein mRNA gc (1-1273)(Y453F_D614G)
aggagaaagcuuaccauguucguguuccuggugcugcugccccuggugagcagccagugcgugaaccugaccacccggacccagcugcccccugccuacaccaacagcuucacccggggcguguacuaccccgacaagguguuccggagcagcgugcugcacagcacccaggaccuguuccugcccuucuucagcaacgugaccugguuccacgccauccacgugagcggcaccaacggcaccaagcgguucgacaacccagugcugcccuucaacgacggcguguacuucgccagcaccgagaagucaaacaucauccggggcuggaucuucggcaccacccuggacagcaagacacagagccugcugaucgugaacaacgccaccaacguggugaucaaggugugcgaguuucaguucugcaacgaccccuuccugggcguguacuaccacaagaacaacaagagcuggauggagagcgaguuccgggucuacagcagcgcuaacaauugcaccuucgaguacgugagccagcccuuccugauggaccucgagggcaagcagggcaacuucaagaaccugcgggaguucguguucaagaacaucgauggcuacuucaagaucuacagcaagcacacccccaucaaccuggugcgggaccugccccagggauucagcgcccuggagccucugguggaccugcccaucggcaucaacaucaccagguuccagacccugcuggcccugcaccggagcuaccugacccccggcgacagcagcagcggcuggaccgccggcgccgccgcauacuacgugggcuaccugcagccacggaccuuccugcugaaguacaacgagaacggcaccaucaccgacgccguggacugcgcccuggacccccugagcgagaccaagugcacccuaaagagcuucaccguggagaagggcaucuaccagaccagcaacuuccgggugcagcccacugagagcaucgugcgguuccccaacauuaccaaccugugucccuucggcgagguguucaacgccacccgguucgccagcguguacgccuggaaccggaagcggaucagcaacugcguggccgacuacagcgugcuguacaacagcgccagcuucagcaccuucaagugcuacggcgugagcccuaccaagcugaacgaccugugcuucaccaacguguacgcugacagcuucgugauccggggcgacgaggugcggcagaucgcccccggccagaccggcaagaucgccgacuacaacuacaagcugcccgacgacuucaccggcugcgugaucgccuggaacagcaacaaccuggacagcaaggugggcggcaacuacaacuaccuguuccggcuguuccguaagagcaaccugaagccauuugagcgggacaucagcaccgagaucuaccaggccggcagcacccccugcaacgguguggagggcuucaacugcuacuucccccugcagagcuacggcuuccagcccaccaacggcgugggcuaccagcccuaccgggugguggugcugagcuucgagcugcugcacgcccccgccaccgugugcggcccuaaaaagagcaccaaccuggugaagaacaagugcgugaacuucaauuucaacggccugaccggcaccggcgugcugaccgagagcaacaagaaguuccugcccuuccagcaguucggccgggauaucgccgacaccaccgacgcagugcgggacccccagacccuggagauccuggacaucaccccaugcagcuucggcggcgugagcgucaucacccccggcacaaacaccagcaaccagguggccgugcuguaccagggagugaacugcaccgaggugcccguggccauccacgccgaccagcugacccccaccuggcggguguacagcaccggcagcaacguguuccagacccgggccggcugccugaucggcgccgagcacgugaacaacuccuacgagugcgacauccccaucggcgcuggcaucugcgccagcuaccagacccagaccaacagcccccggcgggcccggagcguggccagccagagcaucaucgccuacaccaugagcuuaggcgccgagaacagcguggccuacagcaacaacagcaucgcgaucccuaccaacuucaccaucagcgugaccaccgagauacugcccgugagcaugaccaagaccagcguggacuguaccauguacaucugcggcgacagcaccgagugcagcaaccugcugcugcaguacggcagcuucugcacccagcugaaccgggcccugaccggcaucgccguggagcaggacaagaacacccaagagguguucgcccaggugaagcagaucuacaagacucccccaaucaaggacuucggcggcuucaacuucagccagauccugcccgaccccagcaagcccagcaagcggagcuucaucgaggaccugcuguucaacaaggugacccuggccgacgccggcuucaucaagcaguacggcgacugccugggggauaucgccgcucgggaccugaucugcgcccagaaguucaacggccugaccgugcugcccccucugcugaccgacgagaugaucgcccaguacaccagcgcccugcuugccggcaccaucaccagcggcuggaccuucggcgccggcgcagcccugcagauccccuucgccaugcagauggccuaccgguucaacggcaucggcgugacccagaacgugcuguacgagaaccagaagcugaucgccaaccaguucaacagcgccaucggcaagauccaggacagccugagcagcaccgccagcgcccugggcaagcugcaggacguggugaaccagaacgcucaggcccugaacacccuggugaagcagcugagcagcaacuuuggcgccaucagcucagugcugaaugacauccugagcaggcuggacaagguggaggccgaggugcagaucgaccggcugaucaccggccggcugcagagccugcagaccuacgugacccagcagcugauccgggccgccgagauccgggccagcgccaaccuggcagccaccaagaugagcgagugcgugcugggccagagcaagcggguggacuucugcggcaagggcuaccaccugaugagcuucccccagagcgccccacacggcgugguguuccuccacgucacauacgugcccgcccaggagaagaacuucaccaccgcccccgccauuugccacgacggcaaggcucacuucccccgggagggaguguucgugagcaacggcacccacugguucgugacccagcggaacuucuacgagccccagaucaucaccaccgacaacaccuucgugagcggcaacugcgacguggugaucggcaucgugaacaacaccguguacgacccccugcagccugagcuggacagcuucaaggaggagcuggacaaguacuucaagaaccacaccagccccgacguggaucugggcgacaucagcggcaucaacgccagcguggugaacauccagaaggagaucgaccggcugaacgagguggccaagaaccugaacgagagccugaucgaccugcaggagcugggcaaguacgagcaguacaucaaguggcccugguacaucuggcugggcuucaucgccggccugaucgccaucgugauggugaccaucaugcugugcugcaugaccagcugcuguagcugccugaagggcugcugcagcugcggcagcugcugcaaguucgacgaggacgacagcgagccagugcugaagggcgugaagcugcacuacaccugaggacuaguuauaagacugacuagcccgaugggccucccaacgggcccuccuccccuccuugcaccgagauuaaucaaaggcucuuuucagagccaccaaaaaaaaaaaaaaaaaaaaaaaaaaaaaaaaaaaaaaaaaaaaaaaaaaaaaaaaaaaaaaaaaaaaaaaaaaaaaaaaaaaaaaaaaaaaaaaaaaaaa

SEQ ID NO: 24131 - RNA, 4035 nt, Artificial Sequence
  SARS-CoV-2/Wuhan/WIV05/2019__EPI_ISL_402128 spike protein mRNA gc (1-1273)(D614G_I692V)
aggagaaagcuuaccauguucguguuccuggugcugcugccccuggugagcagccagugcgugaaccugaccacccggacccagcugcccccugccuacaccaacagcuucacccggggcguguacuaccccgacaagguguuccggagcagcgugcugcacagcacccaggaccuguuccugcccuucuucagcaacgugaccugguuccacgccauccacgugagcggcaccaacggcaccaagcgguucgacaacccagugcugcccuucaacgacggcguguacuucgccagcaccgagaagucaaacaucauccggggcuggaucuucggcaccacccuggacagcaagacacagagccugcugaucgugaacaacgccaccaacguggugaucaaggugugcgaguuucaguucugcaacgaccccuuccugggcguguacuaccacaagaacaacaagagcuggauggagagcgaguuccgggucuacagcagcgcuaacaauugcaccuucgaguacgugagccagcccuuccugauggaccucgagggcaagcagggcaacuucaagaaccugcgggaguucguguucaagaacaucgauggcuacuucaagaucuacagcaagcacacccccaucaaccuggugcgggaccugccccagggauucagcgcccuggagccucugguggaccugcccaucggcaucaacaucaccagguuccagacccugcuggcccugcaccggagcuaccugacccccggcgacagcagcagcggcuggaccgccggcgccgccgcauacuacgugggcuaccugcagccacggaccuuccugcugaaguacaacgagaacggcaccaucaccgacgccguggacugcgcccuggacccccugagcgagaccaagugcacccuaaagagcuucaccguggagaagggcaucuaccagaccagcaacuuccgggugcagcccacugagagcaucgugcgguuccccaacauuaccaaccugugucccuucggcgagguguucaacgccacccgguucgccagcguguacgccuggaaccggaagcggaucagcaacugcguggccgacuacagcgugcuguacaacagcgccagcuucagcaccuucaagugcuacggcgugagcccuaccaagcugaacgaccugugcuucaccaacguguacgcugacagcuucgugauccggggcgacgaggugcggcagaucgcccccggccagaccggcaagaucgccgacuacaacuacaagcugcccgacgacuucaccggcugcgugaucgccuggaacagcaacaaccuggacagcaaggugggcggcaacuacaacuaccuguaccggcuguuccguaagagcaaccugaagccauucgagcgggacaucagcaccgagaucuaccaggccggcagcacccccugcaacgguguggagggcuuuaacugcuacuucccccugcagagcuacggcuuccagcccaccaacggcgugggcuaccagcccuaccgggugguggugcugagcuucgagcugcugcacgcccccgccaccgugugcggcccuaaaaagagcaccaaccuggugaagaacaagugcgugaacuucaauuucaacggccugaccggcaccggcgugcugaccgagagcaacaagaaguuccugcccuuccagcaguucggccgggauaucgccgacaccaccgacgcagugcgggacccccagacccuggagauccuggacaucaccccaugcagcuucggcggcgugagcgucaucacccccggcacaaacaccagcaaccagguggccgugcuguaccagggagugaacugcaccgaggugcccguggccauccacgccgaccagcugacccccaccuggcggguguacagcaccggcagcaacguguuccagacccgggccggcugccugaucggcgccgagcacgugaacaacuccuacgagugcgacauccccaucggcgcuggcaucugcgccagcuaccagacccagaccaacagcccccggcgggcccggagcguggccagccagagcgugaucgccuacaccaugagcuuaggcgccgagaacagcguggccuacagcaacaacagcaucgcgaucccuaccaacuucaccaucagcgugaccaccgagauccugcccgugagcaugaccaagaccagcguggacuguaccauguacauaugcggcgacagcaccgagugcagcaaccugcugcugcaguacggcagcuucugcacccagcugaaccgggcccugaccggcaucgccguggagcaggacaagaacacccaagagguguucgcccaggugaagcagaucuacaagacucccccaaucaaggacuucggcggcuucaacuucagccagauccugcccgaccccagcaagcccagcaagcggagcuucaucgaggaccugcuguucaacaaggugacccuggccgacgccggcuucaucaagcaguacggcgacugccugggggauaucgccgcucgggaccugaucugcgcccagaaguucaacggccugaccgugcugcccccucugcugaccgacgagaugaucgcccaguacaccagcgcccugcuugccggcaccaucaccagcggcuggaccuucggcgccggcgcagcccugcagauccccuucgccaugcagauggccuaccgguucaacggcaucggcgugacccagaacgugcuguacgagaaccagaagcugaucgccaaccaguucaacagcgccaucggcaagauccaggacagccugagcagcaccgccagcgcccugggcaagcugcaggacguggugaaccagaacgcucaggcccugaacacccuggugaagcagcugagcagcaacuucggcgccaucagcucagugcugaaugacauccugagcaggcuggacaagguggaggccgaggugcagaucgaccggcugaucaccggccggcugcagagccugcagaccuacgugacccagcagcugauccgggccgccgagauccgggccagcgccaaccuggcagccaccaagaugagcgagugcgugcugggccagagcaagcggguggacuuuugcggcaagggcuaccaccugaugagcuucccccagagcgccccacacggcguggucuuccuccacgugacauacgugcccgcccaggagaagaacuucaccaccgcccccgccaucugccacgacggcaaggcucacuucccccgggagggaguguucgugagcaacggcacccacugguucgugacccagcggaacuucuacgagccccagauuaucaccaccgacaacaccuucgugagcggcaacugcgacguggugaucggcaucgugaacaacaccguguacgacccccugcagccugagcuggacagcuucaaggaggagcuggacaaguacuucaagaaccacaccagccccgacguggaucugggcgacaucagcggcaucaacgccagcguggugaacauccagaaggagaucgaccggcugaacgagguggccaagaaccugaacgagagccugaucgaccugcaggagcugggcaaguacgagcaguacaucaaguggcccugguacaucuggcugggcuucaucgccggccugaucgccaucgugauggugaccaucaugcugugcugcaugaccagcugcuguagcugccugaagggcugcugcagcugcggcagcugcugcaaguucgacgaggacgacagcgagccagugcugaagggcgugaagcugcacuacaccugaggacuaguuauaagacugacuagcccgaugggccucccaacgggcccuccuccccuccuugcaccgagauuaaucaaaggcucuuuucagagccaccaaaaaaaaaaaaaaaaaaaaaaaaaaaaaaaaaaaaaaaaaaaaaaaaaaaaaaaaaaaaaaaaaaaaaaaaaaaaaaaaaaaaaaaaaaaaaaaaaaaaa

SEQ ID NO: 24132 - RNA, 4035 nt, Artificial Sequence
  SARS-CoV-2/Wuhan/WIV05/2019__EPI_ISL_402128 spike protein mRNA gc (1-1273)(D614G_M1229I)
aggagaaagcuuaccauguucguguuccuggugcugcugccccuggugagcagccagugcgugaaccugaccacccggacccagcugcccccugccuacaccaacagcuucacccggggcguguacuaccccgacaagguguuccggagcagcgugcugcacagcacccaggaccuguuccugcccuucuucagcaacgugaccugguuccacgccauccacgugagcggcaccaacggcaccaagcgguucgacaacccagugcugcccuucaacgacggcguguacuucgccagcaccgagaagucaaacaucauccggggcuggaucuucggcaccacccuggacagcaagacacagagccugcugaucgugaacaacgccaccaacguggugaucaaggugugcgaguuucaguucugcaacgaccccuuccugggcguguacuaccacaagaacaacaagagcuggauggagagcgaguuccgggucuacagcagcgcuaacaauugcaccuucgaguacgugagccagcccuuccugauggaccucgagggcaagcagggcaacuucaagaaccugcgggaguucguguucaagaacaucgauggcuacuucaagaucuacagcaagcacacccccaucaaccuggugcgggaccugccccagggauucagcgcccuggagccucugguggaccugcccaucggcaucaacaucaccagguuccagacccugcuggcccugcaccggagcuaccugacccccggcgacagcagcagcggcuggaccgccggcgccgccgcauacuacgugggcuaccugcagccacggaccuuccugcugaaguacaacgagaacggcaccaucaccgacgccguggacugcgcccuggacccccugagcgagaccaagugcacccuaaagagcuucaccguggagaagggcaucuaccagaccagcaacuuccgggugcagcccacugagagcaucgugcgguuccccaacauuaccaaccugugucccuucggcgagguguucaacgccacccgguucgccagcguguacgccuggaaccggaagcggaucagcaacugcguggccgacuacagcgugcuguacaacagcgccagcuucagcaccuucaagugcuacggcgugagcccuaccaagcugaacgaccugugcuucaccaacguguacgcugacagcuucgugauccggggcgacgaggugcggcagaucgcccccggccagaccggcaagaucgccgacuacaacuacaagcugcccgacgacuucaccggcugcgugaucgccuggaacagcaacaaccuggacagcaaggugggcggcaacuacaacuaccuguaccggcuguuccguaagagcaaccugaagccauucgagcgggacaucagcaccgagaucuaccaggccggcagcacccccugcaacgguguggagggcuuuaacugcuacuucccccugcagagcuacggcuuccagcccaccaacggcgugggcuaccagcccuaccgggugguggugcugagcuucgagcugcugcacgcccccgccaccgugugcggcccuaaaaagagcaccaaccuggugaagaacaagugcgugaacuucaauuucaacggccugaccggcaccggcgugcugaccgagagcaacaagaaguuccugcccuuccagcaguucggccgggauaucgccgacaccaccgacgcagugcgggacccccagacccuggagauccuggacaucaccccaugcagcuucggcggcgugagcgucaucacccccggcacaaacaccagcaaccagguggccgugcuguaccagggagugaacugcaccgaggugcccguggccauccacgccgaccagcugacccccaccuggcggguguacagcaccggcagcaacguguuccagacccgggccggcugccugaucggcgccgagcacgugaacaacuccuacgagugcgacauccccaucggcgcuggcaucugcgccagcuaccagacccagaccaacagcccccggcgggcccggagcguggccagccagagcaucaucgccuacaccaugagcuuaggcgccgagaacagcguggccuacagcaacaacagcaucgcgaucccuaccaacuucaccaucagcgugaccaccgagauacugcccgugagcaugaccaagaccagcguggacuguaccauguacaucugcggcgacagcaccgagugcagcaaccugcugcugcaguacggcagcuucugcacccagcugaaccgggcccugaccggcaucgccguggagcaggacaagaacacccaagagguguucgcccaggugaagcagaucuacaagacucccccaaucaaggacuucggcggcuucaacuucagccagauccugcccgaccccagcaagcccagcaagcggagcuucaucgaggaccugcuguucaacaaggugacccuggccgacgccggcuucaucaagcaguacggcgacugccugggggauaucgccgcucgggaccugaucugcgcccagaaguucaacggccugaccgugcugcccccucugcugaccgacgagaugaucgcccaguacaccagcgcccugcuugccggcaccaucaccagcggcuggaccuucggcgccggcgcagcccugcagauccccuucgccaugcagauggccuaccgguucaacggcaucggcgugacccagaacgugcuguacgagaaccagaagcugaucgccaaccaguucaacagcgccaucggcaagauccaggacagccugagcagcaccgccagcgcccugggcaagcugcaggacguggugaaccagaacgcucaggcccugaacacccuggugaagcagcugagcagcaacuucggcgccaucagcucagugcugaaugacauccugagcaggcuggacaagguggaggccgaggugcagaucgaccggcugaucaccggccggcugcagagccugcagaccuacgugacccagcagcugauccgggccgccgagauccgggccagcgccaaccuggcagccaccaagaugagcgagugcgugcugggccagagcaagcggguggacuuuugcggcaagggcuaccaccugaugagcuucccccagagcgccccacacggcgugguguuccuccacgucacauacgugcccgcccaggagaagaacuucaccaccgcccccgccauuugccacgacggcaaggcucacuucccccgggagggaguguucgugagcaacggcacccacugguucgugacccagcggaacuucuacgagccccagaucaucaccaccgacaacaccuucgugagcggcaacugcgacguggugaucggcaucgugaacaacaccguguacgacccccugcagccugagcuggacagcuucaaggaggagcuggacaaguacuucaagaaccacaccagccccgacguggaucugggcgacaucagcggcaucaacgccagcguggugaacauccagaaggagaucgaccggcugaacgagguggccaagaaccugaacgagagccugaucgaccugcaggagcugggcaaguacgagcaguacaucaaguggcccugguacaucuggcugggcuucaucgccggccugaucgccaucgugaucgugaccaucaugcugugcugcaugaccagcugcuguagcugccugaagggcugcugcagcugcggcagcugcugcaaguucgacgaggacgacagcgagccagugcugaagggcgugaagcugcacuacaccugaggacuaguuauaagacugacuagcccgaugggccucccaacgggcccuccuccccuccuugcaccgagauuaaucaaaggcucuuuucagagccaccaaaaaaaaaaaaaaaaaaaaaaaaaaaaaaaaaaaaaaaaaaaaaaaaaaaaaaaaaaaaaaaaaaaaaaaaaaaaaaaaaaaaaaaaaaaaaaaaaaaaa

SEQ ID NO: 24133 - RNA, 4029 nt, Artificial Sequence
  SARS-CoV-2/Wuhan/WIV05/2019__EPI_ISL_402128 spike protein mRNA gc (1-1273)(H69del_V70del_A222V_Y453F_S477N_D614G_I692V)
aggagaaagcuuaccauguucguguuccuggugcugcugccccuggugagcagccagugcgugaaccugaccacccggacccagcugcccccugccuacaccaacagcuucacccggggcguguacuaccccgacaagguguuccggagcagcgugcugcacagcacccaggaccuguuccugcccuucuucagcaacgugaccugguuccacgccaucagcggcaccaacggcaccaagcgguucgacaacccagugcugcccuucaacgacggcguguacuucgccagcaccgagaagucaaacaucauccggggcuggaucuucggcaccacccuggacagcaagacacagagccugcugaucgugaacaacgccaccaacguggugaucaaggugugcgaguuucaguucugcaacgaccccuuccugggcguguacuaccacaagaacaacaagagcuggauggagagcgaguuccggguguacagcagcgcuaacaauugcaccuucgaguacgucagccagcccuuccugauggaccucgagggcaagcagggcaacuucaagaaccugcgggaguucguguucaagaacaucgauggcuacuucaagaucuacagcaagcacacccccaucaaccuggugcgggaccugccccagggauucagcgugcuggagccucugguggaccugcccaucggcaucaacaucaccagguuccagacccugcuggcccugcaccggagcuaccugacccccggcgacagcagcagcggcuggaccgccggcgccgccgccuacuacgugggcuaccugcagccacggaccuuccugcugaaguacaacgagaacggcaccaucaccgacgcaguggacugcgcccuggacccccugagcgagaccaagugcacccuaaagagcuucaccguggagaagggcaucuaccagaccagcaacuuccgggugcagcccacugagagcaucgugcgguuccccaacauuaccaaccugugucccuucggcgagguguucaacgccacccgguucgccagcguguacgccuggaaccggaagcggaucagcaacugcguggccgacuacagcgugcuguacaacagcgccagcuucagcaccuucaagugcuacggcgugagcccuaccaagcugaacgaccugugcuucaccaacguguacgccgacagcuucgugauccggggcgacgaggugcggcagaucgcucccggccagaccggcaagaucgccgacuacaacuacaagcugcccgacgacuucaccggcugcgugaucgccuggaacagcaacaaccuggacagcaaggugggcggcaacuacaacuaccuguuccggcuguuccguaagagcaaccugaagccauuugagcgggacaucagcaccgagaucuaccaggccggcaacacccccugcaacgguguggagggcuucaacugcuacuucccccugcagagcuacggcuuccagcccaccaacggcgugggcuaccagcccuaccgggugguggugcugagcuucgagcugcugcacgcccccgccaccgugugcggcccuaaaaagagcaccaaccuggugaagaacaagugcgugaauuucaacuucaacggccugaccggcaccggcgugcugaccgagagcaacaagaaguuccugcccuuccagcaguucggccgggauaucgccgacaccaccgacgccgugcgggacccccagacccuggagauccuggacaucaccccaugcagcuucggcggcgugagcgucaucacccccggcacaaacaccagcaaccagguggcagugcuguaccagggagugaacugcaccgaggugcccguggccauccacgccgaccagcugacccccaccuggcggguguacagcaccggcagcaacguguuccagacccgggccggcugccugaucggcgccgagcacgugaacaacagcuacgagugcgacauccccaucggcgccggcaucugcgcuuccuaccagacccagaccaacagcccccggcgggcccggagcguggccagccagagcgugaucgccuacaccaugagcuuaggcgccgagaacagcguggccuacagcaacaacagcaucgccaucccuaccaacuucaccaucagcgugaccaccgagauccugcccgugagcaugaccaagaccagcguggacuguaccauguacauaugcggcgacagcaccgagugcagcaaccugcugcugcaguacggcagcuucugcacccagcugaaccgggcgcugaccggcaucgccguggagcaggacaagaacacccaagagguguucgcccaggugaagcagaucuacaagacucccccaaucaaggacuucggcggcuucaacuucagccagauccugcccgaccccagcaagcccagcaagcggagcuucaucgaggaccugcuguucaacaaggugacccuggccgacgccggcuucaucaagcaguacggcgacugccugggggauaucgccgcccgggaccugaucugcgcucagaaguucaacggccugaccgugcugcccccucugcugaccgacgagaugaucgcccaguacaccagcgcccugcuugccggcaccaucaccagcggcuggaccuucggcgccggcgccgcacugcagauccccuucgccaugcagauggccuaccgguucaacggcaucggcgugacccagaacgugcuguacgagaaccagaagcugaucgccaaccaguucaacagcgccaucggcaagauccaggacagccugagcagcaccgccagcgcccugggcaagcugcaggacguggugaaccagaacgcccaggcucugaacacccuggugaagcagcugagcagcaauuuuggcgccaucagcagcgugcugaacgacauccugucaaggcuggacaagguggaggccgaggugcagaucgaccggcugaucaccggccggcugcagagccugcagaccuacgugacccagcagcugauccgggccgccgagauccgggccagcgccaaccuggccgcaaccaagaugagcgagugcgugcugggccagagcaagcggguggacuucugcggcaagggcuaccaccugaugagcuucccccagagcgccccacacggcguggucuuccuccacgugacauacgugcccgcccaggagaagaacuucaccaccgcccccgccaucugccacgacggcaaggcccacuucccccgggagggaguguucgugagcaacggcacccacugguucgugacccagcggaacuucuacgagccccagauuaucaccaccgacaacaccuucgugagcggcaacugcgacguggugaucggcaucgugaacaacaccguguacgacccccugcagccugagcuggacagcuucaaggaggagcuggacaaguacuucaagaaccacaccagccccgacguggaucugggcgacaucagcggcaucaacgcuagcguggugaacauccagaaggagaucgaccggcugaacgagguggccaagaaccugaacgagagccugaucgaccugcaggagcugggcaaguacgagcaguacaucaaguggcccugguacaucuggcugggcuucaucgccggccugaucgccaucgugauggugaccaucaugcugugcugcaugaccagcugcuguagcugccugaagggcugcugcagcugcggcagcugcugcaaguucgacgaggacgacagcgagccagugcugaagggcgugaagcugcacuacaccugaggacuaguuauaagacugacuagcccgaugggccucccaacgggcccuccuccccuccuugcaccgagauuaaucaaaggcucuuuucagagccaccaaaaaaaaaaaaaaaaaaaaaaaaaaaaaaaaaaaaaaaaaaaaaaaaaaaaaaaaaaaaaaaaaaaaaaaaaaaaaaaaaaaaaaaaaaaaaaaaaaaaa

SEQ ID NO: 24134 - RNA, 4029 nt, Artificial Sequence
  SARS-CoV-2/Wuhan/WIV05/2019__EPI_ISL_402128 spike protein mRNA gc (1-1273)(H69del_V70del_Y453F_D614G_I692V_M1229I)
aggagaaagcuuaccauguucguguuccuggugcugcugccccuggugagcagccagugcgugaaccugaccacccggacccagcugcccccugccuacaccaacagcuucacccggggcguguacuaccccgacaagguguuccggagcagcgugcugcacagcacccaggaccuguuccugcccuucuucagcaacgugaccugguuccacgccaucagcggcaccaacggcaccaagcgguucgacaacccagugcugcccuucaacgacggcguguacuucgccagcaccgagaagucaaacaucauccggggcuggaucuucggcaccacccuggacagcaagacacagagccugcugaucgugaacaacgccaccaacguggugaucaaggugugcgaguuucaguucugcaacgaccccuuccugggcguguacuaccacaagaacaacaagagcuggauggagagcgaguuccggguguacagcagcgcuaacaauugcaccuucgaguacgucagccagcccuuccugauggaccucgagggcaagcagggcaacuucaagaaccugcgggaguucguguucaagaacaucgauggcuacuucaagaucuacagcaagcacacccccaucaaccuggugcgggaccugccccagggauucagcgcccuggagccucugguggaccugcccaucggcaucaacaucaccagguuccagacccugcuggcccugcaccggagcuaccugacccccggcgacagcagcagcggcuggaccgccggcgccgccgcauacuacgugggcuaccugcagccacggaccuuccugcugaaguacaacgagaacggcaccaucaccgacgccguggacugcgcccuggacccccugagcgagaccaagugcacccuaaagagcuucaccguggagaagggcaucuaccagaccagcaacuuccgggugcagcccacugagagcaucgugcgguuccccaacauuaccaaccugugucccuucggcgagguguucaacgccacccgguucgccagcguguacgccuggaaccggaagcggaucagcaacugcguggccgacuacagcgugcuguacaacagcgccagcuucagcaccuucaagugcuacggcgugagcccuaccaagcugaacgaccugugcuucaccaacguguacgcugacagcuucgugauccggggcgacgaggugcggcagaucgcccccggccagaccggcaagaucgccgacuacaacuacaagcugcccgacgacuucaccggcugcgugaucgccuggaacagcaacaaccuggacagcaaggugggcggcaacuacaacuaccuguuccggcuguuccguaagagcaaccugaagccauuugagcgggacaucagcaccgagaucuaccaggccggcagcacccccugcaacgguguggagggcuucaacugcuacuucccccugcagagcuacggcuuccagcccaccaacggcgugggcuaccagcccuaccgggugguggugcugagcuucgagcugcugcacgcccccgccaccgugugcggcccuaaaaagagcaccaaccuggugaagaacaagugcgugaacuucaauuucaacggccugaccggcaccggcgugcugaccgagagcaacaagaaguuccugcccuuccagcaguucggccgggauaucgccgacaccaccgacgcagugcgggacccccagacccuggagauccuggacaucaccccaugcagcuucggcggcgugagcgugaucacccccggcacaaacaccagcaaccaggucgccgugcuguaccagggagugaacugcaccgaggugcccguggccauccacgccgaccagcugacccccaccuggcggguguacagcaccggcagcaacguguuccagacccgggccggcugccugaucggcgccgagcacgugaacaacuccuacgagugcgacauccccaucggcgcuggcaucugcgccagcuaccagacccagaccaacagcccccggcgggcccggagcguggccagccagagcgugaucgccuacaccaugagcuuaggcgccgagaacagcguggccuacagcaacaacagcaucgcgaucccuaccaacuucaccaucagcgugaccaccgagauccugcccgugagcaugaccaagaccagcguggacuguaccauguacauaugcggcgacagcaccgagugcagcaaccugcugcugcaguacggcagcuucugcacccagcugaaccgggcccugaccggcaucgccguggagcaggacaagaacacccaagagguguucgcccaggugaagcagaucuacaagacucccccaaucaaggacuucggcggcuucaacuucagccagauccugcccgaccccagcaagcccagcaagcggagcuucaucgaggaccugcuguucaacaaggugacccuggccgacgccggcuucaucaagcaguacggcgacugccugggggauaucgccgcucgggaccugaucugcgcccagaaguucaacggccugaccgugcugcccccucugcugaccgacgagaugaucgcccaguacaccagcgcccugcuugccggcaccaucaccagcggcuggaccuucggcgccggcgcagcccugcagauccccuucgccaugcagauggccuaccgguucaacggcaucggcgugacccagaacgugcuguacgagaaccagaagcugaucgccaaccaguucaacagcgccaucggcaagauccaggacagccugagcagcaccgccagcgcccugggcaagcugcaggacguggugaaccagaacgcucaggcccugaacacccuggugaagcagcugagcagcaacuuuggcgccaucagcucagugcugaaugacauccugagcaggcuggacaagguggaggccgaggugcagaucgaccggcugaucaccggccggcugcagagccugcagaccuacgugacccagcagcugauccgggccgccgagauccgggccagcgccaaccuggcagccaccaagaugagcgagugcgugcugggccagagcaagcggguggacuucugcggcaagggcuaccaccugaugagcuucccccagagcgccccacacggcgugguguuccuccacgucacauacgugcccgcccaggagaagaacuucaccaccgcccccgccaucugccacgacggcaaggcucacuucccccgggagggaguguucgugagcaacggcacccacugguucgugacccagcggaacuucuacgagccccagauuaucaccaccgacaacaccuucgugagcggcaacugcgacguggugaucggcaucgugaacaacaccguguacgacccccugcagccugagcuggacagcuucaaggaggagcuggacaaguacuucaagaaccacaccagccccgacguggaucugggcgacaucagcggcaucaacgccagcguggugaacauccagaaggagaucgaccggcugaacgagguggccaagaaccugaacgagagccugaucgaccugcaggagcugggcaaguacgagcaguacaucaaguggcccugguacaucuggcugggcuucaucgccggccugaucgccaucgugaucgugaccaucaugcugugcugcaugaccagcugcuguagcugccugaagggcugcugcagcugcggcagcugcugcaaguucgacgaggacgacagcgagccagugcugaagggcgugaagcugcacuacaccugaggacuaguuauaagacugacuagcccgaugggccucccaacgggcccuccuccccuccuugcaccgagauuaaucaaaggcucuuuucagagccaccaaaaaaaaaaaaaaaaaaaaaaaaaaaaaaaaaaaaaaaaaaaaaaaaaaaaaaaaaaaaaaaaaaaaaaaaaaaaaaaaaaaaaaaaaaaaaaaaaaaaa

SEQ ID NO: 24135 - RNA, 4026 nt, Artificial Sequence
  SARS-CoV-2/Wuhan/WIV05/2019__EPI_ISL_402128 spike protein mRNA gc (1-1273)(H69del_V70del_Y144del_N501Y_A570D_D614G_P681H_T716I_S982 A_D1118H)
aggagaaagcuuaccauguucguguuccuggugcugcugccccuggugagcagccagugcgugaaccugaccacccggacccagcugcccccugccuacaccaacagcuucacccggggcguguacuaccccgacaagguguuccggagcagcgugcugcacagcacccaggaccuguuccugcccuucuucagcaacgugaccugguuccacgccaucagcggcaccaacggcaccaagcgguucgacaacccagugcugcccuucaacgacggcguguacuucgccagcaccgagaagucaaacaucauccggggcuggaucuucggcaccacccuggacagcaagacacagagccugcugaucgugaacaacgccaccaacguggugaucaaggugugcgaguuucaguucugcaacgaccccuuccugggcguguaccacaagaacaacaagagcuggauggagagcgaguuccggguguacagcagcgcuaacaauugcaccuucgaguacgucagccagcccuuccugauggaccucgagggcaagcagggcaacuucaagaaccugcgggaguucguguucaagaacaucgauggcuacuucaagaucuacagcaagcacacccccaucaaccuggugcgggaccugccccagggauucagcgcccuggagccucugguggaccugcccaucggcaucaacaucaccagguuccagacccugcuggcccugcaccggagcuaccugacccccggcgacagcagcagcggcuggaccgccggcgccgccgcauacuacgugggcuaccugcagccacggaccuuccugcugaaguacaacgagaacggcaccaucaccgacgccguggacugcgcccuggacccccugagcgagaccaagugcacccuaaagagcuucaccguggagaagggcaucuaccagaccagcaacuuccgggugcagcccacugagagcaucgugcgguuccccaacauuaccaaccugugucccuucggcgagguguucaacgccacccgguucgccagcguguacgccuggaaccggaagcggaucagcaacugcguggccgacuacagcgugcuguacaacagcgccagcuucagcaccuucaagugcuacggcgugagcccuaccaagcugaacgaccugugcuucaccaacguguacgcugacagcuucgugauccggggcgacgaggugcggcagaucgcccccggccagaccggcaagaucgccgacuacaacuacaagcugcccgacgacuucaccggcugcgugaucgccuggaacagcaacaaccuggacagcaaggugggcggcaacuacaacuaccuguaccggcuguuccguaagagcaaccugaagccauucgagcgggacaucagcaccgagaucuaccaggccggcagcacccccugcaacgguguggagggcuuuaacugcuacuucccccugcagagcuacggcuuccagcccaccuacggcgugggcuaccagcccuaccgggugguggugcugagcuucgagcugcugcacgcccccgccaccgugugcggcccuaaaaagagcaccaaccuggugaagaacaagugcgugaacuucaacuucaauggccugaccggcaccggcgugcugaccgagagcaacaagaaguuccugcccuuccagcaguucggccgggauaucgacgacaccaccgacgccgugcgggacccccagacccuggagauccuggacaucaccccaugcagcuucggcggcgugagcgugaucacccccggcacaaacaccagcaaccaggucgcagugcuguaccagggagugaacugcaccgaggugcccguggccauccacgccgaccagcugacccccaccuggcggguguacagcaccggcagcaacguguuccagacccgggccggcugccugaucggcgccgagcacgugaacaacuccuacgagugcgacauccccaucggcgccggcaucugcgcuagcuaccagacccagaccaacagccaccggcgggcccggagcguggccagccagagcaucaucgccuacaccaugagcuuaggcgccgagaacagcguggccuacagcaacaacagcaucgccauccccaucaacuucaccauaagcgugaccaccgagauccugccugugagcaugaccaagaccagcguggacuguaccauguacaucugcggcgacagcaccgagugcagcaaccugcugcugcaguacggcagcuucugcacccagcugaaccgggcgcugaccggcaucgccguggagcaggacaagaacacccaagagguguucgcccaggugaagcagaucuacaagaccccacccaucaaggacuucggcggcuucaacuucagccagauccugcccgaccccagcaagcccagcaagcggagcuucaucgaggaccugcuguucaacaaggugacucuggccgacgccggcuucaucaagcaguacggcgauugccugggggacaucgccgcccgggaccugaucugcgcucagaaguucaacggccugaccgugcugccuccccugcugaccgacgagaugaucgcccaguacaccagcgcccugcuugccggcaccaucaccagcggcuggaccuucggcgccggcgccgcacugcagauccccuucgccaugcagauggccuaccgguucaacggcaucggcgugacccagaacgugcuguacgagaaccagaagcugaucgccaaccaguucaacagcgccaucggcaagauccaggacagccugagcagcaccgccagcgcccugggcaagcugcaggacguggugaaccagaacgcccaggcucugaacacccuggugaagcagcugagcagcaacuucggcgccaucagcucagugcugaacgacauccuggccaggcuggacaagguggaggccgaggugcagaucgaccggcugaucaccggccggcugcagagccugcagaccuacgugacccagcagcugauccgggccgccgagauucgggccagcgccaaucuggcagccaccaagaugagcgagugcgugcugggccagagcaagcggguggacuuuugcggcaagggcuaccaccugaugagcuucccccagagcgcuccccacggcgugguguuccuccacgugaccuacgucccagcccaggagaagaacuucacaaccgcccccgccaucugccacgacggcaaggcccacuucccccgggagggaguguucgugagcaacggcacccacugguucgugacccagcggaacuucuacgagccccagaucaucaccacccacaacaccuucgugagcggcaacugcgacguggugaucggcaucgugaacaacaccguguacgacccccugcagcccgagcuggacagcuucaaggaggagcuggacaaguacuucaagaaccacaccagcccugacguggaucugggcgacaucagcggcaucaacgccagcguggugaacauccagaaggagaucgaccggcugaacgagguggccaagaaccugaacgagagccugaucgaccugcaggagcugggcaaguacgagcaguacaucaaguggcccugguacaucuggcugggcuucaucgccggccugaucgccaucgugauggugaccaucaugcugugcugcaugaccagcugcuguagcugccugaagggcugcugcagcugcggcagcugcugcaaguucgacgaggacgacagcgagcccgugcugaagggcgugaagcugcacuacaccugaggacuaguuauaagacugacuagcccgaugggccucccaacgggcccuccuccccuccuugcaccgagauuaaucaaaggcucuuuucagagccaccaaaaaaaaaaaaaaaaaaaaaaaaaaaaaaaaaaaaaaaaaaaaaaaaaaaaaaaaaaaaaaaaaaaaaaaaaaaaaaaaaaaaaaaaaaaaaaaaaaaaa

SEQ ID NO: 24136 - RNA, 4035 nt, Artificial Sequence
  SARS-CoV-2/Wuhan/WIV05/2019__EPI_ISL_402128 spike protein mRNA gc (1-1273)(K417N_E484K_N501Y_D614G)
aggagaaagcuuaccauguucguguuccuggugcugcugccccuggugagcagccagugcgugaaccugaccacccggacccagcugcccccugccuacaccaacagcuucacccggggcguguacuaccccgacaagguguuccggagcagcgugcugcacagcacccaggaccuguuccugcccuucuucagcaacgugaccugguuccacgccauccacgugagcggcaccaacggcaccaagcgguucgacaacccagugcugcccuucaacgacggcguguacuucgccagcaccgagaagucaaacaucauccggggcuggaucuucggcaccacccuggacagcaagacacagagccugcugaucgugaacaacgccaccaacguggugaucaaggugugcgaguuucaguucugcaacgaccccuuccugggcguguacuaccacaagaacaacaagagcuggauggagagcgaguuccgggucuacagcagcgcuaacaauugcaccuucgaguacgugagccagcccuuccugauggaccucgagggcaagcagggcaacuucaagaaccugcgggaguucguguucaagaacaucgauggcuacuucaagaucuacagcaagcacacccccaucaaccuggugcgggaccugccccagggauucagcgcccuggagccucugguggaccugcccaucggcaucaacaucaccagguuccagacccugcuggcccugcaccggagcuaccugacccccggcgacagcagcagcggcuggaccgccggcgccgccgcauacuacgugggcuaccugcagccacggaccuuccugcugaaguacaacgagaacggcaccaucaccgacgccguggacugcgcccuggacccccugagcgagaccaagugcacccuaaagagcuucaccguggagaagggcaucuaccagaccagcaacuuccgggugcagcccacugagagcaucgugcgguuccccaacauuaccaaccugugucccuucggcgagguguucaacgccacccgguucgccagcguguacgccuggaaccggaagcggaucagcaacugcguggccgacuacagcgugcuguacaacagcgccagcuucagcaccuucaagugcuacggcgugagcccuaccaagcugaacgaccugugcuucaccaacguguacgcugacagcuucgugauccggggcgacgaggugcggcagaucgcccccggccagaccggcaacaucgccgacuacaacuacaagcugcccgacgacuucaccggcugcgugaucgccuggaacagcaacaaccuggacagcaaggugggcggcaacuacaacuaccuguaccggcuguuccguaagagcaaccugaagccauucgagcgggacaucagcaccgagaucuaccaggccggcagcacccccugcaacggugugaagggcuuuaacugcuacuucccccugcagagcuacggcuuccagcccaccuacggcgugggcuaccagcccuaccgggugguggugcugagcuucgagcugcugcacgcccccgccaccgugugcggcccuaaaaagagcaccaaccuggugaagaacaagugcgugaacuucaauuucaacggccugaccggcaccggcgugcugaccgagagcaacaagaaguuccugcccuuccagcaguucggccgggauaucgccgacaccaccgacgcagugcgggacccccagacccuggagauccuggacaucaccccaugcagcuucggcggcgugagcgucaucacccccggcacaaacaccagcaaccagguggccgugcuguaccagggagugaacugcaccgaggugcccguggccauccacgccgaccagcugacccccaccuggcggguguacagcaccggcagcaacguguuccagacccgggccggcugccugaucggcgccgagcacgugaacaacuccuacgagugcgacauccccaucggcgcuggcaucugcgccagcuaccagacccagaccaacagcccccggcgggcccggagcguggccagccagagcaucaucgccuacaccaugagcuuaggcgccgagaacagcguggccuacagcaacaacagcaucgcgaucccuaccaacuucaccaucagcgugaccaccgagauacugcccgugagcaugaccaagaccagcguggacuguaccauguacaucugcggcgacagcaccgagugcagcaaccugcugcugcaguacggcagcuucugcacccagcugaaccgggcccugaccggcaucgccguggagcaggacaagaacacccaagagguguucgcccaggugaagcagaucuacaagacucccccaaucaaggacuucggcggcuucaacuucagccagauccugcccgaccccagcaagcccagcaagcggagcuucaucgaggaccugcuguucaacaaggugacccuggccgacgccggcuucaucaagcaguacggcgacugccugggggauaucgccgcucgggaccugaucugcgcccagaaguucaacggccugaccgugcugcccccucugcugaccgacgagaugaucgcccaguacaccagcgcccugcuugccggcaccaucaccagcggcuggaccuucggcgccggcgcagcccugcagauccccuucgccaugcagauggccuaccgguucaacggcaucggcgugacccagaacgugcuguacgagaaccagaagcugaucgccaaccaguucaacagcgccaucggcaagauccaggacagccugagcagcaccgccagcgcccugggcaagcugcaggacguggugaaccagaacgcucaggcccugaacacccuggugaagcagcugagcagcaacuucggcgccaucagcucagugcugaaugacauccugagcaggcuggacaagguggaggccgaggugcagaucgaccggcugaucaccggccggcugcagagccugcagaccuacgugacccagcagcugauccgggccgccgagauccgggccagcgccaaccuggcagccaccaagaugagcgagugcgugcugggccagagcaagcggguggacuuuugcggcaagggcuaccaccugaugagcuucccccagagcgccccacacggcgugguguuccuccacgucacauacgugcccgcccaggagaagaacuucaccaccgcccccgccauuugccacgacggcaaggcucacuucccccgggagggaguguucgugagcaacggcacccacugguucgugacccagcggaacuucuacgagccccagaucaucaccaccgacaacaccuucgugagcggcaacugcgacguggugaucggcaucgugaacaacaccguguacgacccccugcagccugagcuggacagcuucaaggaggagcuggacaaguacuucaagaaccacaccagccccgacguggaucugggcgacaucagcggcaucaacgccagcguggugaacauccagaaggagaucgaccggcugaacgagguggccaagaaccugaacgagagccugaucgaccugcaggagcugggcaaguacgagcaguacaucaaguggcccugguacaucuggcugggcuucaucgccggccugaucgccaucgugauggugaccaucaugcugugcugcaugaccagcugcuguagcugccugaagggcugcugcagcugcggcagcugcugcaaguucgacgaggacgacagcgagccagugcugaagggcgugaagcugcacuacaccugaggacuaguuauaagacugacuagcccgaugggccucccaacgggcccuccuccccuccuugcaccgagauuaaucaaaggcucuuuucagagccaccaaaaaaaaaaaaaaaaaaaaaaaaaaaaaaaaaaaaaaaaaaaaaaaaaaaaaaaaaaaaaaaaaaaaaaaaaaaaaaaaaaaaaaaaaaaaaaaaaaaaa

SEQ ID NO: 24137 - RNA, 4026 nt, Artificial Sequence
  SARS-CoV-2/Wuhan/WIV05/2019__EPI_ISL_402128 spike protein mRNA gc (1-1273)(L18F_D80A_D215G_L242del_A243del_L244del_R246I_K417N_E484 K_N501Y_D614G_A701V)
aggagaaagcuuaccauguucguguuccuggugcugcugccccuggugagcagccagugcgugaacuucaccacccggacccagcugcccccugccuacaccaacagcuucacccggggcguguacuaccccgacaagguguuccggagcagcgugcugcacagcacccaggaccuguuccugcccuucuucagcaacgugaccugguuccacgccauccacgugagcggcaccaacggcaccaagcgguucgccaacccagugcugcccuucaacgacggcguguacuucgccagcaccgagaagucaaacaucauccggggcuggaucuuuggcaccacccuggacagcaagacacagagccugcugaucgugaacaacgcuaccaacguggugaucaaggugugcgaguuccaguucugcaacgaccccuuccugggcguguacuaccacaagaacaacaagagcuggauggagagcgaguuccgggucuacagcagcgccaacaauugcaccuucgaguacgugagccagcccuuccugauggaccuggagggcaagcagggcaacuucaagaaccuccgggaguucguguucaagaacaucgacggcuacuucaagaucuacagcaagcacacccccaucaaccuggugcggggacugccccagggcuucagcgcccuggagccucugguggaucugcccaucggcaucaacaucaccagguuccagacccugcacaucagcuaccugacccccggcgacagcagcagcggcuggaccgccggcgccgccgcauacuacgugggcuaccugcagccacggaccuuccugcugaaguacaacgagaacggcaccaucaccgacgccguggacugcgcccuggacccccugagcgagaccaagugcacccuuaagagcuucaccguggagaagggcaucuaccagaccagcaacuuccgggugcagcccacugagagcauugugcgguuccccaacaucaccaaccugugucccuucggcgagguguucaacgccacccgguucgccagcguguacgccuggaaccggaagcggaucagcaacugcguggccgacuacagcgugcuguacaacagcgccagcuucagcaccuucaagugcuacggcgugagcccuaccaagcugaacgaccugugcuucaccaacguguacgcugacagcuucgugauccggggcgacgaggugcggcagaucgcccccggccagaccggcaacaucgccgacuacaacuacaagcugcccgacgacuucaccggcugcgugaucgccuggaacagcaacaaccuggacagcaaggugggcggcaacuacaacuaccuguaccggcuauuccguaagagcaaccugaagccauuugagcgggacaucagcaccgagaucuaccaggccgguagcacccccugcaacggcgugaagggcuucaacugcuacuucccccugcagagcuacggcuuccagcccaccuacggcgugggcuaccagcccuaccgggugguggugcugagcuucgagcugcugcacgcccccgccaccgugugcggcccuaaaaagagcaccaaccuggugaagaacaagugcgugaacuucaauuucaacggccugaccggcaccggcgugcugaccgagagcaacaagaaguuccugcccuuccagcaguucggccgggacaucgccgacaccaccgaugcagugcgggacccccagacccuggagauccuggacaucaccccaugcagcuucggcggcgugagcgucaucacccccggaacaaacaccagcaaccagguggccgugcuguaccagggcgugaacugcaccgaggugcccguggccauccacgccgaccagcugacccccaccuggcggguguacagcaccggcagcaacguguuccagacccgggccggcugccugaucggcgccgagcacgugaacaacuccuacgagugcgacauccccaucggcgcuggcaucugcgccagcuaccagacccagaccaacagcccccggcgggcccggagcguggccagccagagcaucaucgccuacaccaugagccugggcguggagaacagcguggccuacagcaacaacagcaucgccaucccuaccaacuucaccauaagcgugaccaccgagauccugcccgugagcaugaccaagaccagcguggacuguaccauguacaucugcggcgacagcaccgagugcagcaaccuguuacugcaguacggcagcuucugcacccagcugaaccgggcgcugaccggcaucgccguggagcaggacaagaacacccaagagguguucgcccaggugaagcagaucuacaagacucccccaaucaaggacuucggcggcuucaacuucagccagauccugcccgaccccagcaagcccagcaagcggagcuucaucgaggaccugcuguucaacaaggugacccuggccgacgccggcuucaucaagcaguacggggacugccugggcgacaucgccgcccgggaccugaucugcgcucagaaguucaacggccugaccgugcugcccccucugcugaccgaugagaugaucgcccaguacaccagcgcccugcuggccggcaccaucaccagcggcuggaccuucggcgccggcgccgcacugcagauccccuucgccaugcagauggccuaccgguucaacggcaucggcgugacccagaacgugcuguacgagaaccagaagcugaucgccaaccaguucaacagcgccaucggcaagauccaggacagccugagcagcaccgccagcgcccugggcaagcugcaggacguggugaaccagaacgcccaggcucugaacacccuggugaagcagcugagcagcaacuuuggcgccaucagcucagugcugaaugacauccugagccggcuggacaagguggaggccgaggugcagaucgacaggcugaucaccggccggcugcagagccugcagaccuacgugacccagcagcugauccgggccgccgagauucgggccagcgccaaccuggccgcaaccaagaugagcgagugcgugcugggccagagcaagcggguggacuucugcggcaagggcuaccaccugaugagcuucccccagagcgccccacacggcguggucuuccugcacgugacauacgugcccgcccaggagaagaacuucaccaccgcccccgccaucugccacgacggaaaggcccacuucccccgggagggcguguucgugagcaacggcacccacugguucgugacccagcggaacuucuacgagccccagaucaucaccaccgacaacaccuucgugagcggcaacugcgacguggugaucggcaucgugaacaacaccguguacgacccccugcagccugagcuggacagcuucaaggaggagcucgacaaguacuucaagaaccacaccagccccgacguggaccugggcgacaucagcggcaucaacgcuagcguggugaacauccagaaggagaucgaucggcugaacgagguggccaagaaccugaacgagagccugaucgaccugcaggagcugggcaaguacgagcaguacaucaaguggcccugguacaucuggcugggcuucaucgccggccugaucgccaucgugauggugaccaucaugcugugcugcaugaccagcugcuguagcugccugaagggcugcugcagcugcggcagcugcugcaaguucgacgaggacgacagcgagccagugcugaagggcgugaagcugcacuacaccugaggacuaguuauaagacugacuagcccgaugggccucccaacgggcccuccuccccuccuugcaccgagauuaaucaaaggcucuuuucagagccaccaaaaaaaaaaaaaaaaaaaaaaaaaaaaaaaaaaaaaaaaaaaaaaaaaaaaaaaaaaaaaaaaaaaaaaaaaaaaaaaaaaaaaaaaaaaaaaaaaaaaa

SEQ ID NO: 24138 - RNA, 4035 nt, Artificial Sequence
  SARS-CoV-2/Wuhan/WIV05/2019__EPI_ISL_402128 spike protein mRNA gc (1-1273)(E484K_D614G)
aggagaaagcuuaccauguucguguuccuggugcugcugccccuggugagcagccagugcgugaaccugaccacccggacccagcugcccccugccuacaccaacagcuucacccggggcguguacuaccccgacaagguguuccggagcagcgugcugcacagcacccaggaccuguuccugcccuucuucagcaacgugaccugguuccacgccauccacgugagcggcaccaacggcaccaagcgguucgacaacccagugcugcccuucaacgacggcguguacuucgccagcaccgagaagucaaacaucauccggggcuggaucuucggcaccacccuggacagcaagacacagagccugcugaucgugaacaacgccaccaacguggugaucaaggugugcgaguuucaguucugcaacgaccccuuccugggcguguacuaccacaagaacaacaagagcuggauggagagcgaguuccgggucuacagcagcgcuaacaauugcaccuucgaguacgugagccagcccuuccugauggaccucgagggcaagcagggcaacuucaagaaccugcgggaguucguguucaagaacaucgauggcuacuucaagaucuacagcaagcacacccccaucaaccuggugcgggaccugccccagggauucagcgcccuggagccucugguggaccugcccaucggcaucaacaucaccagguuccagacccugcuggcccugcaccggagcuaccugacccccggcgacagcagcagcggcuggaccgccggcgccgccgcauacuacgugggcuaccugcagccacggaccuuccugcugaaguacaacgagaacggcaccaucaccgacgccguggacugcgcccuggacccccugagcgagaccaagugcacccuaaagagcuucaccguggagaagggcaucuaccagaccagcaacuuccgggugcagcccacugagagcaucgugcgguuccccaacauuaccaaccugugucccuucggcgagguguucaacgccacccgguucgccagcguguacgccuggaaccggaagcggaucagcaacugcguggccgacuacagcgugcuguacaacagcgccagcuucagcaccuucaagugcuacggcgugagcccuaccaagcugaacgaccugugcuucaccaacguguacgcugacagcuucgugauccggggcgacgaggugcggcagaucgcccccggccagaccggcaagaucgccgacuacaacuacaagcugcccgacgacuucaccggcugcgugaucgccuggaacagcaacaaccuggacagcaaggugggcggcaacuacaacuaccuguaccggcuguuccguaagagcaaccugaagccauucgagcgggacaucagcaccgagaucuaccaggccggcagcacccccugcaacggugugaagggcuuuaacugcuacuucccccugcagagcuacggcuuccagcccaccaacggcgugggcuaccagcccuaccgggugguggugcugagcuucgagcugcugcacgcccccgccaccgugugcggcccuaaaaagagcaccaaccuggugaagaacaagugcgugaacuucaauuucaacggccugaccggcaccggcgugcugaccgagagcaacaagaaguuccugcccuuccagcaguucggccgggauaucgccgacaccaccgacgcagugcgggacccccagacccuggagauccuggacaucaccccaugcagcuucggcggcgugagcgucaucacccccggcacaaacaccagcaaccagguggccgugcuguaccagggagugaacugcaccgaggugcccguggccauccacgccgaccagcugacccccaccuggcggguguacagcaccggcagcaacguguuccagacccgggccggcugccugaucggcgccgagcacgugaacaacuccuacgagugcgacauccccaucggcgcuggcaucugcgccagcuaccagacccagaccaacagcccccggcgggcccggagcguggccagccagagcaucaucgccuacaccaugagcuuaggcgccgagaacagcguggccuacagcaacaacagcaucgcgaucccuaccaacuucaccaucagcgugaccaccgagauacugcccgugagcaugaccaagaccagcguggacuguaccauguacaucugcggcgacagcaccgagugcagcaaccugcugcugcaguacggcagcuucugcacccagcugaaccgggcccugaccggcaucgccguggagcaggacaagaacacccaagagguguucgcccaggugaagcagaucuacaagacucccccaaucaaggacuucggcggcuucaacuucagccagauccugcccgaccccagcaagcccagcaagcggagcuucaucgaggaccugcuguucaacaaggugacccuggccgacgccggcuucaucaagcaguacggcgacugccugggggauaucgccgcucgggaccugaucugcgcccagaaguucaacggccugaccgugcugcccccucugcugaccgacgagaugaucgcccaguacaccagcgcccugcuugccggcaccaucaccagcggcuggaccuucggcgccggcgcagcccugcagauccccuucgccaugcagauggccuaccgguucaacggcaucggcgugacccagaacgugcuguacgagaaccagaagcugaucgccaaccaguucaacagcgccaucggcaagauccaggacagccugagcagcaccgccagcgcccugggcaagcugcaggacguggugaaccagaacgcucaggcccugaacacccuggugaagcagcugagcagcaacuucggcgccaucagcucagugcugaaugacauccugagcaggcuggacaagguggaggccgaggugcagaucgaccggcugaucaccggccggcugcagagccugcagaccuacgugacccagcagcugauccgggccgccgagauccgggccagcgccaaccuggcagccaccaagaugagcgagugcgugcugggccagagcaagcggguggacuuuugcggcaagggcuaccaccugaugagcuucccccagagcgccccacacggcgugguguuccuccacgucacauacgugcccgcccaggagaagaacuucaccaccgcccccgccauuugccacgacggcaaggcucacuucccccgggagggaguguucgugagcaacggcacccacugguucgugacccagcggaacuucuacgagccccagaucaucaccaccgacaacaccuucgugagcggcaacugcgacguggugaucggcaucgugaacaacaccguguacgacccccugcagccugagcuggacagcuucaaggaggagcuggacaaguacuucaagaaccacaccagccccgacguggaucugggcgacaucagcggcaucaacgccagcguggugaacauccagaaggagaucgaccggcugaacgagguggccaagaaccugaacgagagccugaucgaccugcaggagcugggcaaguacgagcaguacaucaaguggcccugguacaucuggcugggcuucaucgccggccugaucgccaucgugauggugaccaucaugcugugcugcaugaccagcugcuguagcugccugaagggcugcugcagcugcggcagcugcugcaaguucgacgaggacgacagcgagccagugcugaagggcgugaagcugcacuacaccugaggacuaguuauaagacugacuagcccgaugggccucccaacgggcccuccuccccuccuugcaccgagauuaaucaaaggcucuuuucagagccaccaaaaaaaaaaaaaaaaaaaaaaaaaaaaaaaaaaaaaaaaaaaaaaaaaaaaaaaaaaaaaaaaaaaaaaaaaaaaaaaaaaaaaaaaaaaaaaaaaaaaa

SEQ ID NO: 24139 - RNA, 4035 nt, Artificial Sequence
  SARS-CoV-2/Wuhan/WIV05/2019__EPI_ISL_402128 spike protein mRNA gc (1-1273)(L18F_T20N_P26S_D138Y_R190S_K417T_E484K_N501Y_D614G_H655Y _T1027I)
aggagaaagcuuaccauguucguguuccuggugcugcugccccuggugagcagccagugcgugaacuucaccaaccggacccagcugcccagcgccuacaccaacagcuucacccggggcguguacuacccugacaagguguuccggagcagcgugcugcacagcacccaggaccuguuccugcccuucuucagcaacgugaccugguuccacgccauccacgugagcggcaccaacggcaccaagcgguucgacaaccccgugcugccauucaacgacggcguguacuucgccagcaccgagaagucaaacaucauccggggcuggaucuuuggcaccacccuggacagcaagacccagagccugcugaucgugaacaacgccacaaacguggugaucaaggugugcgaguuccaguucugcaacuaccccuuccugggcguguacuaccacaagaacaacaagagcuggauggagagcgaguuccgggucuacagcagcgcuaauaacugcaccuucgaguacgugagccagcccuuccugauggaccuggagggcaagcagggcaacuucaagaaccucagcgaguucguguucaagaacaucgacggcuacuucaagaucuacagcaagcacacccccaucaaccuggugcgggaucugccccagggauucagcgcccuggagccccugguggaccugccuaucggcaucaacaucacccgguuccagacccugcuggcccugcacaggagcuaccugacccccggcgacagcagcagcggcuggaccgccggcgccgccgcauacuacgugggcuaccugcagccccggaccuuccugcugaaguacaacgagaacggcaccaucaccgacgccguggacugcgcccuggacccacugagcgagaccaagugcacccuaaagagcuucaccguggagaagggcaucuaccagaccagcaacuuccgggugcagcccaccgagagcaucgugcgguuccccaacauuacuaaccugugucccuucggcgagguguucaacgccacccgguucgccagcguguacgccuggaaccggaagcggaucagcaacugcguggccgacuacagcgugcuguacaacagcgccagcuucagcaccuucaagugcuacggcgugagccccaccaagcugaacgaccugugcuucaccaacguguacgcugacagcuucgugauccggggcgacgaggugcggcagaucgccccuggccagaccggcaccaucgccgacuacaacuacaagcugcccgacgacuucaccggcugcgugaucgccuggaacagcaacaaccuggacagcaaggugggcggcaacuacaacuaccuguaccggcuguuccguaagagcaaccugaagcccuuugagcgggacaucagcaccgagaucuaccaggccggcagcaccccaugcaacggugugaagggcuucaacugcuacuucccccugcagagcuacggcuuccagcccaccuacggcgugggcuaccagcccuaccgggugguggugcugagcuucgagcugcugcacgcccccgccaccgugugcggccccaaaaagagcaccaaccuggugaagaacaagugcgugaacuucaauuucaacggccugaccggcaccggcgugcugaccgagagcaacaagaaguuccugccuuuccagcaguucggccgggacaucgccgauaccaccgacgcagugcgggacccccagacccuggagauccuggacaucacccccugcagcuucggcggcgugagcgucaucaccccaggcacaaacaccagcaaccagguggccgugcuguaccagggagugaacugcaccgaggugcccguggccauccacgccgaccagcugacccccaccuggcggguguacuccaccggcagcaacguguuccagacccgggccggcugccugaucggcgccgaguacgugaacaacagcuacgagugcgacauccccaucggcgcuggcaucugcgccagcuaccagacccagaccaacagcccccggcgggcccggagcguggccagccagagcaucaucgccuacaccaugagccugggcgccgagaacagcguggccuacagcaacaacagcaucgcgauccccaccaacuucaccaucagcgugaccaccgagauauuaccugugagcaugaccaagaccagcguggacuguaccauguacaucugcggcgacagcaccgagugcagcaaccugcugcugcaguacggcagcuucugcacccagcugaaccgggcccugaccggcaucgccguggagcaggacaagaacacccaagagguguucgcccaggugaagcagaucuacaagacuccacccaucaaggacuucggcggcuucaacuucagccagauccugcccgaccccagcaagcccagcaagcggagcuucaucgaggaccugcuguucaacaaggugacccuggccgacgccggcuucaucaagcaguacggcgacugccugggggacaucgccgcucgggaucugaucugcgcccagaaguucaacggccugaccgugcugccuccccugcugaccgacgagaugaucgcccaguacaccagcgcccugcuggccggcaccaucaccagcggcuggaccuucggcgccggcgcagcccuucagauccccuucgccaugcagauggccuaccgguucaacggcaucggcgugacccagaacgugcuguacgagaaccagaagcugaucgccaaccaguucaacagcgccaucggcaagauccaggacagccugagcagcaccgccagcgcccugggcaagcugcaggacguggugaaccagaacgcucaggcccugaacacccuggugaagcagcugagcucaaacuuuggcgccaucagcagcgugcugaaugacauccugagccggcuggacaagguggaggccgaggugcagaucgacaggcugaucaccggccggcugcagagccugcagaccuacgugacccagcagcugauccgggccgccgagauccgggccagcgccaaccuggcagccauuaagaugagcgagugcgugcugggccagagcaagcggguggacuucugcggcaagggcuaccaccugaugagcuucccccagagcgcuccccacggcgugguguuccugcacgucaccuacgugccagcccaggagaagaacuucacaaccgcccccgccaucugccacgacggcaaggcccacuucccccgggagggaguguucgugagcaacggcacccacugguucgugacccagcggaacuucuacgagccccagaucaucaccaccgacaacaccuucgugagcggcaacugcgacguggugaucggcaucgugaacaacaccguguacgacccccuccagcccgagcuggacagcuucaaggaggagcuggacaaguacuucaagaaccacaccagcccugacguggaccugggcgauaucagcggcaucaacgccagcguggugaacauccagaaggagaucgaccggcugaacgagguggccaagaaccugaacgagagccugaucgaccugcaggagcugggcaaguacgagcaguacaucaaguggcccugguacaucuggcugggcuucaucgccggccugaucgccaucgugauggugaccaucaugcugugcugcaugaccagcugcuguagcugccugaagggcugcugcagcugcggcagcugcugcaaguucgacgaggacgacagcgagcccgugcugaagggcgugaagcugcacuacaccugaggacuaguuauaagacugacuagcccgaugggccucccaacgggcccuccuccccuccuugcaccgagauuaaucaaaggcucuuuucagagccaccaaaaaaaaaaaaaaaaaaaaaaaaaaaaaaaaaaaaaaaaaaaaaaaaaaaaaaaaaaaaaaaaaaaaaaaaaaaaaaaaaaaaaaaaaaaaaaaaaaaaa

SEQ ID NO: 24140 - RNA, 4035 nt, Artificial Sequence
  SARS-CoV-2/Wuhan/WIV05/2019__EPI_ISL_402128 spike protein mRNA gc (1-1273)(S13I_W152C_L452R_D614G)
aggagaaagcuuaccauguucguguuccuggugcugcugccccuggugagcauccagugcgugaaccugaccacccggacccagcugcccccugccuacaccaacagcuucacccggggcguguacuaccccgacaagguguuccggagcagcgugcugcacagcacccaggaccuguuccugcccuucuucagcaacgugaccugguuccacgccauccacgugagcggcaccaacggcaccaagcgguucgacaacccagugcugcccuucaacgacggcguguacuucgccagcaccgagaagucaaacaucauccggggcuggaucuucggcaccacccuggacagcaagacacagagccugcugaucgugaacaacgccaccaacguggugaucaaggugugcgaguuucaguucugcaacgaccccuuccugggcguguacuaccacaagaacaacaagagcugcauggagagcgaguuccgggucuacagcagcgcuaacaauugcaccuucgaguacgugagccagcccuuccugauggaccucgagggcaagcagggcaacuucaagaaccugcgggaguucguguucaagaacaucgauggcuacuucaagaucuacagcaagcacacccccaucaaccuggugcgggaccugccccagggauucagcgcccuggagccucugguggaccugcccaucggcaucaacaucaccagguuccagacccugcuggcccugcaccggagcuaccugacccccggcgacagcagcagcggcuggaccgccggcgccgccgcauacuacgugggcuaccugcagccacggaccuuccugcugaaguacaacgagaacggcaccaucaccgacgccguggacugcgcccuggacccccugagcgagaccaaguguacccuaaagagcuucaccguggagaagggcaucuaccagaccagcaacuuccgggugcagcccacugagagcauugugcgguuccccaacaucaccaaccugugccccuucggcgagguguucaacgccacccgguucgccagcguguacgccuggaaccggaagcggaucagcaacugcguggccgacuacagcgugcuguacaacagcgccagcuucagcaccuucaagugcuacggcgugagcccuaccaagcugaacgaccugugcuucaccaacguguacgcugacagcuucgugauccggggcgacgaggugcggcagaucgcccccggccagaccggcaagaucgccgacuacaacuacaagcugcccgacgacuucaccggcugcgugaucgccuggaacagcaacaaccuggacagcaaggugggcggcaacuacaacuaccgguaccggcuguuccguaagagcaaccugaagccauucgagcgggacaucagcaccgagaucuaccaggccggcagcacccccugcaacgguguggagggcuuuaacugcuacuucccccugcagagcuacggcuuccagcccaccaacggcgugggcuaccagcccuaccgggugguggugcugagcuucgagcugcugcacgcccccgccaccgugugcggcccuaaaaagagcaccaaccuggugaagaacaagugcgugaacuucaauuucaacggccugaccggcaccggcgugcugaccgagagcaacaagaaguuccugcccuuccagcaguucggccgggauaucgccgacaccaccgacgcagugcgggacccccagacccuggagauccuggacaucaccccaugcagcuucggcggcgugagcgucaucacccccggcacaaacaccagcaaccagguggccgugcuguaccagggagugaacugcaccgaggugcccguggccauccacgccgaccagcugacccccaccuggcggguguacagcaccggcagcaacguguuccagacccgggccggcugccugaucggcgccgagcacgugaacaacagcuacgagugcgacauccccaucggcgcuggcaucugugccuccuaccagacccagaccaacagcccccggcgggcccggagcguggccagccagagcaucaucgccuacaccaugagccugggcgccgagaacagcguggccuacagcaacaacagcaucgcgaucccuaccaacuucaccauaagcgugaccaccgagaucuuacccgugagcaugaccaagaccagcguggacugcaccauguacaucugcggcgacagcaccgagugcagcaaccugcugcugcaguacggcagcuucugcacccagcugaaccgggcccugaccggcaucgccguggagcaggacaagaacacccaagagguguucgcccaggugaagcagaucuacaagacucccccaaucaaggacuucggcggcuucaacuucagccagauccugcccgaccccagcaagcccagcaagcggagcuucaucgaggaccugcuguucaacaaggugacccuggccgacgccggcuucaucaagcaguacggcgacugccugggggauaucgccgcucgggaccugaucugcgcccagaaguucaacggccugaccgugcugcccccucugcugaccgacgagaugaucgcccaguacaccagcgcccugcuggccggcaccaucaccagcggcuggaccuucggcgccggcgcagcccuucagauccccuucgccaugcagauggccuacagguucaacggcaucggcgugacccagaacgugcuguacgagaaccagaagcugaucgccaaccaguucaacagcgccaucggcaagauccaggacagccugagcagcaccgccagcgcccugggcaagcugcaggacguggugaaccagaacgcucaggcccugaacacccuggugaagcagcugagcagcaacuucggcgccaucagcagcgugcugaaugacauccugucacggcuggacaagguggaggccgaggugcagaucgaccggcugaucaccggccggcugcagagccugcagaccuacgugacccagcagcugauccgggccgccgagauucgggccagcgccaaccuggcagccaccaagaugagcgagugcgugcugggccagagcaagcggguggacuuuugcggcaagggcuaccaccugaugagcuucccccagagcgccccacacggcgugguguuccugcacgucacauacgugcccgcccaggagaagaacuucaccaccgcccccgccaucugccacgacggcaaggcucacuucccccgggagggaguguucgugagcaacggcacccacugguucgugacccagcggaacuucuacgagccccagaucaucaccaccgacaacaccuucgugagcggcaacugcgacguggugaucggcaucgugaacaacaccguguacgacccccuccagccugagcuggacagcuucaaggaggagcuggacaaguacuucaagaaccacaccagccccgacguggaucugggcgacaucagcggcaucaacgccagcguggugaacauccagaaggagaucgaccggcugaacgagguggccaagaaccugaacgagagccugaucgaccugcaggagcugggcaaguacgagcaguacaucaaguggcccugguacaucuggcugggcuucaucgccggccugaucgccaucgugauggugaccaucaugcugugcugcaugaccagcuguugcagcugccugaagggcugcugcagcugcggcagcugcugcaaguucgacgaggacgacagcgagccagugcugaagggcgugaagcugcacuacaccugaggacuaguuauaagacugacuagcccgaugggccucccaacgggcccuccuccccuccuugcaccgagauuaaucaaaggcucuuuucagagccaccaaaaaaaaaaaaaaaaaaaaaaaaaaaaaaaaaaaaaaaaaaaaaaaaaaaaaaaaaaaaaaaaaaaaaaaaaaaaaaaaaaaaaaaaaaaaaaaaaaaaa

SEQ ID NO: 24141 - RNA, 4035 nt, Artificial Sequence
  SARS-CoV-2/Wuhan/WIV05/2019__EPI_ISL_402128 spike protein mRNA gc mod (1-1273)
aggagaaagcuuaccauguucguguuucuggugcugcugccccugguguccagccagugugugaaccugaccaccagaacacagcugccuccagccuacaccaacagcuucaccagaggcguguacuaccccgacaagguguucagauccagcgugcugcacucuacccaggaccuguuccugccuuucuucagcaacgugaccugguuccacgccauccacguguccggcaccaauggcaccaagagauucgacaaccccgugcugcccuucaacgacgggguguacuuugccagcaccgagaaguccaacaucaucagaggcuggaucuucggcaccacacuggacagcaagacccagagccugcugaucgugaacaacgccaccaacguggucaucaaagugugcgaguuccaguucugcaacgaccccuuccugggcgucuacuaccacaagaacaacaagagcuggauggaaagcgaguuccggguguacagcagcgccaacaacugcaccuucgaguacgugucccagccuuuccugauggaccuggaaggcaagcagggcaacuucaagaaccugcgcgaguucguguucaagaacaucgacggcuacuucaaaaucuacagcaagcacaccccuaucaaccucgugcgggaucugccucagggcuucucugcucuggaaccccugguggaucugcccaucggcaucaacaucacccgguuucagacacugcuggcccugcacagaagcuaccugacaccuggcgauagcagcagcggauggacagcuggugccgccgcuuacuaugugggcuaccugcagccuagaaccuuccugcugaaguacaacgagaacggcaccaucaccgacgccguggauugugcucuggauccucugagcgagacaaagugcacccugaaguccuucaccguggaaaagggcaucuaccagaccagcaacuuccgggugcagcccaccgaauccaucgugcgguuccccaauaucaccaaucugugccccuucggcgagguguucaaugccaccagauucgccucuguguacgccuggaaccggaagcggaucagcaauugcguggccgacuacuccgugcuguacaacuccgccagcuucagcaccuucaagugcuacggcguguccccuaccaagcugaacgaccugugcuucacaaacguguacgccgacagcuucgugauccggggagaugaagugcggcagauugccccuggacagacaggcaagaucgccgacuacaacuacaagcugcccgacgacuucaccggcugugugauugccuggaacagcaacaaccuggacuccaaagucggcggcaacuacaauuaccuguaccggcuguuccggaaguccaaucugaagcccuucgagcgggacaucagcaccgaaaucuaucaggccggcagcaccccuugcaacggcguggaaggcuucaacugcuacuucccacugcaguccuacggcuuucagcccacaaauggcgugggcuaucagcccuacagagugguggugcugagcuucgaacugcugcaugcuccugccacagugugcggcccuaagaaaagcaccaaucucgugaagaacaaaugcgugaacuucaacuucaacggccugaccggcaccggcgugcugacagagagcaacaagaaguuccugccauuccagcaguuuggccgggauaucgccgauaccacagacgccguuagagauccccagacacuggaaauccuggacaucaccccaugcagcuucggcggagugucugugaucaccccuggcaccaacaccagcaaucagguggcagugcuguaccaggacgugaacuguaccgaagugcccguggccauucacgccgaucagcugacaccuacauggcggguguacuccaccggcagcaauguguuucagaccagagccggcugucugaucggagccgagcacgugaacaauagcuacgagugcgacauccccaucggcgcuggcaucugugccagcuaccagacacagacaaacagccccagacgggcuagaagcguggccagccagagcaucauugccuacacaaugucucugggcgccgagaacagcguggccuacuccaacaacucuaucgcuauccccaccaacuucaccaucagcgugaccaccgagauccugccuguguccaugaccaagaccagcguggacugcaccauguacaucugcggcgauuccaccgagugcuccaaccugcugcugcaguacggcagcuucugcacccagcugaauagagcccugacagggaucgccguggaacaggacaagaacacccaagagguguucgcccaagugaagcaaaucuacaagaccccuccuaucaaggacuucggcggcuucaauuucagccagauucugcccgauccuagcaagcccagcaagcggagcuucaucgaggaccugcuguucaacaaagugacacuggccgacgccggcuucaucaagcaguauggcgauugucugggcgacauugccgccagggaucugauuugcgcccagaaguuuaacggacugacagugcugccuccucugcugaccgaugagaugaucgcccaguacacaucugcccugcuggccggcacaaucacaagcggcuggacauuuggagcuggcgccgcucugcagauccccuuugcuaugcagauggccuaccgguucaacggcaucggagugacccagaaugugcuguacgagaaccagaagcugaucgccaaccaguucaacagcgccaucggcaagauccaggacagccugagcagcacagcaagcgcccugggaaagcugcaggacguggucaaccagaaugcccaggcacugaacacccuggucaagcagcuguccuccaacuucggcgccaucagcucugugcugaacgauauccugagcagacuggacaaggucgaggccgaggugcagaucgacagacugaucacaggcagacugcagagccuccagacauacgugacccagcagcugaucagagccgccgagauuagagccucugccaaucuggccgccaccaagaugucugagugugugcugggccagagcaagagaguggacuuuugcggcaagggcuaccaccugaugagcuucccucagucugccccucacggcgugguguuucugcacgugacauaugugcccgcucaagagaagaauuucaccaccgcuccagccaucugccacgacggcaaagcccacuuuccuagagaaggcguguucguguccaacggcacccauugguucgugacacagcggaacuucuacgagccccagaucaucaccaccgacaacaccuucgugucuggcaacugcgacguugugaucggcauugugaacaauaccguguacgacccucugcagcccgagcuggacagcuucaaagaggaacuggacaaguacuuuaagaaccacacaagccccgacguggaccugggcgauaucagcggaaucaaugccagcgucgugaacauccagaaagagaucgaccggcugaacgagguggccaagaaucugaacgagagccugaucgaccugcaagaacuggggaaguacgagcaguacaucaaguggcccugguacaucuggcugggcuuuaucgccggacugauugccaucgugauggucacaaucaugcuguguugcaugaccagcugcuguagcugccugaagggcuguuguagcuguggcagcugcugcaaguucgacgaggacgauucugagcccgugcugaagggcgugaaacugcacuacaccugaggacuaguuauaagacugacuagcccgaugggccucccaacgggcccuccuccccuccuugcaccgagauuaaucaaaggcucuuuucagagccaccaaaaaaaaaaaaaaaaaaaaaaaaaaaaaaaaaaaaaaaaaaaaaaaaaaaaaaaaaaaaaaaaaaaaaaaaaaaaaaaaaaaaaaaaaaaaaaaaaaaaa

SEQ ID NO: 24142 - RNA, 4035 nt, Artificial Sequence
  SARS-CoV-2/Wuhan/WIV05/2019__EPI_ISL_402128 spike protein mRNA gc mod (1-1273)(D614G)
aggagaaagcuuaccauguucguguuucuggugcugcugccccugguguccagccagugugugaaccugaccaccagaacacagcugccuccagccuacaccaacagcuucaccagaggcguguacuaccccgacaagguguucagauccagcgugcugcacucuacccaggaccuguuccugccuuucuucagcaacgugaccugguuccacgccauccacguguccggcaccaauggcaccaagagauucgacaaccccgugcugcccuucaacgacgggguguacuuugccagcaccgagaaguccaacaucaucagaggcuggaucuucggcaccacacuggacagcaagacccagagccugcugaucgugaacaacgccaccaacguggucaucaaagugugcgaguuccaguucugcaacgaccccuuccugggcgucuacuaccacaagaacaacaagagcuggauggaaagcgaguuccggguguacagcagcgccaacaacugcaccuucgaguacgugucccagccuuuccugauggaccuggaaggcaagcagggcaacuucaagaaccugcgcgaguucguguucaagaacaucgacggcuacuucaaaaucuacagcaagcacaccccuaucaaccucgugcgggaucugccucagggcuucucugcucuggaaccccugguggaucugcccaucggcaucaacaucacccgguuucagacacugcuggcccugcacagaagcuaccugacaccuggcgauagcagcagcggauggacagcuggugccgccgcuuacuaugugggcuaccugcagccuagaaccuuccugcugaaguacaacgagaacggcaccaucaccgacgccguggauugugcucuggauccucugagcgagacaaagugcacccugaaguccuucaccguggaaaagggcaucuaccagaccagcaacuuccgggugcagcccaccgaauccaucgugcgguuccccaauaucaccaaucugugccccuucggcgagguguucaaugccaccagauucgccucuguguacgccuggaaccggaagcggaucagcaauugcguggccgacuacuccgugcuguacaacuccgccagcuucagcaccuucaagugcuacggcguguccccuaccaagcugaacgaccugugcuucacaaacguguacgccgacagcuucgugauccggggagaugaagugcggcagauugccccuggacagacaggcaagaucgccgacuacaacuacaagcugcccgacgacuucaccggcugugugauugccuggaacagcaacaaccuggacuccaaagucggcggcaacuacaauuaccuguaccggcuguuccggaaguccaaucugaagcccuucgagcgggacaucagcaccgaaaucuaucaggccggcagcaccccuugcaacggcguggaaggcuucaacugcuacuucccacugcaguccuacggcuuucagcccacaaauggcgugggcuaucagcccuacagagugguggugcugagcuucgaacugcugcaugcuccugccacagugugcggcccuaagaaaagcaccaaucucgugaagaacaaaugcgugaacuucaacuucaacggccugaccggcaccggcgugcugacagagagcaacaagaaguuccugccauuccagcaguuuggccgggauaucgccgauaccacagacgccguuagagauccccagacacuggaaauccuggacaucaccccaugcagcuucggcggagugucugugaucaccccuggcaccaacaccagcaaucagguggcagugcuguaccagggcgugaacuguaccgaagugcccguggccauucacgccgaucagcugacaccuacauggcggguguacuccaccggcagcaauguguuucagaccagagccggcugucugaucggagccgagcacgugaacaauagcuacgagugcgacauccccaucggcgcuggcaucugugccagcuaccagacacagacaaacagccccagacgggcuagaagcguggccagccagagcaucauugccuacacaaugucucugggcgccgagaacagcguggccuacuccaacaacucuaucgcuauccccaccaacuucaccaucagcgugaccaccgagauccugccuguguccaugaccaagaccagcguggacugcaccauguacaucugcggcgauuccaccgagugcuccaaccugcugcugcaguacggcagcuucugcacccagcugaauagagcccugacagggaucgccguggaacaggacaagaacacccaagagguguucgcccaagugaagcaaaucuacaagaccccuccuaucaaggacuucggcggcuucaauuucagccagauucugcccgauccuagcaagcccagcaagcggagcuucaucgaggaccugcuguucaacaaagugacacuggccgacgccggcuucaucaagcaguauggcgauugucugggcgacauugccgccagggaucugauuugcgcccagaaguuuaacggacugacagugcugccuccucugcugaccgaugagaugaucgcccaguacacaucugcccugcuggccggcacaaucacaagcggcuggacauuuggagcuggcgccgcucugcagauccccuuugcuaugcagauggccuaccgguucaacggcaucggagugacccagaaugugcuguacgagaaccagaagcugaucgccaaccaguucaacagcgccaucggcaagauccaggacagccugagcagcacagcaagcgcccugggaaagcugcaggacguggucaaccagaaugcccaggcacugaacacccuggucaagcagcuguccuccaacuucggcgccaucagcucugugcugaacgauauccugagcagacuggacaaggucgaggccgaggugcagaucgacagacugaucacaggcagacugcagagccuccagacauacgugacccagcagcugaucagagccgccgagauuagagccucugccaaucuggccgccaccaagaugucugagugugugcugggccagagcaagagaguggacuuuugcggcaagggcuaccaccugaugagcuucccucagucugccccucacggcgugguguuucugcacgugacauaugugcccgcucaagagaagaauuucaccaccgcuccagccaucugccacgacggcaaagcccacuuuccuagagaaggcguguucguguccaacggcacccauugguucgugacacagcggaacuucuacgagccccagaucaucaccaccgacaacaccuucgugucuggcaacugcgacguugugaucggcauugugaacaauaccguguacgacccucugcagcccgagcuggacagcuucaaagaggaacuggacaaguacuuuaagaaccacacaagccccgacguggaccugggcgauaucagcggaaucaaugccagcgucgugaacauccagaaagagaucgaccggcugaacgagguggccaagaaucugaacgagagccugaucgaccugcaagaacuggggaaguacgagcaguacaucaaguggcccugguacaucuggcugggcuuuaucgccggacugauugccaucgugauggucacaaucaugcuguguugcaugaccagcugcuguagcugccugaagggcuguuguagcuguggcagcugcugcaaguucgacgaggacgauucugagcccgugcugaagggcgugaaacugcacuacaccugaggacuaguuauaagacugacuagcccgaugggccucccaacgggcccuccuccccuccuugcaccgagauuaaucaaaggcucuuuucagagccaccaaaaaaaaaaaaaaaaaaaaaaaaaaaaaaaaaaaaaaaaaaaaaaaaaaaaaaaaaaaaaaaaaaaaaaaaaaaaaaaaaaaaaaaaaaaaaaaaaaaaa

SEQ ID NO: 24143 - RNA, 4035 nt, Artificial Sequence
  SARS-CoV-2/Wuhan/WIV05/2019__EPI_ISL_402128 spike protein mRNA gc mod (1-1273)(A222V_D614G)
aggagaaagcuuaccauguucguguuucuggugcugcugccccugguguccagccagugugugaaccugaccaccagaacacagcugccuccagccuacaccaacagcuucaccagaggcguguacuaccccgacaagguguucagauccagcgugcugcacucuacccaggaccuguuccugccuuucuucagcaacgugaccugguuccacgccauccacguguccggcaccaauggcaccaagagauucgacaaccccgugcugcccuucaacgacgggguguacuuugccagcaccgagaaguccaacaucaucagaggcuggaucuucggcaccacacuggacagcaagacccagagccugcugaucgugaacaacgccaccaacguggucaucaaagugugcgaguuccaguucugcaacgaccccuuccugggcgucuacuaccacaagaacaacaagagcuggauggaaagcgaguuccggguguacagcagcgccaacaacugcaccuucgaguacgugucccagccuuuccugauggaccuggaaggcaagcagggcaacuucaagaaccugcgcgaguucguguucaagaacaucgacggcuacuucaaaaucuacagcaagcacaccccuaucaaccucgugcgggaucugccucagggcuucucugugcuggaaccccugguggaucugcccaucggcaucaacaucacccgguuucagacacugcuggcccugcacagaagcuaccugacaccuggcgauagcagcagcggauggacagcuggugccgccgcuuacuaugugggcuaccugcagccuagaaccuuccugcugaaguacaacgagaacggcaccaucaccgacgccguggauugugcucuggauccucugagcgagacaaagugcacccugaaguccuucaccguggaaaagggcaucuaccagaccagcaacuuccgggugcagcccaccgaauccaucgugcgguuccccaauaucaccaaucugugccccuucggcgagguguucaaugccaccagauucgccucuguguacgccuggaaccggaagcggaucagcaauugcguggccgacuacuccgugcuguacaacuccgccagcuucagcaccuucaagugcuacggcguguccccuaccaagcugaacgaccugugcuucacaaacguguacgccgacagcuucgugauccggggagaugaagugcggcagauugccccuggacagacaggcaagaucgccgacuacaacuacaagcugcccgacgacuucaccggcugugugauugccuggaacagcaacaaccuggacuccaaagucggcggcaacuacaauuaccuguaccggcuguuccggaaguccaaucugaagcccuucgagcgggacaucagcaccgaaaucuaucaggccggcagcaccccuugcaacggcguggaaggcuucaacugcuacuucccacugcaguccuacggcuuucagcccacaaauggcgugggcuaucagcccuacagagugguggugcugagcuucgaacugcugcaugcuccugccacagugugcggcccuaagaaaagcaccaaucucgugaagaacaaaugcgugaacuucaacuucaacggccugaccggcaccggcgugcugacagagagcaacaagaaguuccugccauuccagcaguuuggccgggauaucgccgauaccacagacgccguuagagauccccagacacuggaaauccuggacaucaccccaugcagcuucggcggagugucugugaucaccccuggcaccaacaccagcaaucagguggcagugcuguaccagggcgugaacuguaccgaagugcccguggccauucacgccgaucagcugacaccuacauggcggguguacuccaccggcagcaauguguuucagaccagagccggcugucugaucggagccgagcacgugaacaauagcuacgagugcgacauccccaucggcgcuggcaucugugccagcuaccagacacagacaaacagccccagacgggcuagaagcguggccagccagagcaucauugccuacacaaugucucugggcgccgagaacagcguggccuacuccaacaacucuaucgcuauccccaccaacuucaccaucagcgugaccaccgagauccugccuguguccaugaccaagaccagcguggacugcaccauguacaucugcggcgauuccaccgagugcuccaaccugcugcugcaguacggcagcuucugcacccagcugaauagagcccugacagggaucgccguggaacaggacaagaacacccaagagguguucgcccaagugaagcaaaucuacaagaccccuccuaucaaggacuucggcggcuucaauuucagccagauucugcccgauccuagcaagcccagcaagcggagcuucaucgaggaccugcuguucaacaaagugacacuggccgacgccggcuucaucaagcaguauggcgauugucugggcgacauugccgccagggaucugauuugcgcccagaaguuuaacggacugacagugcugccuccucugcugaccgaugagaugaucgcccaguacacaucugcccugcuggccggcacaaucacaagcggcuggacauuuggagcuggcgccgcucugcagauccccuuugcuaugcagauggccuaccgguucaacggcaucggagugacccagaaugugcuguacgagaaccagaagcugaucgccaaccaguucaacagcgccaucggcaagauccaggacagccugagcagcacagcaagcgcccugggaaagcugcaggacguggucaaccagaaugcccaggcacugaacacccuggucaagcagcuguccuccaacuucggcgccaucagcucugugcugaacgauauccugagcagacuggacaaggucgaggccgaggugcagaucgacagacugaucacaggcagacugcagagccuccagacauacgugacccagcagcugaucagagccgccgagauuagagccucugccaaucuggccgccaccaagaugucugagugugugcugggccagagcaagagaguggacuuuugcggcaagggcuaccaccugaugagcuucccucagucugccccucacggcgugguguuucugcacgugacauaugugcccgcucaagagaagaauuucaccaccgcuccagccaucugccacgacggcaaagcccacuuuccuagagaaggcguguucguguccaacggcacccauugguucgugacacagcggaacuucuacgagccccagaucaucaccaccgacaacaccuucgugucuggcaacugcgacguugugaucggcauugugaacaauaccguguacgacccucugcagcccgagcuggacagcuucaaagaggaacuggacaaguacuuuaagaaccacacaagccccgacguggaccugggcgauaucagcggaaucaaugccagcgucgugaacauccagaaagagaucgaccggcugaacgagguggccaagaaucugaacgagagccugaucgaccugcaagaacuggggaaguacgagcaguacaucaaguggcccugguacaucuggcugggcuuuaucgccggacugauugccaucgugauggucacaaucaugcuguguugcaugaccagcugcuguagcugccugaagggcuguuguagcuguggcagcugcugcaaguucgacgaggacgauucugagcccgugcugaagggcgugaaacugcacuacaccugaggacuaguuauaagacugacuagcccgaugggccucccaacgggcccuccuccccuccuugcaccgagauuaaucaaaggcucuuuucagagccaccaaaaaaaaaaaaaaaaaaaaaaaaaaaaaaaaaaaaaaaaaaaaaaaaaaaaaaaaaaaaaaaaaaaaaaaaaaaaaaaaaaaaaaaaaaaaaaaaaaaaa

SEQ ID NO: 24144 - RNA, 4035 nt, Artificial Sequence
  SARS-CoV-2/Wuhan/WIV05/2019__EPI_ISL_402128 spike protein mRNA gc mod (1-1273)(N439K_D614G)
aggagaaagcuuaccauguucguguuucuggugcugcugccccugguguccagccagugugugaaccugaccaccagaacacagcugccuccagccuacaccaacagcuucaccagaggcguguacuaccccgacaagguguucagauccagcgugcugcacucuacccaggaccuguuccugccuuucuucagcaacgugaccugguuccacgccauccacguguccggcaccaauggcaccaagagauucgacaaccccgugcugcccuucaacgacgggguguacuuugccagcaccgagaaguccaacaucaucagaggcuggaucuucggcaccacacuggacagcaagacccagagccugcugaucgugaacaacgccaccaacguggucaucaaagugugcgaguuccaguucugcaacgaccccuuccugggcgucuacuaccacaagaacaacaagagcuggauggaaagcgaguuccggguguacagcagcgccaacaacugcaccuucgaguacgugucccagccuuuccugauggaccuggaaggcaagcagggcaacuucaagaaccugcgcgaguucguguucaagaacaucgacggcuacuucaaaaucuacagcaagcacaccccuaucaaccucgugcgggaucugccucagggcuucucugcucuggaaccccugguggaucugcccaucggcaucaacaucacccgguuucagacacugcuggcccugcacagaagcuaccugacaccuggcgauagcagcagcggauggacagcuggugccgccgcuuacuaugugggcuaccugcagccuagaaccuuccugcugaaguacaacgagaacggcaccaucaccgacgccguggauugugcucuggauccucugagcgagacaaagugcacccugaaguccuucaccguggaaaagggcaucuaccagaccagcaacuuccgggugcagcccaccgaauccaucgugcgguuccccaauaucaccaaucugugccccuucggcgagguguucaaugccaccagauucgccucuguguacgccuggaaccggaagcggaucagcaauugcguggccgacuacuccgugcuguacaacuccgccagcuucagcaccuucaagugcuacggcguguccccuaccaagcugaacgaccugugcuucacaaacguguacgccgacagcuucgugauccggggagaugaagugcggcagauugccccuggacagacaggcaagaucgccgacuacaacuacaagcugcccgacgacuucaccggcugugugauugccuggaacagcaagaaccuggacuccaaagucggcggcaacuacaauuaccuguaccggcuguuccggaaguccaaucugaagcccuucgagcgggacaucagcaccgaaaucuaucaggccggcagcaccccuugcaacggcguggaaggcuucaacugcuacuucccacugcaguccuacggcuuucagcccacaaauggcgugggcuaucagcccuacagagugguggugcugagcuucgaacugcugcaugcuccugccacagugugcggcccuaagaaaagcaccaaucucgugaagaacaaaugcgugaacuucaacuucaacggccugaccggcaccggcgugcugacagagagcaacaagaaguuccugccauuccagcaguuuggccgggauaucgccgauaccacagacgccguuagagauccccagacacuggaaauccuggacaucaccccaugcagcuucggcggagugucugugaucaccccuggcaccaacaccagcaaucagguggcagugcuguaccagggcgugaacuguaccgaagugcccguggccauucacgccgaucagcugacaccuacauggcggguguacuccaccggcagcaauguguuucagaccagagccggcugucugaucggagccgagcacgugaacaauagcuacgagugcgacauccccaucggcgcuggcaucugugccagcuaccagacacagacaaacagccccagacgggcuagaagcguggccagccagagcaucauugccuacacaaugucucugggcgccgagaacagcguggccuacuccaacaacucuaucgcuauccccaccaacuucaccaucagcgugaccaccgagauccugccuguguccaugaccaagaccagcguggacugcaccauguacaucugcggcgauuccaccgagugcuccaaccugcugcugcaguacggcagcuucugcacccagcugaauagagcccugacagggaucgccguggaacaggacaagaacacccaagagguguucgcccaagugaagcaaaucuacaagaccccuccuaucaaggacuucggcggcuucaauuucagccagauucugcccgauccuagcaagcccagcaagcggagcuucaucgaggaccugcuguucaacaaagugacacuggccgacgccggcuucaucaagcaguauggcgauugucugggcgacauugccgccagggaucugauuugcgcccagaaguuuaacggacugacagugcugccuccucugcugaccgaugagaugaucgcccaguacacaucugcccugcuggccggcacaaucacaagcggcuggacauuuggagcuggcgccgcucugcagauccccuuugcuaugcagauggccuaccgguucaacggcaucggagugacccagaaugugcuguacgagaaccagaagcugaucgccaaccaguucaacagcgccaucggcaagauccaggacagccugagcagcacagcaagcgcccugggaaagcugcaggacguggucaaccagaaugcccaggcacugaacacccuggucaagcagcuguccuccaacuucggcgccaucagcucugugcugaacgauauccugagcagacuggacaaggucgaggccgaggugcagaucgacagacugaucacaggcagacugcagagccuccagacauacgugacccagcagcugaucagagccgccgagauuagagccucugccaaucuggccgccaccaagaugucugagugugugcugggccagagcaagagaguggacuuuugcggcaagggcuaccaccugaugagcuucccucagucugccccucacggcgugguguuucugcacgugacauaugugcccgcucaagagaagaauuucaccaccgcuccagccaucugccacgacggcaaagcccacuuuccuagagaaggcguguucguguccaacggcacccauugguucgugacacagcggaacuucuacgagccccagaucaucaccaccgacaacaccuucgugucuggcaacugcgacguugugaucggcauugugaacaauaccguguacgacccucugcagcccgagcuggacagcuucaaagaggaacuggacaaguacuuuaagaaccacacaagccccgacguggaccugggcgauaucagcggaaucaaugccagcgucgugaacauccagaaagagaucgaccggcugaacgagguggccaagaaucugaacgagagccugaucgaccugcaagaacuggggaaguacgagcaguacaucaaguggcccugguacaucuggcugggcuuuaucgccggacugauugccaucgugauggucacaaucaugcuguguugcaugaccagcugcuguagcugccugaagggcuguuguagcuguggcagcugcugcaaguucgacgaggacgauucugagcccgugcugaagggcgugaaacugcacuacaccugaggacuaguuauaagacugacuagcccgaugggccucccaacgggcccuccuccccuccuugcaccgagauuaaucaaaggcucuuuucagagccaccaaaaaaaaaaaaaaaaaaaaaaaaaaaaaaaaaaaaaaaaaaaaaaaaaaaaaaaaaaaaaaaaaaaaaaaaaaaaaaaaaaaaaaaaaaaaaaaaaaaaa

SEQ ID NO: 24145 - RNA, 4035 nt, Artificial Sequence
  SARS-CoV-2/Wuhan/WIV05/2019__EPI_ISL_402128 spike protein mRNA gc mod (1-1273)(S477N_D614G)
aggagaaagcuuaccauguucguguuucuggugcugcugccccugguguccagccagugugugaaccugaccaccagaacacagcugccuccagccuacaccaacagcuucaccagaggcguguacuaccccgacaagguguucagauccagcgugcugcacucuacccaggaccuguuccugccuuucuucagcaacgugaccugguuccacgccauccacguguccggcaccaauggcaccaagagauucgacaaccccgugcugcccuucaacgacgggguguacuuugccagcaccgagaaguccaacaucaucagaggcuggaucuucggcaccacacuggacagcaagacccagagccugcugaucgugaacaacgccaccaacguggucaucaaagugugcgaguuccaguucugcaacgaccccuuccugggcgucuacuaccacaagaacaacaagagcuggauggaaagcgaguuccggguguacagcagcgccaacaacugcaccuucgaguacgugucccagccuuuccugauggaccuggaaggcaagcagggcaacuucaagaaccugcgcgaguucguguucaagaacaucgacggcuacuucaaaaucuacagcaagcacaccccuaucaaccucgugcgggaucugccucagggcuucucugcucuggaaccccugguggaucugcccaucggcaucaacaucacccgguuucagacacugcuggcccugcacagaagcuaccugacaccuggcgauagcagcagcggauggacagcuggugccgccgcuuacuaugugggcuaccugcagccuagaaccuuccugcugaaguacaacgagaacggcaccaucaccgacgccguggauugugcucuggauccucugagcgagacaaagugcacccugaaguccuucaccguggaaaagggcaucuaccagaccagcaacuuccgggugcagcccaccgaauccaucgugcgguuccccaauaucaccaaucugugccccuucggcgagguguucaaugccaccagauucgccucuguguacgccuggaaccggaagcggaucagcaauugcguggccgacuacuccgugcuguacaacuccgccagcuucagcaccuucaagugcuacggcguguccccuaccaagcugaacgaccugugcuucacaaacguguacgccgacagcuucgugauccggggagaugaagugcggcagauugccccuggacagacaggcaagaucgccgacuacaacuacaagcugcccgacgacuucaccggcugugugauugccuggaacagcaacaaccuggacuccaaagucggcggcaacuacaauuaccuguaccggcuguuccggaaguccaaucugaagcccuucgagcgggacaucagcaccgaaaucuaucaggccggcaacaccccuugcaacggcguggaaggcuucaacugcuacuucccacugcaguccuacggcuuucagcccacaaauggcgugggcuaucagcccuacagagugguggugcugagcuucgaacugcugcaugcuccugccacagugugcggcccuaagaaaagcaccaaucucgugaagaacaaaugcgugaacuucaacuucaacggccugaccggcaccggcgugcugacagagagcaacaagaaguuccugccauuccagcaguuuggccgggauaucgccgauaccacagacgccguuagagauccccagacacuggaaauccuggacaucaccccaugcagcuucggcggagugucugugaucaccccuggcaccaacaccagcaaucagguggcagugcuguaccagggcgugaacuguaccgaagugcccguggccauucacgccgaucagcugacaccuacauggcggguguacuccaccggcagcaauguguuucagaccagagccggcugucugaucggagccgagcacgugaacaauagcuacgagugcgacauccccaucggcgcuggcaucugugccagcuaccagacacagacaaacagccccagacgggcuagaagcguggccagccagagcaucauugccuacacaaugucucugggcgccgagaacagcguggccuacuccaacaacucuaucgcuauccccaccaacuucaccaucagcgugaccaccgagauccugccuguguccaugaccaagaccagcguggacugcaccauguacaucugcggcgauuccaccgagugcuccaaccugcugcugcaguacggcagcuucugcacccagcugaauagagcccugacagggaucgccguggaacaggacaagaacacccaagagguguucgcccaagugaagcaaaucuacaagaccccuccuaucaaggacuucggcggcuucaauuucagccagauucugcccgauccuagcaagcccagcaagcggagcuucaucgaggaccugcuguucaacaaagugacacuggccgacgccggcuucaucaagcaguauggcgauugucugggcgacauugccgccagggaucugauuugcgcccagaaguuuaacggacugacagugcugccuccucugcugaccgaugagaugaucgcccaguacacaucugcccugcuggccggcacaaucacaagcggcuggacauuuggagcuggcgccgcucugcagauccccuuugcuaugcagauggccuaccgguucaacggcaucggagugacccagaaugugcuguacgagaaccagaagcugaucgccaaccaguucaacagcgccaucggcaagauccaggacagccugagcagcacagcaagcgcccugggaaagcugcaggacguggucaaccagaaugcccaggcacugaacacccuggucaagcagcuguccuccaacuucggcgccaucagcucugugcugaacgauauccugagcagacuggacaaggucgaggccgaggugcagaucgacagacugaucacaggcagacugcagagccuccagacauacgugacccagcagcugaucagagccgccgagauuagagccucugccaaucuggccgccaccaagaugucugagugugugcugggccagagcaagagaguggacuuuugcggcaagggcuaccaccugaugagcuucccucagucugccccucacggcgugguguuucugcacgugacauaugugcccgcucaagagaagaauuucaccaccgcuccagccaucugccacgacggcaaagcccacuuuccuagagaaggcguguucguguccaacggcacccauugguucgugacacagcggaacuucuacgagccccagaucaucaccaccgacaacaccuucgugucuggcaacugcgacguugugaucggcauugugaacaauaccguguacgacccucugcagcccgagcuggacagcuucaaagaggaacuggacaaguacuuuaagaaccacacaagccccgacguggaccugggcgauaucagcggaaucaaugccagcgucgugaacauccagaaagagaucgaccggcugaacgagguggccaagaaucugaacgagagccugaucgaccugcaagaacuggggaaguacgagcaguacaucaaguggcccugguacaucuggcugggcuuuaucgccggacugauugccaucgugauggucacaaucaugcuguguugcaugaccagcugcuguagcugccugaagggcuguuguagcuguggcagcugcugcaaguucgacgaggacgauucugagcccgugcugaagggcgugaaacugcacuacaccugaggacuaguuauaagacugacuagcccgaugggccucccaacgggcccuccuccccuccuugcaccgagauuaaucaaaggcucuuuucagagccaccaaaaaaaaaaaaaaaaaaaaaaaaaaaaaaaaaaaaaaaaaaaaaaaaaaaaaaaaaaaaaaaaaaaaaaaaaaaaaaaaaaaaaaaaaaaaaaaaaaaaa

SEQ ID NO: 24146 - RNA, 4035 nt, Artificial Sequence
  SARS-CoV-2/Wuhan/WIV05/2019__EPI_ISL_402128 spike protein mRNA gc mod (1-1273)(N501Y_D614G)
aggagaaagcuuaccauguucguguuucuggugcugcugccccugguguccagccagugugugaaccugaccaccagaacacagcugccuccagccuacaccaacagcuucaccagaggcguguacuaccccgacaagguguucagauccagcgugcugcacucuacccaggaccuguuccugccuuucuucagcaacgugaccugguuccacgccauccacguguccggcaccaauggcaccaagagauucgacaaccccgugcugcccuucaacgacgggguguacuuugccagcaccgagaaguccaacaucaucagaggcuggaucuucggcaccacacuggacagcaagacccagagccugcugaucgugaacaacgccaccaacguggucaucaaagugugcgaguuccaguucugcaacgaccccuuccugggcgucuacuaccacaagaacaacaagagcuggauggaaagcgaguuccggguguacagcagcgccaacaacugcaccuucgaguacgugucccagccuuuccugauggaccuggaaggcaagcagggcaacuucaagaaccugcgcgaguucguguucaagaacaucgacggcuacuucaaaaucuacagcaagcacaccccuaucaaccucgugcgggaucugccucagggcuucucugcucuggaaccccugguggaucugcccaucggcaucaacaucacccgguuucagacacugcuggcccugcacagaagcuaccugacaccuggcgauagcagcagcggauggacagcuggugccgccgcuuacuaugugggcuaccugcagccuagaaccuuccugcugaaguacaacgagaacggcaccaucaccgacgccguggauugugcucuggauccucugagcgagacaaagugcacccugaaguccuucaccguggaaaagggcaucuaccagaccagcaacuuccgggugcagcccaccgaauccaucgugcgguuccccaauaucaccaaucugugccccuucggcgagguguucaaugccaccagauucgccucuguguacgccuggaaccggaagcggaucagcaauugcguggccgacuacuccgugcuguacaacuccgccagcuucagcaccuucaagugcuacggcguguccccuaccaagcugaacgaccugugcuucacaaacguguacgccgacagcuucgugauccggggagaugaagugcggcagauugccccuggacagacaggcaagaucgccgacuacaacuacaagcugcccgacgacuucaccggcugugugauugccuggaacagcaacaaccuggacuccaaagucggcggcaacuacaauuaccuguaccggcuguuccggaaguccaaucugaagcccuucgagcgggacaucagcaccgaaaucuaucaggccggcagcaccccuugcaacggcguggaaggcuucaacugcuacuucccacugcaguccuacggcuuucagcccacauacggcgugggcuaucagcccuacagagugguggugcugagcuucgaacugcugcaugcuccugccacagugugcggcccuaagaaaagcaccaaucucgugaagaacaaaugcgugaacuucaacuucaacggccugaccggcaccggcgugcugacagagagcaacaagaaguuccugccauuccagcaguuuggccgggauaucgccgauaccacagacgccguuagagauccccagacacuggaaauccuggacaucaccccaugcagcuucggcggagugucugugaucaccccuggcaccaacaccagcaaucagguggcagugcuguaccagggcgugaacuguaccgaagugcccguggccauucacgccgaucagcugacaccuacauggcggguguacuccaccggcagcaauguguuucagaccagagccggcugucugaucggagccgagcacgugaacaauagcuacgagugcgacauccccaucggcgcuggcaucugugccagcuaccagacacagacaaacagccccagacgggcuagaagcguggccagccagagcaucauugccuacacaaugucucugggcgccgagaacagcguggccuacuccaacaacucuaucgcuauccccaccaacuucaccaucagcgugaccaccgagauccugccuguguccaugaccaagaccagcguggacugcaccauguacaucugcggcgauuccaccgagugcuccaaccugcugcugcaguacggcagcuucugcacccagcugaauagagcccugacagggaucgccguggaacaggacaagaacacccaagagguguucgcccaagugaagcaaaucuacaagaccccuccuaucaaggacuucggcggcuucaauuucagccagauucugcccgauccuagcaagcccagcaagcggagcuucaucgaggaccugcuguucaacaaagugacacuggccgacgccggcuucaucaagcaguauggcgauugucugggcgacauugccgccagggaucugauuugcgcccagaaguuuaacggacugacagugcugccuccucugcugaccgaugagaugaucgcccaguacacaucugcccugcuggccggcacaaucacaagcggcuggacauuuggagcuggcgccgcucugcagauccccuuugcuaugcagauggccuaccgguucaacggcaucggagugacccagaaugugcuguacgagaaccagaagcugaucgccaaccaguucaacagcgccaucggcaagauccaggacagccugagcagcacagcaagcgcccugggaaagcugcaggacguggucaaccagaaugcccaggcacugaacacccuggucaagcagcuguccuccaacuucggcgccaucagcucugugcugaacgauauccugagcagacuggacaaggucgaggccgaggugcagaucgacagacugaucacaggcagacugcagagccuccagacauacgugacccagcagcugaucagagccgccgagauuagagccucugccaaucuggccgccaccaagaugucugagugugugcugggccagagcaagagaguggacuuuugcggcaagggcuaccaccugaugagcuucccucagucugccccucacggcgugguguuucugcacgugacauaugugcccgcucaagagaagaauuucaccaccgcuccagccaucugccacgacggcaaagcccacuuuccuagagaaggcguguucguguccaacggcacccauugguucgugacacagcggaacuucuacgagccccagaucaucaccaccgacaacaccuucgugucuggcaacugcgacguugugaucggcauugugaacaauaccguguacgacccucugcagcccgagcuggacagcuucaaagaggaacuggacaaguacuuuaagaaccacacaagccccgacguggaccugggcgauaucagcggaaucaaugccagcgucgugaacauccagaaagagaucgaccggcugaacgagguggccaagaaucugaacgagagccugaucgaccugcaagaacuggggaaguacgagcaguacaucaaguggcccugguacaucuggcugggcuuuaucgccggacugauugccaucgugauggucacaaucaugcuguguugcaugaccagcugcuguagcugccugaagggcuguuguagcuguggcagcugcugcaaguucgacgaggacgauucugagcccgugcugaagggcgugaaacugcacuacaccugaggacuaguuauaagacugacuagcccgaugggccucccaacgggcccuccuccccuccuugcaccgagauuaaucaaaggcucuuuucagagccaccaaaaaaaaaaaaaaaaaaaaaaaaaaaaaaaaaaaaaaaaaaaaaaaaaaaaaaaaaaaaaaaaaaaaaaaaaaaaaaaaaaaaaaaaaaaaaaaaaaaaa

SEQ ID NO: 24147 - RNA, 4029 nt, Artificial Sequence
  SARS-CoV-2/Wuhan/WIV05/2019__EPI_ISL_402128 spike protein mRNA gc mod (1-1273)(H69del_V70del_D614G)
aggagaaagcuuaccauguucguguuucuggugcugcugccccugguguccagccagugugugaaccugaccaccagaacacagcugccuccagccuacaccaacagcuucaccagaggcguguacuaccccgacaagguguucagauccagcgugcugcacucuacccaggaccuguuccugccuuucuucagcaacgugaccugguuccacgccaucuccggcaccaauggcaccaagagauucgacaaccccgugcugcccuucaacgacgggguguacuuugccagcaccgagaaguccaacaucaucagaggcuggaucuucggcaccacacuggacagcaagacccagagccugcugaucgugaacaacgccaccaacguggucaucaaagugugcgaguuccaguucugcaacgaccccuuccugggcgucuacuaccacaagaacaacaagagcuggauggaaagcgaguuccggguguacagcagcgccaacaacugcaccuucgaguacgugucccagccuuuccugauggaccuggaaggcaagcagggcaacuucaagaaccugcgcgaguucguguucaagaacaucgacggcuacuucaaaaucuacagcaagcacaccccuaucaaccucgugcgggaucugccucagggcuucucugcucuggaaccccugguggaucugcccaucggcaucaacaucacccgguuucagacacugcuggcccugcacagaagcuaccugacaccuggcgauagcagcagcggauggacagcuggugccgccgcuuacuaugugggcuaccugcagccuagaaccuuccugcugaaguacaacgagaacggcaccaucaccgacgccguggauugugcucuggauccucugagcgagacaaagugcacccugaaguccuucaccguggaaaagggcaucuaccagaccagcaacuuccgggugcagcccaccgaauccaucgugcgguuccccaauaucaccaaucugugccccuucggcgagguguucaaugccaccagauucgccucuguguacgccuggaaccggaagcggaucagcaauugcguggccgacuacuccgugcuguacaacuccgccagcuucagcaccuucaagugcuacggcguguccccuaccaagcugaacgaccugugcuucacaaacguguacgccgacagcuucgugauccggggagaugaagugcggcagauugccccuggacagacaggcaagaucgccgacuacaacuacaagcugcccgacgacuucaccggcugugugauugccuggaacagcaacaaccuggacuccaaagucggcggcaacuacaauuaccuguaccggcuguuccggaaguccaaucugaagcccuucgagcgggacaucagcaccgaaaucuaucaggccggcagcaccccuugcaacggcguggaaggcuucaacugcuacuucccacugcaguccuacggcuuucagcccacaaauggcgugggcuaucagcccuacagagugguggugcugagcuucgaacugcugcaugcuccugccacagugugcggcccuaagaaaagcaccaaucucgugaagaacaaaugcgugaacuucaacuucaacggccugaccggcaccggcgugcugacagagagcaacaagaaguuccugccauuccagcaguuuggccgggauaucgccgauaccacagacgccguuagagauccccagacacuggaaauccuggacaucaccccaugcagcuucggcggagugucugugaucaccccuggcaccaacaccagcaaucagguggcagugcuguaccagggcgugaacuguaccgaagugcccguggccauucacgccgaucagcugacaccuacauggcggguguacuccaccggcagcaauguguuucagaccagagccggcugucugaucggagccgagcacgugaacaauagcuacgagugcgacauccccaucggcgcuggcaucugugccagcuaccagacacagacaaacagccccagacgggcuagaagcguggccagccagagcaucauugccuacacaaugucucugggcgccgagaacagcguggccuacuccaacaacucuaucgcuauccccaccaacuucaccaucagcgugaccaccgagauccugccuguguccaugaccaagaccagcguggacugcaccauguacaucugcggcgauuccaccgagugcuccaaccugcugcugcaguacggcagcuucugcacccagcugaauagagcccugacagggaucgccguggaacaggacaagaacacccaagagguguucgcccaagugaagcaaaucuacaagaccccuccuaucaaggacuucggcggcuucaauuucagccagauucugcccgauccuagcaagcccagcaagcggagcuucaucgaggaccugcuguucaacaaagugacacuggccgacgccggcuucaucaagcaguauggcgauugucugggcgacauugccgccagggaucugauuugcgcccagaaguuuaacggacugacagugcugccuccucugcugaccgaugagaugaucgcccaguacacaucugcccugcuggccggcacaaucacaagcggcuggacauuuggagcuggcgccgcucugcagauccccuuugcuaugcagauggccuaccgguucaacggcaucggagugacccagaaugugcuguacgagaaccagaagcugaucgccaaccaguucaacagcgccaucggcaagauccaggacagccugagcagcacagcaagcgcccugggaaagcugcaggacguggucaaccagaaugcccaggcacugaacacccuggucaagcagcuguccuccaacuucggcgccaucagcucugugcugaacgauauccugagcagacuggacaaggucgaggccgaggugcagaucgacagacugaucacaggcagacugcagagccuccagacauacgugacccagcagcugaucagagccgccgagauuagagccucugccaaucuggccgccaccaagaugucugagugugugcugggccagagcaagagaguggacuuuugcggcaagggcuaccaccugaugagcuucccucagucugccccucacggcgugguguuucugcacgugacauaugugcccgcucaagagaagaauuucaccaccgcuccagccaucugccacgacggcaaagcccacuuuccuagagaaggcguguucguguccaacggcacccauugguucgugacacagcggaacuucuacgagccccagaucaucaccaccgacaacaccuucgugucuggcaacugcgacguugugaucggcauugugaacaauaccguguacgacccucugcagcccgagcuggacagcuucaaagaggaacuggacaaguacuuuaagaaccacacaagccccgacguggaccugggcgauaucagcggaaucaaugccagcgucgugaacauccagaaagagaucgaccggcugaacgagguggccaagaaucugaacgagagccugaucgaccugcaagaacuggggaaguacgagcaguacaucaaguggcccugguacaucuggcugggcuuuaucgccggacugauugccaucgugauggucacaaucaugcuguguugcaugaccagcugcuguagcugccugaagggcuguuguagcuguggcagcugcugcaaguucgacgaggacgauucugagcccgugcugaagggcgugaaacugcacuacaccugaggacuaguuauaagacugacuagcccgaugggccucccaacgggcccuccuccccuccuugcaccgagauuaaucaaaggcucuuuucagagccaccaaaaaaaaaaaaaaaaaaaaaaaaaaaaaaaaaaaaaaaaaaaaaaaaaaaaaaaaaaaaaaaaaaaaaaaaaaaaaaaaaaaaaaaaaaaaaaaaaaaaa

SEQ ID NO: 24148 - RNA, 4035 nt, Artificial Sequence
  SARS-CoV-2/Wuhan/WIV05/2019__EPI_ISL_402128 spike protein mRNA gc mod (1-1273)(Y453F_D614G)
aggagaaagcuuaccauguucguguuucuggugcugcugccccugguguccagccagugugugaaccugaccaccagaacacagcugccuccagccuacaccaacagcuucaccagaggcguguacuaccccgacaagguguucagauccagcgugcugcacucuacccaggaccuguuccugccuuucuucagcaacgugaccugguuccacgccauccacguguccggcaccaauggcaccaagagauucgacaaccccgugcugcccuucaacgacgggguguacuuugccagcaccgagaaguccaacaucaucagaggcuggaucuucggcaccacacuggacagcaagacccagagccugcugaucgugaacaacgccaccaacguggucaucaaagugugcgaguuccaguucugcaacgaccccuuccugggcgucuacuaccacaagaacaacaagagcuggauggaaagcgaguuccggguguacagcagcgccaacaacugcaccuucgaguacgugucccagccuuuccugauggaccuggaaggcaagcagggcaacuucaagaaccugcgcgaguucguguucaagaacaucgacggcuacuucaaaaucuacagcaagcacaccccuaucaaccucgugcgggaucugccucagggcuucucugcucuggaaccccugguggaucugcccaucggcaucaacaucacccgguuucagacacugcuggcccugcacagaagcuaccugacaccuggcgauagcagcagcggauggacagcuggugccgccgcuuacuaugugggcuaccugcagccuagaaccuuccugcugaaguacaacgagaacggcaccaucaccgacgccguggauugugcucuggauccucugagcgagacaaagugcacccugaaguccuucaccguggaaaagggcaucuaccagaccagcaacuuccgggugcagcccaccgaauccaucgugcgguuccccaauaucaccaaucugugccccuucggcgagguguucaaugccaccagauucgccucuguguacgccuggaaccggaagcggaucagcaauugcguggccgacuacuccgugcuguacaacuccgccagcuucagcaccuucaagugcuacggcguguccccuaccaagcugaacgaccugugcuucacaaacguguacgccgacagcuucgugauccggggagaugaagugcggcagauugccccuggacagacaggcaagaucgccgacuacaacuacaagcugcccgacgacuucaccggcugugugauugccuggaacagcaacaaccuggacuccaaagucggcggcaacuacaauuaccuguuccggcuguuccggaaguccaaucugaagcccuucgagcgggacaucagcaccgaaaucuaucaggccggcagcaccccuugcaacggcguggaaggcuucaacugcuacuucccacugcaguccuacggcuuucagcccacaaauggcgugggcuaucagcccuacagagugguggugcugagcuucgaacugcugcaugcuccugccacagugugcggcccuaagaaaagcaccaaucucgugaagaacaaaugcgugaacuucaacuucaacggccugaccggcaccggcgugcugacagagagcaacaagaaguuccugccauuccagcaguuuggccgggauaucgccgauaccacagacgccguuagagauccccagacacuggaaauccuggacaucaccccaugcagcuucggcggagugucugugaucaccccuggcaccaacaccagcaaucagguggcagugcuguaccagggcgugaacuguaccgaagugcccguggccauucacgccgaucagcugacaccuacauggcggguguacuccaccggcagcaauguguuucagaccagagccggcugucugaucggagccgagcacgugaacaauagcuacgagugcgacauccccaucggcgcuggcaucugugccagcuaccagacacagacaaacagccccagacgggcuagaagcguggccagccagagcaucauugccuacacaaugucucugggcgccgagaacagcguggccuacuccaacaacucuaucgcuauccccaccaacuucaccaucagcgugaccaccgagauccugccuguguccaugaccaagaccagcguggacugcaccauguacaucugcggcgauuccaccgagugcuccaaccugcugcugcaguacggcagcuucugcacccagcugaauagagcccugacagggaucgccguggaacaggacaagaacacccaagagguguucgcccaagugaagcaaaucuacaagaccccuccuaucaaggacuucggcggcuucaauuucagccagauucugcccgauccuagcaagcccagcaagcggagcuucaucgaggaccugcuguucaacaaagugacacuggccgacgccggcuucaucaagcaguauggcgauugucugggcgacauugccgccagggaucugauuugcgcccagaaguuuaacggacugacagugcugccuccucugcugaccgaugagaugaucgcccaguacacaucugcccugcuggccggcacaaucacaagcggcuggacauuuggagcuggcgccgcucugcagauccccuuugcuaugcagauggccuaccgguucaacggcaucggagugacccagaaugugcuguacgagaaccagaagcugaucgccaaccaguucaacagcgccaucggcaagauccaggacagccugagcagcacagcaagcgcccugggaaagcugcaggacguggucaaccagaaugcccaggcacugaacacccuggucaagcagcuguccuccaacuucggcgccaucagcucugugcugaacgauauccugagcagacuggacaaggucgaggccgaggugcagaucgacagacugaucacaggcagacugcagagccuccagacauacgugacccagcagcugaucagagccgccgagauuagagccucugccaaucuggccgccaccaagaugucugagugugugcugggccagagcaagagaguggacuuuugcggcaagggcuaccaccugaugagcuucccucagucugccccucacggcgugguguuucugcacgugacauaugugcccgcucaagagaagaauuucaccaccgcuccagccaucugccacgacggcaaagcccacuuuccuagagaaggcguguucguguccaacggcacccauugguucgugacacagcggaacuucuacgagccccagaucaucaccaccgacaacaccuucgugucuggcaacugcgacguugugaucggcauugugaacaauaccguguacgacccucugcagcccgagcuggacagcuucaaagaggaacuggacaaguacuuuaagaaccacacaagccccgacguggaccugggcgauaucagcggaaucaaugccagcgucgugaacauccagaaagagaucgaccggcugaacgagguggccaagaaucugaacgagagccugaucgaccugcaagaacuggggaaguacgagcaguacaucaaguggcccugguacaucuggcugggcuuuaucgccggacugauugccaucgugauggucacaaucaugcuguguugcaugaccagcugcuguagcugccugaagggcuguuguagcuguggcagcugcugcaaguucgacgaggacgauucugagcccgugcugaagggcgugaaacugcacuacaccugaggacuaguuauaagacugacuagcccgaugggccucccaacgggcccuccuccccuccuugcaccgagauuaaucaaaggcucuuuucagagccaccaaaaaaaaaaaaaaaaaaaaaaaaaaaaaaaaaaaaaaaaaaaaaaaaaaaaaaaaaaaaaaaaaaaaaaaaaaaaaaaaaaaaaaaaaaaaaaaaaaaaa

SEQ ID NO: 24149 - RNA, 4035 nt, Artificial Sequence
  SARS-CoV-2/Wuhan/WIV05/2019__EPI_ISL_402128 spike protein mRNA gc mod (1-1273)(D614G_I692V)
aggagaaagcuuaccauguucguguuucuggugcugcugccccugguguccagccagugugugaaccugaccaccagaacacagcugccuccagccuacaccaacagcuucaccagaggcguguacuaccccgacaagguguucagauccagcgugcugcacucuacccaggaccuguuccugccuuucuucagcaacgugaccugguuccacgccauccacguguccggcaccaauggcaccaagagauucgacaaccccgugcugcccuucaacgacgggguguacuuugccagcaccgagaaguccaacaucaucagaggcuggaucuucggcaccacacuggacagcaagacccagagccugcugaucgugaacaacgccaccaacguggucaucaaagugugcgaguuccaguucugcaacgaccccuuccugggcgucuacuaccacaagaacaacaagagcuggauggaaagcgaguuccggguguacagcagcgccaacaacugcaccuucgaguacgugucccagccuuuccugauggaccuggaaggcaagcagggcaacuucaagaaccugcgcgaguucguguucaagaacaucgacggcuacuucaaaaucuacagcaagcacaccccuaucaaccucgugcgggaucugccucagggcuucucugcucuggaaccccugguggaucugcccaucggcaucaacaucacccgguuucagacacugcuggcccugcacagaagcuaccugacaccuggcgauagcagcagcggauggacagcuggugccgccgcuuacuaugugggcuaccugcagccuagaaccuuccugcugaaguacaacgagaacggcaccaucaccgacgccguggauugugcucuggauccucugagcgagacaaagugcacccugaaguccuucaccguggaaaagggcaucuaccagaccagcaacuuccgggugcagcccaccgaauccaucgugcgguuccccaauaucaccaaucugugccccuucggcgagguguucaaugccaccagauucgccucuguguacgccuggaaccggaagcggaucagcaauugcguggccgacuacuccgugcuguacaacuccgccagcuucagcaccuucaagugcuacggcguguccccuaccaagcugaacgaccugugcuucacaaacguguacgccgacagcuucgugauccggggagaugaagugcggcagauugccccuggacagacaggcaagaucgccgacuacaacuacaagcugcccgacgacuucaccggcugugugauugccuggaacagcaacaaccuggacuccaaagucggcggcaacuacaauuaccuguaccggcuguuccggaaguccaaucugaagcccuucgagcgggacaucagcaccgaaaucuaucaggccggcagcaccccuugcaacggcguggaaggcuucaacugcuacuucccacugcaguccuacggcuuucagcccacaaauggcgugggcuaucagcccuacagagugguggugcugagcuucgaacugcugcaugcuccugccacagugugcggcccuaagaaaagcaccaaucucgugaagaacaaaugcgugaacuucaacuucaacggccugaccggcaccggcgugcugacagagagcaacaagaaguuccugccauuccagcaguuuggccgggauaucgccgauaccacagacgccguuagagauccccagacacuggaaauccuggacaucaccccaugcagcuucggcggagugucugugaucaccccuggcaccaacaccagcaaucagguggcagugcuguaccagggcgugaacuguaccgaagugcccguggccauucacgccgaucagcugacaccuacauggcggguguacuccaccggcagcaauguguuucagaccagagccggcugucugaucggagccgagcacgugaacaauagcuacgagugcgacauccccaucggcgcuggcaucugugccagcuaccagacacagacaaacagccccagacgggcuagaagcguggccagccagagcgugauugccuacacaaugucucugggcgccgagaacagcguggccuacuccaacaacucuaucgcuauccccaccaacuucaccaucagcgugaccaccgagauccugccuguguccaugaccaagaccagcguggacugcaccauguacaucugcggcgauuccaccgagugcuccaaccugcugcugcaguacggcagcuucugcacccagcugaauagagcccugacagggaucgccguggaacaggacaagaacacccaagagguguucgcccaagugaagcaaaucuacaagaccccuccuaucaaggacuucggcggcuucaauuucagccagauucugcccgauccuagcaagcccagcaagcggagcuucaucgaggaccugcuguucaacaaagugacacuggccgacgccggcuucaucaagcaguauggcgauugucugggcgacauugccgccagggaucugauuugcgcccagaaguuuaacggacugacagugcugccuccucugcugaccgaugagaugaucgcccaguacacaucugcccugcuggccggcacaaucacaagcggcuggacauuuggagcuggcgccgcucugcagauccccuuugcuaugcagauggccuaccgguucaacggcaucggagugacccagaaugugcuguacgagaaccagaagcugaucgccaaccaguucaacagcgccaucggcaagauccaggacagccugagcagcacagcaagcgcccugggaaagcugcaggacguggucaaccagaaugcccaggcacugaacacccuggucaagcagcuguccuccaacuucggcgccaucagcucugugcugaacgauauccugagcagacuggacaaggucgaggccgaggugcagaucgacagacugaucacaggcagacugcagagccuccagacauacgugacccagcagcugaucagagccgccgagauuagagccucugccaaucuggccgccaccaagaugucugagugugugcugggccagagcaagagaguggacuuuugcggcaagggcuaccaccugaugagcuucccucagucugccccucacggcgugguguuucugcacgugacauaugugcccgcucaagagaagaauuucaccaccgcuccagccaucugccacgacggcaaagcccacuuuccuagagaaggcguguucguguccaacggcacccauugguucgugacacagcggaacuucuacgagccccagaucaucaccaccgacaacaccuucgugucuggcaacugcgacguugugaucggcauugugaacaauaccguguacgacccucugcagcccgagcuggacagcuucaaagaggaacuggacaaguacuuuaagaaccacacaagccccgacguggaccugggcgauaucagcggaaucaaugccagcgucgugaacauccagaaagagaucgaccggcugaacgagguggccaagaaucugaacgagagccugaucgaccugcaagaacuggggaaguacgagcaguacaucaaguggcccugguacaucuggcugggcuuuaucgccggacugauugccaucgugauggucacaaucaugcuguguugcaugaccagcugcuguagcugccugaagggcuguuguagcuguggcagcugcugcaaguucgacgaggacgauucugagcccgugcugaagggcgugaaacugcacuacaccugaggacuaguuauaagacugacuagcccgaugggccucccaacgggcccuccuccccuccuugcaccgagauuaaucaaaggcucuuuucagagccaccaaaaaaaaaaaaaaaaaaaaaaaaaaaaaaaaaaaaaaaaaaaaaaaaaaaaaaaaaaaaaaaaaaaaaaaaaaaaaaaaaaaaaaaaaaaaaaaaaaaaa

SEQ ID NO: 24150 - RNA, 4035 nt, Artificial Sequence
  SARS-CoV-2/Wuhan/WIV05/2019__EPI_ISL_402128 spike protein mRNA gc mod (1-1273)(D614G_M1229I)
aggagaaagcuuaccauguucguguuucuggugcugcugccccugguguccagccagugugugaaccugaccaccagaacacagcugccuccagccuacaccaacagcuucaccagaggcguguacuaccccgacaagguguucagauccagcgugcugcacucuacccaggaccuguuccugccuuucuucagcaacgugaccugguuccacgccauccacguguccggcaccaauggcaccaagagauucgacaaccccgugcugcccuucaacgacgggguguacuuugccagcaccgagaaguccaacaucaucagaggcuggaucuucggcaccacacuggacagcaagacccagagccugcugaucgugaacaacgccaccaacguggucaucaaagugugcgaguuccaguucugcaacgaccccuuccugggcgucuacuaccacaagaacaacaagagcuggauggaaagcgaguuccggguguacagcagcgccaacaacugcaccuucgaguacgugucccagccuuuccugauggaccuggaaggcaagcagggcaacuucaagaaccugcgcgaguucguguucaagaacaucgacggcuacuucaaaaucuacagcaagcacaccccuaucaaccucgugcgggaucugccucagggcuucucugcucuggaaccccugguggaucugcccaucggcaucaacaucacccgguuucagacacugcuggcccugcacagaagcuaccugacaccuggcgauagcagcagcggauggacagcuggugccgccgcuuacuaugugggcuaccugcagccuagaaccuuccugcugaaguacaacgagaacggcaccaucaccgacgccguggauugugcucuggauccucugagcgagacaaagugcacccugaaguccuucaccguggaaaagggcaucuaccagaccagcaacuuccgggugcagcccaccgaauccaucgugcgguuccccaauaucaccaaucugugccccuucggcgagguguucaaugccaccagauucgccucuguguacgccuggaaccggaagcggaucagcaauugcguggccgacuacuccgugcuguacaacuccgccagcuucagcaccuucaagugcuacggcguguccccuaccaagcugaacgaccugugcuucacaaacguguacgccgacagcuucgugauccggggagaugaagugcggcagauugccccuggacagacaggcaagaucgccgacuacaacuacaagcugcccgacgacuucaccggcugugugauugccuggaacagcaacaaccuggacuccaaagucggcggcaacuacaauuaccuguaccggcuguuccggaaguccaaucugaagcccuucgagcgggacaucagcaccgaaaucuaucaggccggcagcaccccuugcaacggcguggaaggcuucaacugcuacuucccacugcaguccuacggcuuucagcccacaaauggcgugggcuaucagcccuacagagugguggugcugagcuucgaacugcugcaugcuccugccacagugugcggcccuaagaaaagcaccaaucucgugaagaacaaaugcgugaacuucaacuucaacggccugaccggcaccggcgugcugacagagagcaacaagaaguuccugccauuccagcaguuuggccgggauaucgccgauaccacagacgccguuagagauccccagacacuggaaauccuggacaucaccccaugcagcuucggcggagugucugugaucaccccuggcaccaacaccagcaaucagguggcagugcuguaccagggcgugaacuguaccgaagugcccguggccauucacgccgaucagcugacaccuacauggcggguguacuccaccggcagcaauguguuucagaccagagccggcugucugaucggagccgagcacgugaacaauagcuacgagugcgacauccccaucggcgcuggcaucugugccagcuaccagacacagacaaacagccccagacgggcuagaagcguggccagccagagcaucauugccuacacaaugucucugggcgccgagaacagcguggccuacuccaacaacucuaucgcuauccccaccaacuucaccaucagcgugaccaccgagauccugccuguguccaugaccaagaccagcguggacugcaccauguacaucugcggcgauuccaccgagugcuccaaccugcugcugcaguacggcagcuucugcacccagcugaauagagcccugacagggaucgccguggaacaggacaagaacacccaagagguguucgcccaagugaagcaaaucuacaagaccccuccuaucaaggacuucggcggcuucaauuucagccagauucugcccgauccuagcaagcccagcaagcggagcuucaucgaggaccugcuguucaacaaagugacacuggccgacgccggcuucaucaagcaguauggcgauugucugggcgacauugccgccagggaucugauuugcgcccagaaguuuaacggacugacagugcugccuccucugcugaccgaugagaugaucgcccaguacacaucugcccugcuggccggcacaaucacaagcggcuggacauuuggagcuggcgccgcucugcagauccccuuugcuaugcagauggccuaccgguucaacggcaucggagugacccagaaugugcuguacgagaaccagaagcugaucgccaaccaguucaacagcgccaucggcaagauccaggacagccugagcagcacagcaagcgcccugggaaagcugcaggacguggucaaccagaaugcccaggcacugaacacccuggucaagcagcuguccuccaacuucggcgccaucagcucugugcugaacgauauccugagcagacuggacaaggucgaggccgaggugcagaucgacagacugaucacaggcagacugcagagccuccagacauacgugacccagcagcugaucagagccgccgagauuagagccucugccaaucuggccgccaccaagaugucugagugugugcugggccagagcaagagaguggacuuuugcggcaagggcuaccaccugaugagcuucccucagucugccccucacggcgugguguuucugcacgugacauaugugcccgcucaagagaagaauuucaccaccgcuccagccaucugccacgacggcaaagcccacuuuccuagagaaggcguguucguguccaacggcacccauugguucgugacacagcggaacuucuacgagccccagaucaucaccaccgacaacaccuucgugucuggcaacugcgacguugugaucggcauugugaacaauaccguguacgacccucugcagcccgagcuggacagcuucaaagaggaacuggacaaguacuuuaagaaccacacaagccccgacguggaccugggcgauaucagcggaaucaaugccagcgucgugaacauccagaaagagaucgaccggcugaacgagguggccaagaaucugaacgagagccugaucgaccugcaagaacuggggaaguacgagcaguacaucaaguggcccugguacaucuggcugggcuuuaucgccggacugauugccaucgugaucgucacaaucaugcuguguugcaugaccagcugcuguagcugccugaagggcuguuguagcuguggcagcugcugcaaguucgacgaggacgauucugagcccgugcugaagggcgugaaacugcacuacaccugaggacuaguuauaagacugacuagcccgaugggccucccaacgggcccuccuccccuccuugcaccgagauuaaucaaaggcucuuuucagagccaccaaaaaaaaaaaaaaaaaaaaaaaaaaaaaaaaaaaaaaaaaaaaaaaaaaaaaaaaaaaaaaaaaaaaaaaaaaaaaaaaaaaaaaaaaaaaaaaaaaaaa

SEQ ID NO: 24151 - RNA, 4029 nt, Artificial Sequence
  SARS-CoV-2/Wuhan/WIV05/2019__EPI_ISL_402128 spike protein mRNA gc mod (1-1273)(H69del_V70del_A222V_Y453F_S477N_D614G_I692V)
aggagaaagcuuaccauguucguguuucuggugcugcugccccugguguccagccagugugugaaccugaccaccagaacacagcugccuccagccuacaccaacagcuucaccagaggcguguacuaccccgacaagguguucagauccagcgugcugcacucuacccaggaccuguuccugccuuucuucagcaacgugaccugguuccacgccaucuccggcaccaauggcaccaagagauucgacaaccccgugcugcccuucaacgacgggguguacuuugccagcaccgagaaguccaacaucaucagaggcuggaucuucggcaccacacuggacagcaagacccagagccugcugaucgugaacaacgccaccaacguggucaucaaagugugcgaguuccaguucugcaacgaccccuuccugggcgucuacuaccacaagaacaacaagagcuggauggaaagcgaguuccggguguacagcagcgccaacaacugcaccuucgaguacgugucccagccuuuccugauggaccuggaaggcaagcagggcaacuucaagaaccugcgcgaguucguguucaagaacaucgacggcuacuucaaaaucuacagcaagcacaccccuaucaaccucgugcgggaucugccucagggcuucucugugcuggaaccccugguggaucugcccaucggcaucaacaucacccgguuucagacacugcuggcccugcacagaagcuaccugacaccuggcgauagcagcagcggauggacagcuggugccgccgcuuacuaugugggcuaccugcagccuagaaccuuccugcugaaguacaacgagaacggcaccaucaccgacgccguggauugugcucuggauccucugagcgagacaaagugcacccugaaguccuucaccguggaaaagggcaucuaccagaccagcaacuuccgggugcagcccaccgaauccaucgugcgguuccccaauaucaccaaucugugccccuucggcgagguguucaaugccaccagauucgccucuguguacgccuggaaccggaagcggaucagcaauugcguggccgacuacuccgugcuguacaacuccgccagcuucagcaccuucaagugcuacggcguguccccuaccaagcugaacgaccugugcuucacaaacguguacgccgacagcuucgugauccggggagaugaagugcggcagauugccccuggacagacaggcaagaucgccgacuacaacuacaagcugcccgacgacuucaccggcugugugauugccuggaacagcaacaaccuggacuccaaagucggcggcaacuacaauuaccuguuccggcuguuccggaaguccaaucugaagcccuucgagcgggacaucagcaccgaaaucuaucaggccggcaacaccccuugcaacggcguggaaggcuucaacugcuacuucccacugcaguccuacggcuuucagcccacaaauggcgugggcuaucagcccuacagagugguggugcugagcuucgaacugcugcaugcuccugccacagugugcggcccuaagaaaagcaccaaucucgugaagaacaaaugcgugaacuucaacuucaacggccugaccggcaccggcgugcugacagagagcaacaagaaguuccugccauuccagcaguuuggccgggauaucgccgauaccacagacgccguuagagauccccagacacuggaaauccuggacaucaccccaugcagcuucggcggagugucugugaucaccccuggcaccaacaccagcaaucagguggcagugcuguaccagggcgugaacuguaccgaagugcccguggccauucacgccgaucagcugacaccuacauggcggguguacuccaccggcagcaauguguuucagaccagagccggcugucugaucggagccgagcacgugaacaauagcuacgagugcgacauccccaucggcgcuggcaucugugccagcuaccagacacagacaaacagccccagacgggcuagaagcguggccagccagagcgugauugccuacacaaugucucugggcgccgagaacagcguggccuacuccaacaacucuaucgcuauccccaccaacuucaccaucagcgugaccaccgagauccugccuguguccaugaccaagaccagcguggacugcaccauguacaucugcggcgauuccaccgagugcuccaaccugcugcugcaguacggcagcuucugcacccagcugaauagagcccugacagggaucgccguggaacaggacaagaacacccaagagguguucgcccaagugaagcaaaucuacaagaccccuccuaucaaggacuucggcggcuucaauuucagccagauucugcccgauccuagcaagcccagcaagcggagcuucaucgaggaccugcuguucaacaaagugacacuggccgacgccggcuucaucaagcaguauggcgauugucugggcgacauugccgccagggaucugauuugcgcccagaaguuuaacggacugacagugcugccuccucugcugaccgaugagaugaucgcccaguacacaucugcccugcuggccggcacaaucacaagcggcuggacauuuggagcuggcgccgcucugcagauccccuuugcuaugcagauggccuaccgguucaacggcaucggagugacccagaaugugcuguacgagaaccagaagcugaucgccaaccaguucaacagcgccaucggcaagauccaggacagccugagcagcacagcaagcgcccugggaaagcugcaggacguggucaaccagaaugcccaggcacugaacacccuggucaagcagcuguccuccaacuucggcgccaucagcucugugcugaacgauauccugagcagacuggacaaggucgaggccgaggugcagaucgacagacugaucacaggcagacugcagagccuccagacauacgugacccagcagcugaucagagccgccgagauuagagccucugccaaucuggccgccaccaagaugucugagugugugcugggccagagcaagagaguggacuuuugcggcaagggcuaccaccugaugagcuucccucagucugccccucacggcgugguguuucugcacgugacauaugugcccgcucaagagaagaauuucaccaccgcuccagccaucugccacgacggcaaagcccacuuuccuagagaaggcguguucguguccaacggcacccauugguucgugacacagcggaacuucuacgagccccagaucaucaccaccgacaacaccuucgugucuggcaacugcgacguugugaucggcauugugaacaauaccguguacgacccucugcagcccgagcuggacagcuucaaagaggaacuggacaaguacuuuaagaaccacacaagccccgacguggaccugggcgauaucagcggaaucaaugccagcgucgugaacauccagaaagagaucgaccggcugaacgagguggccaagaaucugaacgagagccugaucgaccugcaagaacuggggaaguacgagcaguacaucaaguggcccugguacaucuggcugggcuuuaucgccggacugauugccaucgugauggucacaaucaugcuguguugcaugaccagcugcuguagcugccugaagggcuguuguagcuguggcagcugcugcaaguucgacgaggacgauucugagcccgugcugaagggcgugaaacugcacuacaccugaggacuaguuauaagacugacuagcccgaugggccucccaacgggcccuccuccccuccuugcaccgagauuaaucaaaggcucuuuucagagccaccaaaaaaaaaaaaaaaaaaaaaaaaaaaaaaaaaaaaaaaaaaaaaaaaaaaaaaaaaaaaaaaaaaaaaaaaaaaaaaaaaaaaaaaaaaaaaaaaaaaaa

SEQ ID NO: 24152 - RNA, 4029 nt, Artificial Sequence
  SARS-CoV-2/Wuhan/WIV05/2019__EPI_ISL_402128 spike protein mRNA gc mod (1-1273)(H69del_V70del_Y453F_D614G_I692V_M1229I)
aggagaaagcuuaccauguucguguuucuggugcugcugccccugguguccagccagugugugaaccugaccaccagaacacagcugccuccagccuacaccaacagcuucaccagaggcguguacuaccccgacaagguguucagauccagcgugcugcacucuacccaggaccuguuccugccuuucuucagcaacgugaccugguuccacgccaucuccggcaccaauggcaccaagagauucgacaaccccgugcugcccuucaacgacgggguguacuuugccagcaccgagaaguccaacaucaucagaggcuggaucuucggcaccacacuggacagcaagacccagagccugcugaucgugaacaacgccaccaacguggucaucaaagugugcgaguuccaguucugcaacgaccccuuccugggcgucuacuaccacaagaacaacaagagcuggauggaaagcgaguuccggguguacagcagcgccaacaacugcaccuucgaguacgugucccagccuuuccugauggaccuggaaggcaagcagggcaacuucaagaaccugcgcgaguucguguucaagaacaucgacggcuacuucaaaaucuacagcaagcacaccccuaucaaccucgugcgggaucugccucagggcuucucugcucuggaaccccugguggaucugcccaucggcaucaacaucacccgguuucagacacugcuggcccugcacagaagcuaccugacaccuggcgauagcagcagcggauggacagcuggugccgccgcuuacuaugugggcuaccugcagccuagaaccuuccugcugaaguacaacgagaacggcaccaucaccgacgccguggauugugcucuggauccucugagcgagacaaagugcacccugaaguccuucaccguggaaaagggcaucuaccagaccagcaacuuccgggugcagcccaccgaauccaucgugcgguuccccaauaucaccaaucugugccccuucggcgagguguucaaugccaccagauucgccucuguguacgccuggaaccggaagcggaucagcaauugcguggccgacuacuccgugcuguacaacuccgccagcuucagcaccuucaagugcuacggcguguccccuaccaagcugaacgaccugugcuucacaaacguguacgccgacagcuucgugauccggggagaugaagugcggcagauugccccuggacagacaggcaagaucgccgacuacaacuacaagcugcccgacgacuucaccggcugugugauugccuggaacagcaacaaccuggacuccaaagucggcggcaacuacaauuaccuguuccggcuguuccggaaguccaaucugaagcccuucgagcgggacaucagcaccgaaaucuaucaggccggcagcaccccuugcaacggcguggaaggcuucaacugcuacuucccacugcaguccuacggcuuucagcccacaaauggcgugggcuaucagcccuacagagugguggugcugagcuucgaacugcugcaugcuccugccacagugugcggcccuaagaaaagcaccaaucucgugaagaacaaaugcgugaacuucaacuucaacggccugaccggcaccggcgugcugacagagagcaacaagaaguuccugccauuccagcaguuuggccgggauaucgccgauaccacagacgccguuagagauccccagacacuggaaauccuggacaucaccccaugcagcuucggcggagugucugugaucaccccuggcaccaacaccagcaaucagguggcagugcuguaccagggcgugaacuguaccgaagugcccguggccauucacgccgaucagcugacaccuacauggcggguguacuccaccggcagcaauguguuucagaccagagccggcugucugaucggagccgagcacgugaacaauagcuacgagugcgacauccccaucggcgcuggcaucugugccagcuaccagacacagacaaacagccccagacgggcuagaagcguggccagccagagcgugauugccuacacaaugucucugggcgccgagaacagcguggccuacuccaacaacucuaucgcuauccccaccaacuucaccaucagcgugaccaccgagauccugccuguguccaugaccaagaccagcguggacugcaccauguacaucugcggcgauuccaccgagugcuccaaccugcugcugcaguacggcagcuucugcacccagcugaauagagcccugacagggaucgccguggaacaggacaagaacacccaagagguguucgcccaagugaagcaaaucuacaagaccccuccuaucaaggacuucggcggcuucaauuucagccagauucugcccgauccuagcaagcccagcaagcggagcuucaucgaggaccugcuguucaacaaagugacacuggccgacgccggcuucaucaagcaguauggcgauugucugggcgacauugccgccagggaucugauuugcgcccagaaguuuaacggacugacagugcugccuccucugcugaccgaugagaugaucgcccaguacacaucugcccugcuggccggcacaaucacaagcggcuggacauuuggagcuggcgccgcucugcagauccccuuugcuaugcagauggccuaccgguucaacggcaucggagugacccagaaugugcuguacgagaaccagaagcugaucgccaaccaguucaacagcgccaucggcaagauccaggacagccugagcagcacagcaagcgcccugggaaagcugcaggacguggucaaccagaaugcccaggcacugaacacccuggucaagcagcuguccuccaacuucggcgccaucagcucugugcugaacgauauccugagcagacuggacaaggucgaggccgaggugcagaucgacagacugaucacaggcagacugcagagccuccagacauacgugacccagcagcugaucagagccgccgagauuagagccucugccaaucuggccgccaccaagaugucugagugugugcugggccagagcaagagaguggacuuuugcggcaagggcuaccaccugaugagcuucccucagucugccccucacggcgugguguuucugcacgugacauaugugcccgcucaagagaagaauuucaccaccgcuccagccaucugccacgacggcaaagcccacuuuccuagagaaggcguguucguguccaacggcacccauugguucgugacacagcggaacuucuacgagccccagaucaucaccaccgacaacaccuucgugucuggcaacugcgacguugugaucggcauugugaacaauaccguguacgacccucugcagcccgagcuggacagcuucaaagaggaacuggacaaguacuuuaagaaccacacaagccccgacguggaccugggcgauaucagcggaaucaaugccagcgucgugaacauccagaaagagaucgaccggcugaacgagguggccaagaaucugaacgagagccugaucgaccugcaagaacuggggaaguacgagcaguacaucaaguggcccugguacaucuggcugggcuuuaucgccggacugauugccaucgugaucgucacaaucaugcuguguugcaugaccagcugcuguagcugccugaagggcuguuguagcuguggcagcugcugcaaguucgacgaggacgauucugagcccgugcugaagggcgugaaacugcacuacaccugaggacuaguuauaagacugacuagcccgaugggccucccaacgggcccuccuccccuccuugcaccgagauuaaucaaaggcucuuuucagagccaccaaaaaaaaaaaaaaaaaaaaaaaaaaaaaaaaaaaaaaaaaaaaaaaaaaaaaaaaaaaaaaaaaaaaaaaaaaaaaaaaaaaaaaaaaaaaaaaaaaaaa

SEQ ID NO: 24153 - RNA, 4026 nt, Artificial Sequence
  SARS-CoV-2/Wuhan/WIV05/2019__EPI_ISL_402128 spike protein mRNA gc mod (1-1273)(H69del_V70del_Y144del_N501Y_A570D_D614G_P681H_T716I_S982 A_D1118H)
aggagaaagcuuaccauguucguguuucuggugcugcugccccugguguccagccagugugugaaccugaccaccagaacacagcugccuccagccuacaccaacagcuucaccagaggcguguacuaccccgacaagguguucagauccagcgugcugcacucuacccaggaccuguuccugccuuucuucagcaacgugaccugguuccacgccaucuccggcaccaauggcaccaagagauucgacaaccccgugcugcccuucaacgacgggguguacuuugccagcaccgagaaguccaacaucaucagaggcuggaucuucggcaccacacuggacagcaagacccagagccugcugaucgugaacaacgccaccaacguggucaucaaagugugcgaguuccaguucugcaacgaccccuuccugggcgucuaccacaagaacaacaagagcuggauggaaagcgaguuccggguguacagcagcgccaacaacugcaccuucgaguacgugucccagccuuuccugauggaccuggaaggcaagcagggcaacuucaagaaccugcgcgaguucguguucaagaacaucgacggcuacuucaaaaucuacagcaagcacaccccuaucaaccucgugcgggaucugccucagggcuucucugcucuggaaccccugguggaucugcccaucggcaucaacaucacccgguuucagacacugcuggcccugcacagaagcuaccugacaccuggcgauagcagcagcggauggacagcuggugccgccgcuuacuaugugggcuaccugcagccuagaaccuuccugcugaaguacaacgagaacggcaccaucaccgacgccguggauugugcucuggauccucugagcgagacaaagugcacccugaaguccuucaccguggaaaagggcaucuaccagaccagcaacuuccgggugcagcccaccgaauccaucgugcgguuccccaauaucaccaaucugugccccuucggcgagguguucaaugccaccagauucgccucuguguacgccuggaaccggaagcggaucagcaauugcguggccgacuacuccgugcuguacaacuccgccagcuucagcaccuucaagugcuacggcguguccccuaccaagcugaacgaccugugcuucacaaacguguacgccgacagcuucgugauccggggagaugaagugcggcagauugccccuggacagacaggcaagaucgccgacuacaacuacaagcugcccgacgacuucaccggcugugugauugccuggaacagcaacaaccuggacuccaaagucggcggcaacuacaauuaccuguaccggcuguuccggaaguccaaucugaagcccuucgagcgggacaucagcaccgaaaucuaucaggccggcagcaccccuugcaacggcguggaaggcuucaacugcuacuucccacugcaguccuacggcuuucagcccacauacggcgugggcuaucagcccuacagagugguggugcugagcuucgaacugcugcaugcuccugccacagugugcggcccuaagaaaagcaccaaucucgugaagaacaaaugcgugaacuucaacuucaacggccugaccggcaccggcgugcugacagagagcaacaagaaguuccugccauuccagcaguuuggccgggauaucgacgauaccacagacgccguuagagauccccagacacuggaaauccuggacaucaccccaugcagcuucggcggagugucugugaucaccccuggcaccaacaccagcaaucagguggcagugcuguaccagggcgugaacuguaccgaagugcccguggccauucacgccgaucagcugacaccuacauggcggguguacuccaccggcagcaauguguuucagaccagagccggcugucugaucggagccgagcacgugaacaauagcuacgagugcgacauccccaucggcgcuggcaucugugccagcuaccagacacagacaaacagccacagacgggcuagaagcguggccagccagagcaucauugccuacacaaugucucugggcgccgagaacagcguggccuacuccaacaacucuaucgcuauccccaucaacuucaccaucagcgugaccaccgagauccugccuguguccaugaccaagaccagcguggacugcaccauguacaucugcggcgauuccaccgagugcuccaaccugcugcugcaguacggcagcuucugcacccagcugaauagagcccugacagggaucgccguggaacaggacaagaacacccaagagguguucgcccaagugaagcaaaucuacaagaccccuccuaucaaggacuucggcggcuucaauuucagccagauucugcccgauccuagcaagcccagcaagcggagcuucaucgaggaccugcuguucaacaaagugacacuggccgacgccggcuucaucaagcaguauggcgauugucugggcgacauugccgccagggaucugauuugcgcccagaaguuuaacggacugacagugcugccuccucugcugaccgaugagaugaucgcccaguacacaucugcccugcuggccggcacaaucacaagcggcuggacauuuggagcuggcgccgcucugcagauccccuuugcuaugcagauggccuaccgguucaacggcaucggagugacccagaaugugcuguacgagaaccagaagcugaucgccaaccaguucaacagcgccaucggcaagauccaggacagccugagcagcacagcaagcgcccugggaaagcugcaggacguggucaaccagaaugcccaggcacugaacacccuggucaagcagcuguccuccaacuucggcgccaucagcucugugcugaacgauauccuggccagacuggacaaggucgaggccgaggugcagaucgacagacugaucacaggcagacugcagagccuccagacauacgugacccagcagcugaucagagccgccgagauuagagccucugccaaucuggccgccaccaagaugucugagugugugcugggccagagcaagagaguggacuuuugcggcaagggcuaccaccugaugagcuucccucagucugccccucacggcgugguguuucugcacgugacauaugugcccgcucaagagaagaauuucaccaccgcuccagccaucugccacgacggcaaagcccacuuuccuagagaaggcguguucguguccaacggcacccauugguucgugacacagcggaacuucuacgagccccagaucaucaccacccacaacaccuucgugucuggcaacugcgacguugugaucggcauugugaacaauaccguguacgacccucugcagcccgagcuggacagcuucaaagaggaacuggacaaguacuuuaagaaccacacaagccccgacguggaccugggcgauaucagcggaaucaaugccagcgucgugaacauccagaaagagaucgaccggcugaacgagguggccaagaaucugaacgagagccugaucgaccugcaagaacuggggaaguacgagcaguacaucaaguggcccugguacaucuggcugggcuuuaucgccggacugauugccaucgugauggucacaaucaugcuguguugcaugaccagcugcuguagcugccugaagggcuguuguagcuguggcagcugcugcaaguucgacgaggacgauucugagcccgugcugaagggcgugaaacugcacuacaccugaggacuaguuauaagacugacuagcccgaugggccucccaacgggcccuccuccccuccuugcaccgagauuaaucaaaggcucuuuucagagccaccaaaaaaaaaaaaaaaaaaaaaaaaaaaaaaaaaaaaaaaaaaaaaaaaaaaaaaaaaaaaaaaaaaaaaaaaaaaaaaaaaaaaaaaaaaaaaaaaaaaaa

SEQ ID NO: 24154 - RNA, 4035 nt, Artificial Sequence
  SARS-CoV-2/Wuhan/WIV05/2019__EPI_ISL_402128 spike protein mRNA gc mod (1-1273)(K417N_E484K_N501Y_D614G)
aggagaaagcuuaccauguucguguuucuggugcugcugccccugguguccagccagugugugaaccugaccaccagaacacagcugccuccagccuacaccaacagcuucaccagaggcguguacuaccccgacaagguguucagauccagcgugcugcacucuacccaggaccuguuccugccuuucuucagcaacgugaccugguuccacgccauccacguguccggcaccaauggcaccaagagauucgacaaccccgugcugcccuucaacgacgggguguacuuugccagcaccgagaaguccaacaucaucagaggcuggaucuucggcaccacacuggacagcaagacccagagccugcugaucgugaacaacgccaccaacguggucaucaaagugugcgaguuccaguucugcaacgaccccuuccugggcgucuacuaccacaagaacaacaagagcuggauggaaagcgaguuccggguguacagcagcgccaacaacugcaccuucgaguacgugucccagccuuuccugauggaccuggaaggcaagcagggcaacuucaagaaccugcgcgaguucguguucaagaacaucgacggcuacuucaaaaucuacagcaagcacaccccuaucaaccucgugcgggaucugccucagggcuucucugcucuggaaccccugguggaucugcccaucggcaucaacaucacccgguuucagacacugcuggcccugcacagaagcuaccugacaccuggcgauagcagcagcggauggacagcuggugccgccgcuuacuaugugggcuaccugcagccuagaaccuuccugcugaaguacaacgagaacggcaccaucaccgacgccguggauugugcucuggauccucugagcgagacaaagugcacccugaaguccuucaccguggaaaagggcaucuaccagaccagcaacuuccgggugcagcccaccgaauccaucgugcgguuccccaauaucaccaaucugugccccuucggcgagguguucaaugccaccagauucgccucuguguacgccuggaaccggaagcggaucagcaauugcguggccgacuacuccgugcuguacaacuccgccagcuucagcaccuucaagugcuacggcguguccccuaccaagcugaacgaccugugcuucacaaacguguacgccgacagcuucgugauccggggagaugaagugcggcagauugccccuggacagacaggcaacaucgccgacuacaacuacaagcugcccgacgacuucaccggcugugugauugccuggaacagcaacaaccuggacuccaaagucggcggcaacuacaauuaccuguaccggcuguuccggaaguccaaucugaagcccuucgagcgggacaucagcaccgaaaucuaucaggccggcagcaccccuugcaacggcgugaagggcuucaacugcuacuucccacugcaguccuacggcuuucagcccacauacggcgugggcuaucagcccuacagagugguggugcugagcuucgaacugcugcaugcuccugccacagugugcggcccuaagaaaagcaccaaucucgugaagaacaaaugcgugaacuucaacuucaacggccugaccggcaccggcgugcugacagagagcaacaagaaguuccugccauuccagcaguuuggccgggauaucgccgauaccacagacgccguuagagauccccagacacuggaaauccuggacaucaccccaugcagcuucggcggagugucugugaucaccccuggcaccaacaccagcaaucagguggcagugcuguaccagggcgugaacuguaccgaagugcccguggccauucacgccgaucagcugacaccuacauggcggguguacuccaccggcagcaauguguuucagaccagagccggcugucugaucggagccgagcacgugaacaauagcuacgagugcgacauccccaucggcgcuggcaucugugccagcuaccagacacagacaaacagccccagacgggcuagaagcguggccagccagagcaucauugccuacacaaugucucugggcgccgagaacagcguggccuacuccaacaacucuaucgcuauccccaccaacuucaccaucagcgugaccaccgagauccugccuguguccaugaccaagaccagcguggacugcaccauguacaucugcggcgauuccaccgagugcuccaaccugcugcugcaguacggcagcuucugcacccagcugaauagagcccugacagggaucgccguggaacaggacaagaacacccaagagguguucgcccaagugaagcaaaucuacaagaccccuccuaucaaggacuucggcggcuucaauuucagccagauucugcccgauccuagcaagcccagcaagcggagcuucaucgaggaccugcuguucaacaaagugacacuggccgacgccggcuucaucaagcaguauggcgauugucugggcgacauugccgccagggaucugauuugcgcccagaaguuuaacggacugacagugcugccuccucugcugaccgaugagaugaucgcccaguacacaucugcccugcuggccggcacaaucacaagcggcuggacauuuggagcuggcgccgcucugcagauccccuuugcuaugcagauggccuaccgguucaacggcaucggagugacccagaaugugcuguacgagaaccagaagcugaucgccaaccaguucaacagcgccaucggcaagauccaggacagccugagcagcacagcaagcgcccugggaaagcugcaggacguggucaaccagaaugcccaggcacugaacacccuggucaagcagcuguccuccaacuucggcgccaucagcucugugcugaacgauauccugagcagacuggacaaggucgaggccgaggugcagaucgacagacugaucacaggcagacugcagagccuccagacauacgugacccagcagcugaucagagccgccgagauuagagccucugccaaucuggccgccaccaagaugucugagugugugcugggccagagcaagagaguggacuuuugcggcaagggcuaccaccugaugagcuucccucagucugccccucacggcgugguguuucugcacgugacauaugugcccgcucaagagaagaauuucaccaccgcuccagccaucugccacgacggcaaagcccacuuuccuagagaaggcguguucguguccaacggcacccauugguucgugacacagcggaacuucuacgagccccagaucaucaccaccgacaacaccuucgugucuggcaacugcgacguugugaucggcauugugaacaauaccguguacgacccucugcagcccgagcuggacagcuucaaagaggaacuggacaaguacuuuaagaaccacacaagccccgacguggaccugggcgauaucagcggaaucaaugccagcgucgugaacauccagaaagagaucgaccggcugaacgagguggccaagaaucugaacgagagccugaucgaccugcaagaacuggggaaguacgagcaguacaucaaguggcccugguacaucuggcugggcuuuaucgccggacugauugccaucgugauggucacaaucaugcuguguugcaugaccagcugcuguagcugccugaagggcuguuguagcuguggcagcugcugcaaguucgacgaggacgauucugagcccgugcugaagggcgugaaacugcacuacaccugaggacuaguuauaagacugacuagcccgaugggccucccaacgggcccuccuccccuccuugcaccgagauuaaucaaaggcucuuuucagagccaccaaaaaaaaaaaaaaaaaaaaaaaaaaaaaaaaaaaaaaaaaaaaaaaaaaaaaaaaaaaaaaaaaaaaaaaaaaaaaaaaaaaaaaaaaaaaaaaaaaaaa

SEQ ID NO: 24155 - RNA, 4026 nt, Artificial Sequence
  SARS-CoV-2/Wuhan/WIV05/2019__EPI_ISL_402128 spike protein mRNA gc mod (1-1273)(L18F_D80A_D215G_L242del_A243del_L244del_R246I_K417N_E484 K_N501Y_D614G_A701V)
aggagaaagcuuaccauguucguguuucuggugcugcugccccugguguccagccagugugugaacuucaccaccagaacacagcugccuccagccuacaccaacagcuucaccagaggcguguacuaccccgacaagguguucagauccagcgugcugcacucuacccaggaccuguuccugccuuucuucagcaacgugaccugguuccacgccauccacguguccggcaccaauggcaccaagagauucgccaaccccgugcugcccuucaacgacgggguguacuuugccagcaccgagaaguccaacaucaucagaggcuggaucuucggcaccacacuggacagcaagacccagagccugcugaucgugaacaacgccaccaacguggucaucaaagugugcgaguuccaguucugcaacgaccccuuccugggcgucuacuaccacaagaacaacaagagcuggauggaaagcgaguuccggguguacagcagcgccaacaacugcaccuucgaguacgugucccagccuuuccugauggaccuggaaggcaagcagggcaacuucaagaaccugcgcgaguucguguucaagaacaucgacggcuacuucaaaaucuacagcaagcacaccccuaucaaccucgugcggggccugccucagggcuucucugcucuggaaccccugguggaucugcccaucggcaucaacaucacccgguuucagacacugcacaucagcuaccugacaccuggcgauagcagcagcggauggacagcuggugccgccgcuuacuaugugggcuaccugcagccuagaaccuuccugcugaaguacaacgagaacggcaccaucaccgacgccguggauugugcucuggauccucugagcgagacaaagugcacccugaaguccuucaccguggaaaagggcaucuaccagaccagcaacuuccgggugcagcccaccgaauccaucgugcgguuccccaauaucaccaaucugugccccuucggcgagguguucaaugccaccagauucgccucuguguacgccuggaaccggaagcggaucagcaauugcguggccgacuacuccgugcuguacaacuccgccagcuucagcaccuucaagugcuacggcguguccccuaccaagcugaacgaccugugcuucacaaacguguacgccgacagcuucgugauccggggagaugaagugcggcagauugccccuggacagacaggcaacaucgccgacuacaacuacaagcugcccgacgacuucaccggcugugugauugccuggaacagcaacaaccuggacuccaaagucggcggcaacuacaauuaccuguaccggcuguuccggaaguccaaucugaagcccuucgagcgggacaucagcaccgaaaucuaucaggccggcagcaccccuugcaacggcgugaagggcuucaacugcuacuucccacugcaguccuacggcuuucagcccacauacggcgugggcuaucagcccuacagagugguggugcugagcuucgaacugcugcaugcuccugccacagugugcggcccuaagaaaagcaccaaucucgugaagaacaaaugcgugaacuucaacuucaacggccugaccggcaccggcgugcugacagagagcaacaagaaguuccugccauuccagcaguuuggccgggauaucgccgauaccacagacgccguuagagauccccagacacuggaaauccuggacaucaccccaugcagcuucggcggagugucugugaucaccccuggcaccaacaccagcaaucagguggcagugcuguaccagggcgugaacuguaccgaagugcccguggccauucacgccgaucagcugacaccuacauggcggguguacuccaccggcagcaauguguuucagaccagagccggcugucugaucggagccgagcacgugaacaauagcuacgagugcgacauccccaucggcgcuggcaucugugccagcuaccagacacagacaaacagccccagacgggcuagaagcguggccagccagagcaucauugccuacacaaugucucugggcguggagaacagcguggccuacuccaacaacucuaucgcuauccccaccaacuucaccaucagcgugaccaccgagauccugccuguguccaugaccaagaccagcguggacugcaccauguacaucugcggcgauuccaccgagugcuccaaccugcugcugcaguacggcagcuucugcacccagcugaauagagcccugacagggaucgccguggaacaggacaagaacacccaagagguguucgcccaagugaagcaaaucuacaagaccccuccuaucaaggacuucggcggcuucaauuucagccagauucugcccgauccuagcaagcccagcaagcggagcuucaucgaggaccugcuguucaacaaagugacacuggccgacgccggcuucaucaagcaguauggcgauugucugggcgacauugccgccagggaucugauuugcgcccagaaguuuaacggacugacagugcugccuccucugcugaccgaugagaugaucgcccaguacacaucugcccugcuggccggcacaaucacaagcggcuggacauuuggagcuggcgccgcucugcagauccccuuugcuaugcagauggccuaccgguucaacggcaucggagugacccagaaugugcuguacgagaaccagaagcugaucgccaaccaguucaacagcgccaucggcaagauccaggacagccugagcagcacagcaagcgcccugggaaagcugcaggacguggucaaccagaaugcccaggcacugaacacccuggucaagcagcuguccuccaacuucggcgccaucagcucugugcugaacgauauccugagcagacuggacaaggucgaggccgaggugcagaucgacagacugaucacaggcagacugcagagccuccagacauacgugacccagcagcugaucagagccgccgagauuagagccucugccaaucuggccgccaccaagaugucugagugugugcugggccagagcaagagaguggacuuuugcggcaagggcuaccaccugaugagcuucccucagucugccccucacggcgugguguuucugcacgugacauaugugcccgcucaagagaagaauuucaccaccgcuccagccaucugccacgacggcaaagcccacuuuccuagagaaggcguguucguguccaacggcacccauugguucgugacacagcggaacuucuacgagccccagaucaucaccaccgacaacaccuucgugucuggcaacugcgacguugugaucggcauugugaacaauaccguguacgacccucugcagcccgagcuggacagcuucaaagaggaacuggacaaguacuuuaagaaccacacaagccccgacguggaccugggcgauaucagcggaaucaaugccagcgucgugaacauccagaaagagaucgaccggcugaacgagguggccaagaaucugaacgagagccugaucgaccugcaagaacuggggaaguacgagcaguacaucaaguggcccugguacaucuggcugggcuuuaucgccggacugauugccaucgugauggucacaaucaugcuguguugcaugaccagcugcuguagcugccugaagggcuguuguagcuguggcagcugcugcaaguucgacgaggacgauucugagcccgugcugaagggcgugaaacugcacuacaccugaggacuaguuauaagacugacuagcccgaugggccucccaacgggcccuccuccccuccuugcaccgagauuaaucaaaggcucuuuucagagccaccaaaaaaaaaaaaaaaaaaaaaaaaaaaaaaaaaaaaaaaaaaaaaaaaaaaaaaaaaaaaaaaaaaaaaaaaaaaaaaaaaaaaaaaaaaaaaaaaaaaaa

SEQ ID NO: 24156 - RNA, 4035 nt, Artificial Sequence
  SARS-CoV-2/Wuhan/WIV05/2019__EPI_ISL_402128 spike protein mRNA gc mod (1-1273)(E484K_D614G)
aggagaaagcuuaccauguucguguuucuggugcugcugccccugguguccagccagugugugaaccugaccaccagaacacagcugccuccagccuacaccaacagcuucaccagaggcguguacuaccccgacaagguguucagauccagcgugcugcacucuacccaggaccuguuccugccuuucuucagcaacgugaccugguuccacgccauccacguguccggcaccaauggcaccaagagauucgacaaccccgugcugcccuucaacgacgggguguacuuugccagcaccgagaaguccaacaucaucagaggcuggaucuucggcaccacacuggacagcaagacccagagccugcugaucgugaacaacgccaccaacguggucaucaaagugugcgaguuccaguucugcaacgaccccuuccugggcgucuacuaccacaagaacaacaagagcuggauggaaagcgaguuccggguguacagcagcgccaacaacugcaccuucgaguacgugucccagccuuuccugauggaccuggaaggcaagcagggcaacuucaagaaccugcgcgaguucguguucaagaacaucgacggcuacuucaaaaucuacagcaagcacaccccuaucaaccucgugcgggaucugccucagggcuucucugcucuggaaccccugguggaucugcccaucggcaucaacaucacccgguuucagacacugcuggcccugcacagaagcuaccugacaccuggcgauagcagcagcggauggacagcuggugccgccgcuuacuaugugggcuaccugcagccuagaaccuuccugcugaaguacaacgagaacggcaccaucaccgacgccguggauugugcucuggauccucugagcgagacaaagugcacccugaaguccuucaccguggaaaagggcaucuaccagaccagcaacuuccgggugcagcccaccgaauccaucgugcgguuccccaauaucaccaaucugugccccuucggcgagguguucaaugccaccagauucgccucuguguacgccuggaaccggaagcggaucagcaauugcguggccgacuacuccgugcuguacaacuccgccagcuucagcaccuucaagugcuacggcguguccccuaccaagcugaacgaccugugcuucacaaacguguacgccgacagcuucgugauccggggagaugaagugcggcagauugccccuggacagacaggcaagaucgccgacuacaacuacaagcugcccgacgacuucaccggcugugugauugccuggaacagcaacaaccuggacuccaaagucggcggcaacuacaauuaccuguaccggcuguuccggaaguccaaucugaagcccuucgagcgggacaucagcaccgaaaucuaucaggccggcagcaccccuugcaacggcgugaagggcuucaacugcuacuucccacugcaguccuacggcuuucagcccacaaauggcgugggcuaucagcccuacagagugguggugcugagcuucgaacugcugcaugcuccugccacagugugcggcccuaagaaaagcaccaaucucgugaagaacaaaugcgugaacuucaacuucaacggccugaccggcaccggcgugcugacagagagcaacaagaaguuccugccauuccagcaguuuggccgggauaucgccgauaccacagacgccguuagagauccccagacacuggaaauccuggacaucaccccaugcagcuucggcggagugucugugaucaccccuggcaccaacaccagcaaucagguggcagugcuguaccagggcgugaacuguaccgaagugcccguggccauucacgccgaucagcugacaccuacauggcggguguacuccaccggcagcaauguguuucagaccagagccggcugucugaucggagccgagcacgugaacaauagcuacgagugcgacauccccaucggcgcuggcaucugugccagcuaccagacacagacaaacagccccagacgggcuagaagcguggccagccagagcaucauugccuacacaaugucucugggcgccgagaacagcguggccuacuccaacaacucuaucgcuauccccaccaacuucaccaucagcgugaccaccgagauccugccuguguccaugaccaagaccagcguggacugcaccauguacaucugcggcgauuccaccgagugcuccaaccugcugcugcaguacggcagcuucugcacccagcugaauagagcccugacagggaucgccguggaacaggacaagaacacccaagagguguucgcccaagugaagcaaaucuacaagaccccuccuaucaaggacuucggcggcuucaauuucagccagauucugcccgauccuagcaagcccagcaagcggagcuucaucgaggaccugcuguucaacaaagugacacuggccgacgccggcuucaucaagcaguauggcgauugucugggcgacauugccgccagggaucugauuugcgcccagaaguuuaacggacugacagugcugccuccucugcugaccgaugagaugaucgcccaguacacaucugcccugcuggccggcacaaucacaagcggcuggacauuuggagcuggcgccgcucugcagauccccuuugcuaugcagauggccuaccgguucaacggcaucggagugacccagaaugugcuguacgagaaccagaagcugaucgccaaccaguucaacagcgccaucggcaagauccaggacagccugagcagcacagcaagcgcccugggaaagcugcaggacguggucaaccagaaugcccaggcacugaacacccuggucaagcagcuguccuccaacuucggcgccaucagcucugugcugaacgauauccugagcagacuggacaaggucgaggccgaggugcagaucgacagacugaucacaggcagacugcagagccuccagacauacgugacccagcagcugaucagagccgccgagauuagagccucugccaaucuggccgccaccaagaugucugagugugugcugggccagagcaagagaguggacuuuugcggcaagggcuaccaccugaugagcuucccucagucugccccucacggcgugguguuucugcacgugacauaugugcccgcucaagagaagaauuucaccaccgcuccagccaucugccacgacggcaaagcccacuuuccuagagaaggcguguucguguccaacggcacccauugguucgugacacagcggaacuucuacgagccccagaucaucaccaccgacaacaccuucgugucuggcaacugcgacguugugaucggcauugugaacaauaccguguacgacccucugcagcccgagcuggacagcuucaaagaggaacuggacaaguacuuuaagaaccacacaagccccgacguggaccugggcgauaucagcggaaucaaugccagcgucgugaacauccagaaagagaucgaccggcugaacgagguggccaagaaucugaacgagagccugaucgaccugcaagaacuggggaaguacgagcaguacaucaaguggcccugguacaucuggcugggcuuuaucgccggacugauugccaucgugauggucacaaucaugcuguguugcaugaccagcugcuguagcugccugaagggcuguuguagcuguggcagcugcugcaaguucgacgaggacgauucugagcccgugcugaagggcgugaaacugcacuacaccugaggacuaguuauaagacugacuagcccgaugggccucccaacgggcccuccuccccuccuugcaccgagauuaaucaaaggcucuuuucagagccaccaaaaaaaaaaaaaaaaaaaaaaaaaaaaaaaaaaaaaaaaaaaaaaaaaaaaaaaaaaaaaaaaaaaaaaaaaaaaaaaaaaaaaaaaaaaaaaaaaaaaa

SEQ ID NO: 24157 - RNA, 4035 nt, Artificial Sequence
  SARS-CoV-2/Wuhan/WIV05/2019__EPI_ISL_402128 spike protein mRNA gc mod (1-1273)(L18F_T20N_P26S_D138Y_R190S_K417T_E484K_N501Y_D614G_H655Y _T1027I)
aggagaaagcuuaccauguucguguuucuggugcugcugccccugguguccagccagugugugaacuucaccaacagaacacagcugccuagcgccuacaccaacagcuucaccagaggcguguacuaccccgacaagguguucagauccagcgugcugcacucuacccaggaccuguuccugccuuucuucagcaacgugaccugguuccacgccauccacguguccggcaccaauggcaccaagagauucgacaaccccgugcugcccuucaacgacgggguguacuuugccagcaccgagaaguccaacaucaucagaggcuggaucuucggcaccacacuggacagcaagacccagagccugcugaucgugaacaacgccaccaacguggucaucaaagugugcgaguuccaguucugcaacuaccccuuccugggcgucuacuaccacaagaacaacaagagcuggauggaaagcgaguuccggguguacagcagcgccaacaacugcaccuucgaguacgugucccagccuuuccugauggaccuggaaggcaagcagggcaacuucaagaaccugagcgaguucguguucaagaacaucgacggcuacuucaaaaucuacagcaagcacaccccuaucaaccucgugcgggaucugccucagggcuucucugcucuggaaccccugguggaucugcccaucggcaucaacaucacccgguuucagacacugcuggcccugcacagaagcuaccugacaccuggcgauagcagcagcggauggacagcuggugccgccgcuuacuaugugggcuaccugcagccuagaaccuuccugcugaaguacaacgagaacggcaccaucaccgacgccguggauugugcucuggauccucugagcgagacaaagugcacccugaaguccuucaccguggaaaagggcaucuaccagaccagcaacuuccgggugcagcccaccgaauccaucgugcgguuccccaauaucaccaaucugugccccuucggcgagguguucaaugccaccagauucgccucuguguacgccuggaaccggaagcggaucagcaauugcguggccgacuacuccgugcuguacaacuccgccagcuucagcaccuucaagugcuacggcguguccccuaccaagcugaacgaccugugcuucacaaacguguacgccgacagcuucgugauccggggagaugaagugcggcagauugccccuggacagacaggcaccaucgccgacuacaacuacaagcugcccgacgacuucaccggcugugugauugccuggaacagcaacaaccuggacuccaaagucggcggcaacuacaauuaccuguaccggcuguuccggaaguccaaucugaagcccuucgagcgggacaucagcaccgaaaucuaucaggccggcagcaccccuugcaacggcgugaagggcuucaacugcuacuucccacugcaguccuacggcuuucagcccacauacggcgugggcuaucagcccuacagagugguggugcugagcuucgaacugcugcaugcuccugccacagugugcggcccuaagaaaagcaccaaucucgugaagaacaaaugcgugaacuucaacuucaacggccugaccggcaccggcgugcugacagagagcaacaagaaguuccugccauuccagcaguuuggccgggauaucgccgauaccacagacgccguuagagauccccagacacuggaaauccuggacaucaccccaugcagcuucggcggagugucugugaucaccccuggcaccaacaccagcaaucagguggcagugcuguaccagggcgugaacuguaccgaagugcccguggccauucacgccgaucagcugacaccuacauggcggguguacuccaccggcagcaauguguuucagaccagagccggcugucugaucggagccgaguacgugaacaauagcuacgagugcgacauccccaucggcgcuggcaucugugccagcuaccagacacagacaaacagccccagacgggcuagaagcguggccagccagagcaucauugccuacacaaugucucugggcgccgagaacagcguggccuacuccaacaacucuaucgcuauccccaccaacuucaccaucagcgugaccaccgagauccugccuguguccaugaccaagaccagcguggacugcaccauguacaucugcggcgauuccaccgagugcuccaaccugcugcugcaguacggcagcuucugcacccagcugaauagagcccugacagggaucgccguggaacaggacaagaacacccaagagguguucgcccaagugaagcaaaucuacaagaccccuccuaucaaggacuucggcggcuucaauuucagccagauucugcccgauccuagcaagcccagcaagcggagcuucaucgaggaccugcuguucaacaaagugacacuggccgacgccggcuucaucaagcaguauggcgauugucugggcgacauugccgccagggaucugauuugcgcccagaaguuuaacggacugacagugcugccuccucugcugaccgaugagaugaucgcccaguacacaucugcccugcuggccggcacaaucacaagcggcuggacauuuggagcuggcgccgcucugcagauccccuuugcuaugcagauggccuaccgguucaacggcaucggagugacccagaaugugcuguacgagaaccagaagcugaucgccaaccaguucaacagcgccaucggcaagauccaggacagccugagcagcacagcaagcgcccugggaaagcugcaggacguggucaaccagaaugcccaggcacugaacacccuggucaagcagcuguccuccaacuucggcgccaucagcucugugcugaacgauauccugagcagacuggacaaggucgaggccgaggugcagaucgacagacugaucacaggcagacugcagagccuccagacauacgugacccagcagcugaucagagccgccgagauuagagccucugccaaucuggccgccaucaagaugucugagugugugcugggccagagcaagagaguggacuuuugcggcaagggcuaccaccugaugagcuucccucagucugccccucacggcgugguguuucugcacgugacauaugugcccgcucaagagaagaauuucaccaccgcuccagccaucugccacgacggcaaagcccacuuuccuagagaaggcguguucguguccaacggcacccauugguucgugacacagcggaacuucuacgagccccagaucaucaccaccgacaacaccuucgugucuggcaacugcgacguugugaucggcauugugaacaauaccguguacgacccucugcagcccgagcuggacagcuucaaagaggaacuggacaaguacuuuaagaaccacacaagccccgacguggaccugggcgauaucagcggaaucaaugccagcgucgugaacauccagaaagagaucgaccggcugaacgagguggccaagaaucugaacgagagccugaucgaccugcaagaacuggggaaguacgagcaguacaucaaguggcccugguacaucuggcugggcuuuaucgccggacugauugccaucgugauggucacaaucaugcuguguugcaugaccagcugcuguagcugccugaagggcuguuguagcuguggcagcugcugcaaguucgacgaggacgauucugagcccgugcugaagggcgugaaacugcacuacaccugaggacuaguuauaagacugacuagcccgaugggccucccaacgggcccuccuccccuccuugcaccgagauuaaucaaaggcucuuuucagagccaccaaaaaaaaaaaaaaaaaaaaaaaaaaaaaaaaaaaaaaaaaaaaaaaaaaaaaaaaaaaaaaaaaaaaaaaaaaaaaaaaaaaaaaaaaaaaaaaaaaaaa

SEQ ID NO: 24158 - RNA, 4035 nt, Artificial Sequence
  SARS-CoV-2/Wuhan/WIV05/2019__EPI_ISL_402128 spike protein mRNA gc mod (1-1273)(S13I_W152C_L452R_D614G)
aggagaaagcuuaccauguucguguuucuggugcugcugccccugguguccauccagugugugaaccugaccaccagaacacagcugccuccagccuacaccaacagcuucaccagaggcguguacuaccccgacaagguguucagauccagcgugcugcacucuacccaggaccuguuccugccuuucuucagcaacgugaccugguuccacgccauccacguguccggcaccaauggcaccaagagauucgacaaccccgugcugcccuucaacgacgggguguacuuugccagcaccgagaaguccaacaucaucagaggcuggaucuucggcaccacacuggacagcaagacccagagccugcugaucgugaacaacgccaccaacguggucaucaaagugugcgaguuccaguucugcaacgaccccuuccugggcgucuacuaccacaagaacaacaagagcugcauggaaagcgaguuccggguguacagcagcgccaacaacugcaccuucgaguacgugucccagccuuuccugauggaccuggaaggcaagcagggcaacuucaagaaccugcgcgaguucguguucaagaacaucgacggcuacuucaaaaucuacagcaagcacaccccuaucaaccucgugcgggaucugccucagggcuucucugcucuggaaccccugguggaucugcccaucggcaucaacaucacccgguuucagacacugcuggcccugcacagaagcuaccugacaccuggcgauagcagcagcggauggacagcuggugccgccgcuuacuaugugggcuaccugcagccuagaaccuuccugcugaaguacaacgagaacggcaccaucaccgacgccguggauugugcucuggauccucugagcgagacaaagugcacccugaaguccuucaccguggaaaagggcaucuaccagaccagcaacuuccgggugcagcccaccgaauccaucgugcgguuccccaauaucaccaaucugugccccuucggcgagguguucaaugccaccagauucgccucuguguacgccuggaaccggaagcggaucagcaauugcguggccgacuacuccgugcuguacaacuccgccagcuucagcaccuucaagugcuacggcguguccccuaccaagcugaacgaccugugcuucacaaacguguacgccgacagcuucgugauccggggagaugaagugcggcagauugccccuggacagacaggcaagaucgccgacuacaacuacaagcugcccgacgacuucaccggcugugugauugccuggaacagcaacaaccuggacuccaaagucggcggcaacuacaauuaccgcuaccggcuguuccggaaguccaaucugaagcccuucgagcgggacaucagcaccgaaaucuaucaggccggcagcaccccuugcaacggcguggaaggcuucaacugcuacuucccacugcaguccuacggcuuucagcccacaaauggcgugggcuaucagcccuacagagugguggugcugagcuucgaacugcugcaugcuccugccacagugugcggcccuaagaaaagcaccaaucucgugaagaacaaaugcgugaacuucaacuucaacggccugaccggcaccggcgugcugacagagagcaacaagaaguuccugccauuccagcaguuuggccgggauaucgccgauaccacagacgccguuagagauccccagacacuggaaauccuggacaucaccccaugcagcuucggcggagugucugugaucaccccuggcaccaacaccagcaaucagguggcagugcuguaccagggcgugaacuguaccgaagugcccguggccauucacgccgaucagcugacaccuacauggcggguguacuccaccggcagcaauguguuucagaccagagccggcugucugaucggagccgagcacgugaacaauagcuacgagugcgacauccccaucggcgcuggcaucugugccagcuaccagacacagacaaacagccccagacgggcuagaagcguggccagccagagcaucauugccuacacaaugucucugggcgccgagaacagcguggccuacuccaacaacucuaucgcuauccccaccaacuucaccaucagcgugaccaccgagauccugccuguguccaugaccaagaccagcguggacugcaccauguacaucugcggcgauuccaccgagugcuccaaccugcugcugcaguacggcagcuucugcacccagcugaauagagcccugacagggaucgccguggaacaggacaagaacacccaagagguguucgcccaagugaagcaaaucuacaagaccccuccuaucaaggacuucggcggcuucaauuucagccagauucugcccgauccuagcaagcccagcaagcggagcuucaucgaggaccugcuguucaacaaagugacacuggccgacgccggcuucaucaagcaguauggcgauugucugggcgacauugccgccagggaucugauuugcgcccagaaguuuaacggacugacagugcugccuccucugcugaccgaugagaugaucgcccaguacacaucugcccugcuggccggcacaaucacaagcggcuggacauuuggagcuggcgccgcucugcagauccccuuugcuaugcagauggccuaccgguucaacggcaucggagugacccagaaugugcuguacgagaaccagaagcugaucgccaaccaguucaacagcgccaucggcaagauccaggacagccugagcagcacagcaagcgcccugggaaagcugcaggacguggucaaccagaaugcccaggcacugaacacccuggucaagcagcuguccuccaacuucggcgccaucagcucugugcugaacgauauccugagcagacuggacaaggucgaggccgaggugcagaucgacagacugaucacaggcagacugcagagccuccagacauacgugacccagcagcugaucagagccgccgagauuagagccucugccaaucuggccgccaccaagaugucugagugugugcugggccagagcaagagaguggacuuuugcggcaagggcuaccaccugaugagcuucccucagucugccccucacggcgugguguuucugcacgugacauaugugcccgcucaagagaagaauuucaccaccgcuccagccaucugccacgacggcaaagcccacuuuccuagagaaggcguguucguguccaacggcacccauugguucgugacacagcggaacuucuacgagccccagaucaucaccaccgacaacaccuucgugucuggcaacugcgacguugugaucggcauugugaacaauaccguguacgacccucugcagcccgagcuggacagcuucaaagaggaacuggacaaguacuuuaagaaccacacaagccccgacguggaccugggcgauaucagcggaaucaaugccagcgucgugaacauccagaaagagaucgaccggcugaacgagguggccaagaaucugaacgagagccugaucgaccugcaagaacuggggaaguacgagcaguacaucaaguggcccugguacaucuggcugggcuuuaucgccggacugauugccaucgugauggucacaaucaugcuguguugcaugaccagcugcuguagcugccugaagggcuguuguagcuguggcagcugcugcaaguucgacgaggacgauucugagcccgugcugaagggcgugaaacugcacuacaccugaggacuaguuauaagacugacuagcccgaugggccucccaacgggcccuccuccccuccuugcaccgagauuaaucaaaggcucuuuucagagccaccaaaaaaaaaaaaaaaaaaaaaaaaaaaaaaaaaaaaaaaaaaaaaaaaaaaaaaaaaaaaaaaaaaaaaaaaaaaaaaaaaaaaaaaaaaaaaaaaaaaaa

SEQ ID NO: 24159 - RNA, 4035 nt, Artificial Sequence
  SARS-CoV-2/Wuhan/WIV05/2019__EPI_ISL_402128 spike protein mRNA gc mod (1-1273)
aggagaaagcuuaccauguucguguuccuggugcugcugccucugguguccagccagugugugaaccugaccaccagaacacagcugccuccagccuacaccaacagcuuuaccagaggcguguacuaccccgacaagguguucagauccagcgugcugcacucuacccaggaccuguuccugccuuucuucagcaacgugaccugguuccacgccauccacguguccggcaccaauggcaccaagagauucgacaaccccgugcugcccuucaacgacgggguguacuuugccagcaccgagaaguccaacaucaucagaggcuggaucuucggcaccacacuggacagcaagacccagagccugcugaucgugaacaacgccaccaacguggucaucaaagugugcgaguuccaguucugcaacgaccccuuccugggcgucuacuaccacaagaacaacaagagcuggauggaaagcgaguuccggguguacagcagcgccaacaacugcaccuucgaguacgugucccagccuuuccugauggaccuggaaggcaagcagggcaacuucaagaaccugcgcgaguucguguuuaagaacaucgacggcuacuucaagaucuacagcaagcacaccccuaucaaccucgugcgggaucugccucagggcuucucugcucuggaaccccugguggaucugcccaucggcaucaacaucacccgguuucagacacugcuggcccugcacagaagcuaccugacaccuggcgauagcagcagcggauggacagcuggugccgccgcuuacuaugugggcuaccugcagccuagaaccuuccugcugaaguacaacgagaacggcaccaucaccgacgccguggauugugcucuggauccucugagcgagacaaagugcacccugaaguccuucaccguggaaaagggcaucuaccagaccagcaacuuccgggugcagcccaccgaauccaucgugcgguuccccaauaucaccaaucugugccccuucggcgagguguucaaugccaccagauucgccucuguguacgccuggaaccggaagcggaucagcaauugcguggccgacuacuccgugcuguacaacuccgccagcuucagcaccuucaagugcuacggcguguccccuaccaagcugaacgaccugugcuucacaaacguguacgccgacagcuucgugauccggggagaugaagugcggcagauugccccuggacagacaggcaagaucgccgacuacaacuacaagcugcccgacgacuucaccggcugugugauugccuggaacagcaacaaccuggacuccaaagucggcggcaacuacaauuaccuguaccggcuguuccggaaguccaaucugaagcccuucgagcgggacaucuccaccgagaucuaucaggccggcagcaccccuuguaacggcguggaaggcuucaacugcuacuucccacugcaguccuacggcuuucagcccacaaauggcgugggcuaucagcccuacagagugguggugcugagcuucgaacugcugcaugccccugccacagugugcggcccuaagaaaagcaccaaucucgugaagaacaaaugcgugaacuucaacuucaacggccugaccggcaccggcgugcugacagagagcaacaagaaguuccugccauuccagcaguuuggccgggauaucgccgauaccacagacgccguuagagauccccagacacuggaaauccuggacaucaccccuugcagcuucggcggagugucugugaucaccccuggcaccaacaccagcaaucagguggcagugcuguaccaggacgugaacuguaccgaagugcccguggccauucacgccgaucagcugacaccuacauggcggguguacuccaccggcagcaauguguuucagaccagagccggcugucugaucggagccgagcacgugaacaauagcuacgagugcgacauccccaucggcgcuggaaucugcgccagcuaccagacacagacaaacagcccucggagagccagaagcguggccagccagagcaucauugccuacacaaugucucugggcgccgagaacagcguggccuacuccaacaacucuaucgcuauccccaccaacuucaccaucagcgugaccacagagauccugccuguguccaugaccaagaccagcguggacugcaccauguacaucugcggcgauuccaccgagugcuccaaccugcugcugcaguacggcagcuucugcacccagcugaauagagcccugacagggaucgccguggaacaggacaagaacacccaagagguguucgcccaagugaagcagaucuacaagaccccuccuaucaaggacuucggcggcuucaauuucagccagauucugcccgauccuagcaagcccagcaagcggagcuucaucgaggaccugcuguucaacaaagugacacuggccgacgccggcuucaucaagcaguauggcgauugucugggcgacauugccgccagggaucugauuugcgcccagaaguuuaacggacugacagugcugccuccucugcugaccgaugagaugaucgcccaguacacaucugcccugcuggccggcacaaucacaagcggcuggacauuuggagcaggcgccgcucugcagauccccuuugcuaugcagauggccuaccgguucaacggcaucggagugacccagaaugugcuguacgagaaccagaagcugaucgccaaccaguucaacagcgccaucggcaagauccaggacagccugagcagcacagcaagcgcccugggaaagcugcaggacguggucaaccagaaugcccaggcacugaacacccuggucaagcagcuguccuccaacuucggcgccaucagcucugugcugaacgauauccugagcagacuggacaaggucgaggccgaggugcagaucgacagacugaucacaggcagacugcagagccuccagacauacgugacccagcagcugaucagagccgccgagauuagagccucugccaaucuggccgccaccaagaugucugagugugugcugggccagagcaagagaguggacuuuugcggcaagggcuaccaccugaugagcuucccucagucugccccucacggcgugguguuucugcacgugacauaugugcccgcucaagagaagaauuucaccaccgcuccagccaucugccacgacggcaaagcccacuuuccuagagaaggcguguucguguccaacggcacccauugguucgugacacagcggaacuucuacgagccccagaucaucaccaccgacaacaccuucgugucuggcaacugcgacgucgugaucggcauugugaacaauaccguguacgacccucugcagcccgagcuggacagcuucaaagaggaacuggacaaguacuuuaagaaccacacaagccccgacguggaccugggcgauaucagcggaaucaaugccagcgucgugaacauccagaaagagaucgaccggcugaacgagguggccaagaaucugaacgagagccugaucgaccugcaagaacuggggaaguacgagcaguacaucaaguggcccugguacaucuggcugggcuuuaucgccggacugauugccaucgugauggucacaaucaugcuguguugcaugaccagcugcuguagcugccugaagggcuguuguagcuguggcagcugcugcaaguucgacgaggacgauucugagcccgugcugaagggcgugaaacugcacuacacaugaggacuaguuauaagacugacuagcccgaugggccucccaacgggcccuccuccccuccuugcaccgagauuaaucaaaggcucuuuucagagccaccaaaaaaaaaaaaaaaaaaaaaaaaaaaaaaaaaaaaaaaaaaaaaaaaaaaaaaaaaaaaaaaaaaaaaaaaaaaaaaaaaaaaaaaaaaaaaaaaaaaaa

SEQ ID NO: 24160 - RNA, 4035 nt, Artificial Sequence
  SARS-CoV-2/Wuhan/WIV05/2019__EPI_ISL_402128 spike protein mRNA gc mod (1-1273)(D614G)
aggagaaagcuuaccauguucguguuccuggugcugcugccucugguguccagccagugugugaaccugaccaccagaacacagcugccuccagccuacaccaacagcuuuaccagaggcguguacuaccccgacaagguguucagauccagcgugcugcacucuacccaggaccuguuccugccuuucuucagcaacgugaccugguuccacgccauccacguguccggcaccaauggcaccaagagauucgacaaccccgugcugcccuucaacgacgggguguacuuugccagcaccgagaaguccaacaucaucagaggcuggaucuucggcaccacacuggacagcaagacccagagccugcugaucgugaacaacgccaccaacguggucaucaaagugugcgaguuccaguucugcaacgaccccuuccugggcgucuacuaccacaagaacaacaagagcuggauggaaagcgaguuccggguguacagcagcgccaacaacugcaccuucgaguacgugucccagccuuuccugauggaccuggaaggcaagcagggcaacuucaagaaccugcgcgaguucguguuuaagaacaucgacggcuacuucaagaucuacagcaagcacaccccuaucaaccucgugcgggaucugccucagggcuucucugcucuggaaccccugguggaucugcccaucggcaucaacaucacccgguuucagacacugcuggcccugcacagaagcuaccugacaccuggcgauagcagcagcggauggacagcuggugccgccgcuuacuaugugggcuaccugcagccuagaaccuuccugcugaaguacaacgagaacggcaccaucaccgacgccguggauugugcucuggauccucugagcgagacaaagugcacccugaaguccuucaccguggaaaagggcaucuaccagaccagcaacuuccgggugcagcccaccgaauccaucgugcgguuccccaauaucaccaaucugugccccuucggcgagguguucaaugccaccagauucgccucuguguacgccuggaaccggaagcggaucagcaauugcguggccgacuacuccgugcuguacaacuccgccagcuucagcaccuucaagugcuacggcguguccccuaccaagcugaacgaccugugcuucacaaacguguacgccgacagcuucgugauccggggagaugaagugcggcagauugccccuggacagacaggcaagaucgccgacuacaacuacaagcugcccgacgacuucaccggcugugugauugccuggaacagcaacaaccuggacuccaaagucggcggcaacuacaauuaccuguaccggcuguuccggaaguccaaucugaagcccuucgagcgggacaucuccaccgagaucuaucaggccggcagcaccccuuguaacggcguggaaggcuucaacugcuacuucccacugcaguccuacggcuuucagcccacaaauggcgugggcuaucagcccuacagagugguggugcugagcuucgaacugcugcaugccccugccacagugugcggcccuaagaaaagcaccaaucucgugaagaacaaaugcgugaacuucaacuucaacggccugaccggcaccggcgugcugacagagagcaacaagaaguuccugccauuccagcaguuuggccgggauaucgccgauaccacagacgccguuagagauccccagacacuggaaauccuggacaucaccccuugcagcuucggcggagugucugugaucaccccuggcaccaacaccagcaaucagguggcagugcuguaccagggcgugaacuguaccgaagugcccguggccauucacgccgaucagcugacaccuacauggcggguguacuccaccggcagcaauguguuucagaccagagccggcugucugaucggagccgagcacgugaacaauagcuacgagugcgacauccccaucggcgcuggaaucugcgccagcuaccagacacagacaaacagcccucggagagccagaagcguggccagccagagcaucauugccuacacaaugucucugggcgccgagaacagcguggccuacuccaacaacucuaucgcuauccccaccaacuucaccaucagcgugaccacagagauccugccuguguccaugaccaagaccagcguggacugcaccauguacaucugcggcgauuccaccgagugcuccaaccugcugcugcaguacggcagcuucugcacccagcugaauagagcccugacagggaucgccguggaacaggacaagaacacccaagagguguucgcccaagugaagcagaucuacaagaccccuccuaucaaggacuucggcggcuucaauuucagccagauucugcccgauccuagcaagcccagcaagcggagcuucaucgaggaccugcuguucaacaaagugacacuggccgacgccggcuucaucaagcaguauggcgauugucugggcgacauugccgccagggaucugauuugcgcccagaaguuuaacggacugacagugcugccuccucugcugaccgaugagaugaucgcccaguacacaucugcccugcuggccggcacaaucacaagcggcuggacauuuggagcaggcgccgcucugcagauccccuuugcuaugcagauggccuaccgguucaacggcaucggagugacccagaaugugcuguacgagaaccagaagcugaucgccaaccaguucaacagcgccaucggcaagauccaggacagccugagcagcacagcaagcgcccugggaaagcugcaggacguggucaaccagaaugcccaggcacugaacacccuggucaagcagcuguccuccaacuucggcgccaucagcucugugcugaacgauauccugagcagacuggacaaggucgaggccgaggugcagaucgacagacugaucacaggcagacugcagagccuccagacauacgugacccagcagcugaucagagccgccgagauuagagccucugccaaucuggccgccaccaagaugucugagugugugcugggccagagcaagagaguggacuuuugcggcaagggcuaccaccugaugagcuucccucagucugccccucacggcgugguguuucugcacgugacauaugugcccgcucaagagaagaauuucaccaccgcuccagccaucugccacgacggcaaagcccacuuuccuagagaaggcguguucguguccaacggcacccauugguucgugacacagcggaacuucuacgagccccagaucaucaccaccgacaacaccuucgugucuggcaacugcgacgucgugaucggcauugugaacaauaccguguacgacccucugcagcccgagcuggacagcuucaaagaggaacuggacaaguacuuuaagaaccacacaagccccgacguggaccugggcgauaucagcggaaucaaugccagcgucgugaacauccagaaagagaucgaccggcugaacgagguggccaagaaucugaacgagagccugaucgaccugcaagaacuggggaaguacgagcaguacaucaaguggcccugguacaucuggcugggcuuuaucgccggacugauugccaucgugauggucacaaucaugcuguguugcaugaccagcugcuguagcugccugaagggcuguuguagcuguggcagcugcugcaaguucgacgaggacgauucugagcccgugcugaagggcgugaaacugcacuacacaugaggacuaguuauaagacugacuagcccgaugggccucccaacgggcccuccuccccuccuugcaccgagauuaaucaaaggcucuuuucagagccaccaaaaaaaaaaaaaaaaaaaaaaaaaaaaaaaaaaaaaaaaaaaaaaaaaaaaaaaaaaaaaaaaaaaaaaaaaaaaaaaaaaaaaaaaaaaaaaaaaaaaa

SEQ ID NO: 24161 - RNA, 4035 nt, Artificial Sequence
  SARS-CoV-2/Wuhan/WIV05/2019__EPI_ISL_402128 spike protein mRNA gc mod (1-1273)(A222V_D614G)
aggagaaagcuuaccauguucguguuccuggugcugcugccucugguguccagccagugugugaaccugaccaccagaacacagcugccuccagccuacaccaacagcuuuaccagaggcguguacuaccccgacaagguguucagauccagcgugcugcacucuacccaggaccuguuccugccuuucuucagcaacgugaccugguuccacgccauccacguguccggcaccaauggcaccaagagauucgacaaccccgugcugcccuucaacgacgggguguacuuugccagcaccgagaaguccaacaucaucagaggcuggaucuucggcaccacacuggacagcaagacccagagccugcugaucgugaacaacgccaccaacguggucaucaaagugugcgaguuccaguucugcaacgaccccuuccugggcgucuacuaccacaagaacaacaagagcuggauggaaagcgaguuccggguguacagcagcgccaacaacugcaccuucgaguacgugucccagccuuuccugauggaccuggaaggcaagcagggcaacuucaagaaccugcgcgaguucguguuuaagaacaucgacggcuacuucaagaucuacagcaagcacaccccuaucaaccucgugcgggaucugccucagggcuucucugugcuggaaccccugguggaucugcccaucggcaucaacaucacccgguuucagacacugcuggcccugcacagaagcuaccugacaccuggcgauagcagcagcggauggacagcuggugccgccgcuuacuaugugggcuaccugcagccuagaaccuuccugcugaaguacaacgagaacggcaccaucaccgacgccguggauugugcucuggauccucugagcgagacaaagugcacccugaaguccuucaccguggaaaagggcaucuaccagaccagcaacuuccgggugcagcccaccgaauccaucgugcgguuccccaauaucaccaaucugugccccuucggcgagguguucaaugccaccagauucgccucuguguacgccuggaaccggaagcggaucagcaauugcguggccgacuacuccgugcuguacaacuccgccagcuucagcaccuucaagugcuacggcguguccccuaccaagcugaacgaccugugcuucacaaacguguacgccgacagcuucgugauccggggagaugaagugcggcagauugccccuggacagacaggcaagaucgccgacuacaacuacaagcugcccgacgacuucaccggcugugugauugccuggaacagcaacaaccuggacuccaaagucggcggcaacuacaauuaccuguaccggcuguuccggaaguccaaucugaagcccuucgagcgggacaucuccaccgagaucuaucaggccggcagcaccccuuguaacggcguggaaggcuucaacugcuacuucccacugcaguccuacggcuuucagcccacaaauggcgugggcuaucagcccuacagagugguggugcugagcuucgaacugcugcaugccccugccacagugugcggcccuaagaaaagcaccaaucucgugaagaacaaaugcgugaacuucaacuucaacggccugaccggcaccggcgugcugacagagagcaacaagaaguuccugccauuccagcaguuuggccgggauaucgccgauaccacagacgccguuagagauccccagacacuggaaauccuggacaucaccccuugcagcuucggcggagugucugugaucaccccuggcaccaacaccagcaaucagguggcagugcuguaccagggcgugaacuguaccgaagugcccguggccauucacgccgaucagcugacaccuacauggcggguguacuccaccggcagcaauguguuucagaccagagccggcugucugaucggagccgagcacgugaacaauagcuacgagugcgacauccccaucggcgcuggaaucugcgccagcuaccagacacagacaaacagcccucggagagccagaagcguggccagccagagcaucauugccuacacaaugucucugggcgccgagaacagcguggccuacuccaacaacucuaucgcuauccccaccaacuucaccaucagcgugaccacagagauccugccuguguccaugaccaagaccagcguggacugcaccauguacaucugcggcgauuccaccgagugcuccaaccugcugcugcaguacggcagcuucugcacccagcugaauagagcccugacagggaucgccguggaacaggacaagaacacccaagagguguucgcccaagugaagcagaucuacaagaccccuccuaucaaggacuucggcggcuucaauuucagccagauucugcccgauccuagcaagcccagcaagcggagcuucaucgaggaccugcuguucaacaaagugacacuggccgacgccggcuucaucaagcaguauggcgauugucugggcgacauugccgccagggaucugauuugcgcccagaaguuuaacggacugacagugcugccuccucugcugaccgaugagaugaucgcccaguacacaucugcccugcuggccggcacaaucacaagcggcuggacauuuggagcaggcgccgcucugcagauccccuuugcuaugcagauggccuaccgguucaacggcaucggagugacccagaaugugcuguacgagaaccagaagcugaucgccaaccaguucaacagcgccaucggcaagauccaggacagccugagcagcacagcaagcgcccugggaaagcugcaggacguggucaaccagaaugcccaggcacugaacacccuggucaagcagcuguccuccaacuucggcgccaucagcucugugcugaacgauauccugagcagacuggacaaggucgaggccgaggugcagaucgacagacugaucacaggcagacugcagagccuccagacauacgugacccagcagcugaucagagccgccgagauuagagccucugccaaucuggccgccaccaagaugucugagugugugcugggccagagcaagagaguggacuuuugcggcaagggcuaccaccugaugagcuucccucagucugccccucacggcgugguguuucugcacgugacauaugugcccgcucaagagaagaauuucaccaccgcuccagccaucugccacgacggcaaagcccacuuuccuagagaaggcguguucguguccaacggcacccauugguucgugacacagcggaacuucuacgagccccagaucaucaccaccgacaacaccuucgugucuggcaacugcgacgucgugaucggcauugugaacaauaccguguacgacccucugcagcccgagcuggacagcuucaaagaggaacuggacaaguacuuuaagaaccacacaagccccgacguggaccugggcgauaucagcggaaucaaugccagcgucgugaacauccagaaagagaucgaccggcugaacgagguggccaagaaucugaacgagagccugaucgaccugcaagaacuggggaaguacgagcaguacaucaaguggcccugguacaucuggcugggcuuuaucgccggacugauugccaucgugauggucacaaucaugcuguguugcaugaccagcugcuguagcugccugaagggcuguuguagcuguggcagcugcugcaaguucgacgaggacgauucugagcccgugcugaagggcgugaaacugcacuacacaugaggacuaguuauaagacugacuagcccgaugggccucccaacgggcccuccuccccuccuugcaccgagauuaaucaaaggcucuuuucagagccaccaaaaaaaaaaaaaaaaaaaaaaaaaaaaaaaaaaaaaaaaaaaaaaaaaaaaaaaaaaaaaaaaaaaaaaaaaaaaaaaaaaaaaaaaaaaaaaaaaaaaa

SEQ ID NO: 24162 - RNA, 4035 nt, Artificial Sequence
  SARS-CoV-2/Wuhan/WIV05/2019__EPI_ISL_402128 spike protein mRNA gc mod (1-1273)(N439K_D614G)
aggagaaagcuuaccauguucguguuccuggugcugcugccucugguguccagccagugugugaaccugaccaccagaacacagcugccuccagccuacaccaacagcuuuaccagaggcguguacuaccccgacaagguguucagauccagcgugcugcacucuacccaggaccuguuccugccuuucuucagcaacgugaccugguuccacgccauccacguguccggcaccaauggcaccaagagauucgacaaccccgugcugcccuucaacgacgggguguacuuugccagcaccgagaaguccaacaucaucagaggcuggaucuucggcaccacacuggacagcaagacccagagccugcugaucgugaacaacgccaccaacguggucaucaaagugugcgaguuccaguucugcaacgaccccuuccugggcgucuacuaccacaagaacaacaagagcuggauggaaagcgaguuccggguguacagcagcgccaacaacugcaccuucgaguacgugucccagccuuuccugauggaccuggaaggcaagcagggcaacuucaagaaccugcgcgaguucguguuuaagaacaucgacggcuacuucaagaucuacagcaagcacaccccuaucaaccucgugcgggaucugccucagggcuucucugcucuggaaccccugguggaucugcccaucggcaucaacaucacccgguuucagacacugcuggcccugcacagaagcuaccugacaccuggcgauagcagcagcggauggacagcuggugccgccgcuuacuaugugggcuaccugcagccuagaaccuuccugcugaaguacaacgagaacggcaccaucaccgacgccguggauugugcucuggauccucugagcgagacaaagugcacccugaaguccuucaccguggaaaagggcaucuaccagaccagcaacuuccgggugcagcccaccgaauccaucgugcgguuccccaauaucaccaaucugugccccuucggcgagguguucaaugccaccagauucgccucuguguacgccuggaaccggaagcggaucagcaauugcguggccgacuacuccgugcuguacaacuccgccagcuucagcaccuucaagugcuacggcguguccccuaccaagcugaacgaccugugcuucacaaacguguacgccgacagcuucgugauccggggagaugaagugcggcagauugccccuggacagacaggcaagaucgccgacuacaacuacaagcugcccgacgacuucaccggcugugugauugccuggaacagcaagaaccuggacuccaaagucggcggcaacuacaauuaccuguaccggcuguuccggaaguccaaucugaagcccuucgagcgggacaucuccaccgagaucuaucaggccggcagcaccccuuguaacggcguggaaggcuucaacugcuacuucccacugcaguccuacggcuuucagcccacaaauggcgugggcuaucagcccuacagagugguggugcugagcuucgaacugcugcaugccccugccacagugugcggcccuaagaaaagcaccaaucucgugaagaacaaaugcgugaacuucaacuucaacggccugaccggcaccggcgugcugacagagagcaacaagaaguuccugccauuccagcaguuuggccgggauaucgccgauaccacagacgccguuagagauccccagacacuggaaauccuggacaucaccccuugcagcuucggcggagugucugugaucaccccuggcaccaacaccagcaaucagguggcagugcuguaccagggcgugaacuguaccgaagugcccguggccauucacgccgaucagcugacaccuacauggcggguguacuccaccggcagcaauguguuucagaccagagccggcugucugaucggagccgagcacgugaacaauagcuacgagugcgacauccccaucggcgcuggaaucugcgccagcuaccagacacagacaaacagcccucggagagccagaagcguggccagccagagcaucauugccuacacaaugucucugggcgccgagaacagcguggccuacuccaacaacucuaucgcuauccccaccaacuucaccaucagcgugaccacagagauccugccuguguccaugaccaagaccagcguggacugcaccauguacaucugcggcgauuccaccgagugcuccaaccugcugcugcaguacggcagcuucugcacccagcugaauagagcccugacagggaucgccguggaacaggacaagaacacccaagagguguucgcccaagugaagcagaucuacaagaccccuccuaucaaggacuucggcggcuucaauuucagccagauucugcccgauccuagcaagcccagcaagcggagcuucaucgaggaccugcuguucaacaaagugacacuggccgacgccggcuucaucaagcaguauggcgauugucugggcgacauugccgccagggaucugauuugcgcccagaaguuuaacggacugacagugcugccuccucugcugaccgaugagaugaucgcccaguacacaucugcccugcuggccggcacaaucacaagcggcuggacauuuggagcaggcgccgcucugcagauccccuuugcuaugcagauggccuaccgguucaacggcaucggagugacccagaaugugcuguacgagaaccagaagcugaucgccaaccaguucaacagcgccaucggcaagauccaggacagccugagcagcacagcaagcgcccugggaaagcugcaggacguggucaaccagaaugcccaggcacugaacacccuggucaagcagcuguccuccaacuucggcgccaucagcucugugcugaacgauauccugagcagacuggacaaggucgaggccgaggugcagaucgacagacugaucacaggcagacugcagagccuccagacauacgugacccagcagcugaucagagccgccgagauuagagccucugccaaucuggccgccaccaagaugucugagugugugcugggccagagcaagagaguggacuuuugcggcaagggcuaccaccugaugagcuucccucagucugccccucacggcgugguguuucugcacgugacauaugugcccgcucaagagaagaauuucaccaccgcuccagccaucugccacgacggcaaagcccacuuuccuagagaaggcguguucguguccaacggcacccauugguucgugacacagcggaacuucuacgagccccagaucaucaccaccgacaacaccuucgugucuggcaacugcgacgucgugaucggcauugugaacaauaccguguacgacccucugcagcccgagcuggacagcuucaaagaggaacuggacaaguacuuuaagaaccacacaagccccgacguggaccugggcgauaucagcggaaucaaugccagcgucgugaacauccagaaagagaucgaccggcugaacgagguggccaagaaucugaacgagagccugaucgaccugcaagaacuggggaaguacgagcaguacaucaaguggcccugguacaucuggcugggcuuuaucgccggacugauugccaucgugauggucacaaucaugcuguguugcaugaccagcugcuguagcugccugaagggcuguuguagcuguggcagcugcugcaaguucgacgaggacgauucugagcccgugcugaagggcgugaaacugcacuacacaugaggacuaguuauaagacugacuagcccgaugggccucccaacgggcccuccuccccuccuugcaccgagauuaaucaaaggcucuuuucagagccaccaaaaaaaaaaaaaaaaaaaaaaaaaaaaaaaaaaaaaaaaaaaaaaaaaaaaaaaaaaaaaaaaaaaaaaaaaaaaaaaaaaaaaaaaaaaaaaaaaaaaa

SEQ ID NO: 24163 - RNA, 4035 nt, Artificial Sequence
  SARS-CoV-2/Wuhan/WIV05/2019__EPI_ISL_402128 spike protein mRNA gc mod (1-1273)(S477N_D614G)
aggagaaagcuuaccauguucguguuccuggugcugcugccucugguguccagccagugugugaaccugaccaccagaacacagcugccuccagccuacaccaacagcuuuaccagaggcguguacuaccccgacaagguguucagauccagcgugcugcacucuacccaggaccuguuccugccuuucuucagcaacgugaccugguuccacgccauccacguguccggcaccaauggcaccaagagauucgacaaccccgugcugcccuucaacgacgggguguacuuugccagcaccgagaaguccaacaucaucagaggcuggaucuucggcaccacacuggacagcaagacccagagccugcugaucgugaacaacgccaccaacguggucaucaaagugugcgaguuccaguucugcaacgaccccuuccugggcgucuacuaccacaagaacaacaagagcuggauggaaagcgaguuccggguguacagcagcgccaacaacugcaccuucgaguacgugucccagccuuuccugauggaccuggaaggcaagcagggcaacuucaagaaccugcgcgaguucguguuuaagaacaucgacggcuacuucaagaucuacagcaagcacaccccuaucaaccucgugcgggaucugccucagggcuucucugcucuggaaccccugguggaucugcccaucggcaucaacaucacccgguuucagacacugcuggcccugcacagaagcuaccugacaccuggcgauagcagcagcggauggacagcuggugccgccgcuuacuaugugggcuaccugcagccuagaaccuuccugcugaaguacaacgagaacggcaccaucaccgacgccguggauugugcucuggauccucugagcgagacaaagugcacccugaaguccuucaccguggaaaagggcaucuaccagaccagcaacuuccgggugcagcccaccgaauccaucgugcgguuccccaauaucaccaaucugugccccuucggcgagguguucaaugccaccagauucgccucuguguacgccuggaaccggaagcggaucagcaauugcguggccgacuacuccgugcuguacaacuccgccagcuucagcaccuucaagugcuacggcguguccccuaccaagcugaacgaccugugcuucacaaacguguacgccgacagcuucgugauccggggagaugaagugcggcagauugccccuggacagacaggcaagaucgccgacuacaacuacaagcugcccgacgacuucaccggcugugugauugccuggaacagcaacaaccuggacuccaaagucggcggcaacuacaauuaccuguaccggcuguuccggaaguccaaucugaagcccuucgagcgggacaucuccaccgagaucuaucaggccggcaacaccccuuguaacggcguggaaggcuucaacugcuacuucccacugcaguccuacggcuuucagcccacaaauggcgugggcuaucagcccuacagagugguggugcugagcuucgaacugcugcaugccccugccacagugugcggcccuaagaaaagcaccaaucucgugaagaacaaaugcgugaacuucaacuucaacggccugaccggcaccggcgugcugacagagagcaacaagaaguuccugccauuccagcaguuuggccgggauaucgccgauaccacagacgccguuagagauccccagacacuggaaauccuggacaucaccccuugcagcuucggcggagugucugugaucaccccuggcaccaacaccagcaaucagguggcagugcuguaccagggcgugaacuguaccgaagugcccguggccauucacgccgaucagcugacaccuacauggcggguguacuccaccggcagcaauguguuucagaccagagccggcugucugaucggagccgagcacgugaacaauagcuacgagugcgacauccccaucggcgcuggaaucugcgccagcuaccagacacagacaaacagcccucggagagccagaagcguggccagccagagcaucauugccuacacaaugucucugggcgccgagaacagcguggccuacuccaacaacucuaucgcuauccccaccaacuucaccaucagcgugaccacagagauccugccuguguccaugaccaagaccagcguggacugcaccauguacaucugcggcgauuccaccgagugcuccaaccugcugcugcaguacggcagcuucugcacccagcugaauagagcccugacagggaucgccguggaacaggacaagaacacccaagagguguucgcccaagugaagcagaucuacaagaccccuccuaucaaggacuucggcggcuucaauuucagccagauucugcccgauccuagcaagcccagcaagcggagcuucaucgaggaccugcuguucaacaaagugacacuggccgacgccggcuucaucaagcaguauggcgauugucugggcgacauugccgccagggaucugauuugcgcccagaaguuuaacggacugacagugcugccuccucugcugaccgaugagaugaucgcccaguacacaucugcccugcuggccggcacaaucacaagcggcuggacauuuggagcaggcgccgcucugcagauccccuuugcuaugcagauggccuaccgguucaacggcaucggagugacccagaaugugcuguacgagaaccagaagcugaucgccaaccaguucaacagcgccaucggcaagauccaggacagccugagcagcacagcaagcgcccugggaaagcugcaggacguggucaaccagaaugcccaggcacugaacacccuggucaagcagcuguccuccaacuucggcgccaucagcucugugcugaacgauauccugagcagacuggacaaggucgaggccgaggugcagaucgacagacugaucacaggcagacugcagagccuccagacauacgugacccagcagcugaucagagccgccgagauuagagccucugccaaucuggccgccaccaagaugucugagugugugcugggccagagcaagagaguggacuuuugcggcaagggcuaccaccugaugagcuucccucagucugccccucacggcgugguguuucugcacgugacauaugugcccgcucaagagaagaauuucaccaccgcuccagccaucugccacgacggcaaagcccacuuuccuagagaaggcguguucguguccaacggcacccauugguucgugacacagcggaacuucuacgagccccagaucaucaccaccgacaacaccuucgugucuggcaacugcgacgucgugaucggcauugugaacaauaccguguacgacccucugcagcccgagcuggacagcuucaaagaggaacuggacaaguacuuuaagaaccacacaagccccgacguggaccugggcgauaucagcggaaucaaugccagcgucgugaacauccagaaagagaucgaccggcugaacgagguggccaagaaucugaacgagagccugaucgaccugcaagaacuggggaaguacgagcaguacaucaaguggcccugguacaucuggcugggcuuuaucgccggacugauugccaucgugauggucacaaucaugcuguguugcaugaccagcugcuguagcugccugaagggcuguuguagcuguggcagcugcugcaaguucgacgaggacgauucugagcccgugcugaagggcgugaaacugcacuacacaugaggacuaguuauaagacugacuagcccgaugggccucccaacgggcccuccuccccuccuugcaccgagauuaaucaaaggcucuuuucagagccaccaaaaaaaaaaaaaaaaaaaaaaaaaaaaaaaaaaaaaaaaaaaaaaaaaaaaaaaaaaaaaaaaaaaaaaaaaaaaaaaaaaaaaaaaaaaaaaaaaaaaa

SEQ ID NO: 24164 - RNA, 4035 nt, Artificial Sequence
  SARS-CoV-2/Wuhan/WIV05/2019__EPI_ISL_402128 spike protein mRNA gc mod (1-1273)(N501Y_D614G)
aggagaaagcuuaccauguucguguuccuggugcugcugccucugguguccagccagugugugaaccugaccaccagaacacagcugccuccagccuacaccaacagcuuuaccagaggcguguacuaccccgacaagguguucagauccagcgugcugcacucuacccaggaccuguuccugccuuucuucagcaacgugaccugguuccacgccauccacguguccggcaccaauggcaccaagagauucgacaaccccgugcugcccuucaacgacgggguguacuuugccagcaccgagaaguccaacaucaucagaggcuggaucuucggcaccacacuggacagcaagacccagagccugcugaucgugaacaacgccaccaacguggucaucaaagugugcgaguuccaguucugcaacgaccccuuccugggcgucuacuaccacaagaacaacaagagcuggauggaaagcgaguuccggguguacagcagcgccaacaacugcaccuucgaguacgugucccagccuuuccugauggaccuggaaggcaagcagggcaacuucaagaaccugcgcgaguucguguuuaagaacaucgacggcuacuucaagaucuacagcaagcacaccccuaucaaccucgugcgggaucugccucagggcuucucugcucuggaaccccugguggaucugcccaucggcaucaacaucacccgguuucagacacugcuggcccugcacagaagcuaccugacaccuggcgauagcagcagcggauggacagcuggugccgccgcuuacuaugugggcuaccugcagccuagaaccuuccugcugaaguacaacgagaacggcaccaucaccgacgccguggauugugcucuggauccucugagcgagacaaagugcacccugaaguccuucaccguggaaaagggcaucuaccagaccagcaacuuccgggugcagcccaccgaauccaucgugcgguuccccaauaucaccaaucugugccccuucggcgagguguucaaugccaccagauucgccucuguguacgccuggaaccggaagcggaucagcaauugcguggccgacuacuccgugcuguacaacuccgccagcuucagcaccuucaagugcuacggcguguccccuaccaagcugaacgaccugugcuucacaaacguguacgccgacagcuucgugauccggggagaugaagugcggcagauugccccuggacagacaggcaagaucgccgacuacaacuacaagcugcccgacgacuucaccggcugugugauugccuggaacagcaacaaccuggacuccaaagucggcggcaacuacaauuaccuguaccggcuguuccggaaguccaaucugaagcccuucgagcgggacaucuccaccgagaucuaucaggccggcagcaccccuuguaacggcguggaaggcuucaacugcuacuucccacugcaguccuacggcuuucagcccacauacggcgugggcuaucagcccuacagagugguggugcugagcuucgaacugcugcaugccccugccacagugugcggcccuaagaaaagcaccaaucucgugaagaacaaaugcgugaacuucaacuucaacggccugaccggcaccggcgugcugacagagagcaacaagaaguuccugccauuccagcaguuuggccgggauaucgccgauaccacagacgccguuagagauccccagacacuggaaauccuggacaucaccccuugcagcuucggcggagugucugugaucaccccuggcaccaacaccagcaaucagguggcagugcuguaccagggcgugaacuguaccgaagugcccguggccauucacgccgaucagcugacaccuacauggcggguguacuccaccggcagcaauguguuucagaccagagccggcugucugaucggagccgagcacgugaacaauagcuacgagugcgacauccccaucggcgcuggaaucugcgccagcuaccagacacagacaaacagcccucggagagccagaagcguggccagccagagcaucauugccuacacaaugucucugggcgccgagaacagcguggccuacuccaacaacucuaucgcuauccccaccaacuucaccaucagcgugaccacagagauccugccuguguccaugaccaagaccagcguggacugcaccauguacaucugcggcgauuccaccgagugcuccaaccugcugcugcaguacggcagcuucugcacccagcugaauagagcccugacagggaucgccguggaacaggacaagaacacccaagagguguucgcccaagugaagcagaucuacaagaccccuccuaucaaggacuucggcggcuucaauuucagccagauucugcccgauccuagcaagcccagcaagcggagcuucaucgaggaccugcuguucaacaaagugacacuggccgacgccggcuucaucaagcaguauggcgauugucugggcgacauugccgccagggaucugauuugcgcccagaaguuuaacggacugacagugcugccuccucugcugaccgaugagaugaucgcccaguacacaucugcccugcuggccggcacaaucacaagcggcuggacauuuggagcaggcgccgcucugcagauccccuuugcuaugcagauggccuaccgguucaacggcaucggagugacccagaaugugcuguacgagaaccagaagcugaucgccaaccaguucaacagcgccaucggcaagauccaggacagccugagcagcacagcaagcgcccugggaaagcugcaggacguggucaaccagaaugcccaggcacugaacacccuggucaagcagcuguccuccaacuucggcgccaucagcucugugcugaacgauauccugagcagacuggacaaggucgaggccgaggugcagaucgacagacugaucacaggcagacugcagagccuccagacauacgugacccagcagcugaucagagccgccgagauuagagccucugccaaucuggccgccaccaagaugucugagugugugcugggccagagcaagagaguggacuuuugcggcaagggcuaccaccugaugagcuucccucagucugccccucacggcgugguguuucugcacgugacauaugugcccgcucaagagaagaauuucaccaccgcuccagccaucugccacgacggcaaagcccacuuuccuagagaaggcguguucguguccaacggcacccauugguucgugacacagcggaacuucuacgagccccagaucaucaccaccgacaacaccuucgugucuggcaacugcgacgucgugaucggcauugugaacaauaccguguacgacccucugcagcccgagcuggacagcuucaaagaggaacuggacaaguacuuuaagaaccacacaagccccgacguggaccugggcgauaucagcggaaucaaugccagcgucgugaacauccagaaagagaucgaccggcugaacgagguggccaagaaucugaacgagagccugaucgaccugcaagaacuggggaaguacgagcaguacaucaaguggcccugguacaucuggcugggcuuuaucgccggacugauugccaucgugauggucacaaucaugcuguguugcaugaccagcugcuguagcugccugaagggcuguuguagcuguggcagcugcugcaaguucgacgaggacgauucugagcccgugcugaagggcgugaaacugcacuacacaugaggacuaguuauaagacugacuagcccgaugggccucccaacgggcccuccuccccuccuugcaccgagauuaaucaaaggcucuuuucagagccaccaaaaaaaaaaaaaaaaaaaaaaaaaaaaaaaaaaaaaaaaaaaaaaaaaaaaaaaaaaaaaaaaaaaaaaaaaaaaaaaaaaaaaaaaaaaaaaaaaaaaa

SEQ ID NO: 24165 - RNA, 4029 nt, Artificial Sequence
  SARS-CoV-2/Wuhan/WIV05/2019__EPI_ISL_402128 spike protein mRNA gc mod (1-1273)(H69del_V70del_D614G)
aggagaaagcuuaccauguucguguuccuggugcugcugccucugguguccagccagugugugaaccugaccaccagaacacagcugccuccagccuacaccaacagcuuuaccagaggcguguacuaccccgacaagguguucagauccagcgugcugcacucuacccaggaccuguuccugccuuucuucagcaacgugaccugguuccacgccaucuccggcaccaauggcaccaagagauucgacaaccccgugcugcccuucaacgacgggguguacuuugccagcaccgagaaguccaacaucaucagaggcuggaucuucggcaccacacuggacagcaagacccagagccugcugaucgugaacaacgccaccaacguggucaucaaagugugcgaguuccaguucugcaacgaccccuuccugggcgucuacuaccacaagaacaacaagagcuggauggaaagcgaguuccggguguacagcagcgccaacaacugcaccuucgaguacgugucccagccuuuccugauggaccuggaaggcaagcagggcaacuucaagaaccugcgcgaguucguguuuaagaacaucgacggcuacuucaagaucuacagcaagcacaccccuaucaaccucgugcgggaucugccucagggcuucucugcucuggaaccccugguggaucugcccaucggcaucaacaucacccgguuucagacacugcuggcccugcacagaagcuaccugacaccuggcgauagcagcagcggauggacagcuggugccgccgcuuacuaugugggcuaccugcagccuagaaccuuccugcugaaguacaacgagaacggcaccaucaccgacgccguggauugugcucuggauccucugagcgagacaaagugcacccugaaguccuucaccguggaaaagggcaucuaccagaccagcaacuuccgggugcagcccaccgaauccaucgugcgguuccccaauaucaccaaucugugccccuucggcgagguguucaaugccaccagauucgccucuguguacgccuggaaccggaagcggaucagcaauugcguggccgacuacuccgugcuguacaacuccgccagcuucagcaccuucaagugcuacggcguguccccuaccaagcugaacgaccugugcuucacaaacguguacgccgacagcuucgugauccggggagaugaagugcggcagauugccccuggacagacaggcaagaucgccgacuacaacuacaagcugcccgacgacuucaccggcugugugauugccuggaacagcaacaaccuggacuccaaagucggcggcaacuacaauuaccuguaccggcuguuccggaaguccaaucugaagcccuucgagcgggacaucuccaccgagaucuaucaggccggcagcaccccuuguaacggcguggaaggcuucaacugcuacuucccacugcaguccuacggcuuucagcccacaaauggcgugggcuaucagcccuacagagugguggugcugagcuucgaacugcugcaugccccugccacagugugcggcccuaagaaaagcaccaaucucgugaagaacaaaugcgugaacuucaacuucaacggccugaccggcaccggcgugcugacagagagcaacaagaaguuccugccauuccagcaguuuggccgggauaucgccgauaccacagacgccguuagagauccccagacacuggaaauccuggacaucaccccuugcagcuucggcggagugucugugaucaccccuggcaccaacaccagcaaucagguggcagugcuguaccagggcgugaacuguaccgaagugcccguggccauucacgccgaucagcugacaccuacauggcggguguacuccaccggcagcaauguguuucagaccagagccggcugucugaucggagccgagcacgugaacaauagcuacgagugcgacauccccaucggcgcuggaaucugcgccagcuaccagacacagacaaacagcccucggagagccagaagcguggccagccagagcaucauugccuacacaaugucucugggcgccgagaacagcguggccuacuccaacaacucuaucgcuauccccaccaacuucaccaucagcgugaccacagagauccugccuguguccaugaccaagaccagcguggacugcaccauguacaucugcggcgauuccaccgagugcuccaaccugcugcugcaguacggcagcuucugcacccagcugaauagagcccugacagggaucgccguggaacaggacaagaacacccaagagguguucgcccaagugaagcagaucuacaagaccccuccuaucaaggacuucggcggcuucaauuucagccagauucugcccgauccuagcaagcccagcaagcggagcuucaucgaggaccugcuguucaacaaagugacacuggccgacgccggcuucaucaagcaguauggcgauugucugggcgacauugccgccagggaucugauuugcgcccagaaguuuaacggacugacagugcugccuccucugcugaccgaugagaugaucgcccaguacacaucugcccugcuggccggcacaaucacaagcggcuggacauuuggagcaggcgccgcucugcagauccccuuugcuaugcagauggccuaccgguucaacggcaucggagugacccagaaugugcuguacgagaaccagaagcugaucgccaaccaguucaacagcgccaucggcaagauccaggacagccugagcagcacagcaagcgcccugggaaagcugcaggacguggucaaccagaaugcccaggcacugaacacccuggucaagcagcuguccuccaacuucggcgccaucagcucugugcugaacgauauccugagcagacuggacaaggucgaggccgaggugcagaucgacagacugaucacaggcagacugcagagccuccagacauacgugacccagcagcugaucagagccgccgagauuagagccucugccaaucuggccgccaccaagaugucugagugugugcugggccagagcaagagaguggacuuuugcggcaagggcuaccaccugaugagcuucccucagucugccccucacggcgugguguuucugcacgugacauaugugcccgcucaagagaagaauuucaccaccgcuccagccaucugccacgacggcaaagcccacuuuccuagagaaggcguguucguguccaacggcacccauugguucgugacacagcggaacuucuacgagccccagaucaucaccaccgacaacaccuucgugucuggcaacugcgacgucgugaucggcauugugaacaauaccguguacgacccucugcagcccgagcuggacagcuucaaagaggaacuggacaaguacuuuaagaaccacacaagccccgacguggaccugggcgauaucagcggaaucaaugccagcgucgugaacauccagaaagagaucgaccggcugaacgagguggccaagaaucugaacgagagccugaucgaccugcaagaacuggggaaguacgagcaguacaucaaguggcccugguacaucuggcugggcuuuaucgccggacugauugccaucgugauggucacaaucaugcuguguugcaugaccagcugcuguagcugccugaagggcuguuguagcuguggcagcugcugcaaguucgacgaggacgauucugagcccgugcugaagggcgugaaacugcacuacacaugaggacuaguuauaagacugacuagcccgaugggccucccaacgggcccuccuccccuccuugcaccgagauuaaucaaaggcucuuuucagagccaccaaaaaaaaaaaaaaaaaaaaaaaaaaaaaaaaaaaaaaaaaaaaaaaaaaaaaaaaaaaaaaaaaaaaaaaaaaaaaaaaaaaaaaaaaaaaaaaaaaaaa

SEQ ID NO: 24166 - RNA, 4035 nt, Artificial Sequence
  SARS-CoV-2/Wuhan/WIV05/2019__EPI_ISL_402128 spike protein mRNA gc mod (1-1273)(Y453F_D614G)
aggagaaagcuuaccauguucguguuccuggugcugcugccucugguguccagccagugugugaaccugaccaccagaacacagcugccuccagccuacaccaacagcuuuaccagaggcguguacuaccccgacaagguguucagauccagcgugcugcacucuacccaggaccuguuccugccuuucuucagcaacgugaccugguuccacgccauccacguguccggcaccaauggcaccaagagauucgacaaccccgugcugcccuucaacgacgggguguacuuugccagcaccgagaaguccaacaucaucagaggcuggaucuucggcaccacacuggacagcaagacccagagccugcugaucgugaacaacgccaccaacguggucaucaaagugugcgaguuccaguucugcaacgaccccuuccugggcgucuacuaccacaagaacaacaagagcuggauggaaagcgaguuccggguguacagcagcgccaacaacugcaccuucgaguacgugucccagccuuuccugauggaccuggaaggcaagcagggcaacuucaagaaccugcgcgaguucguguuuaagaacaucgacggcuacuucaagaucuacagcaagcacaccccuaucaaccucgugcgggaucugccucagggcuucucugcucuggaaccccugguggaucugcccaucggcaucaacaucacccgguuucagacacugcuggcccugcacagaagcuaccugacaccuggcgauagcagcagcggauggacagcuggugccgccgcuuacuaugugggcuaccugcagccuagaaccuuccugcugaaguacaacgagaacggcaccaucaccgacgccguggauugugcucuggauccucugagcgagacaaagugcacccugaaguccuucaccguggaaaagggcaucuaccagaccagcaacuuccgggugcagcccaccgaauccaucgugcgguuccccaauaucaccaaucugugccccuucggcgagguguucaaugccaccagauucgccucuguguacgccuggaaccggaagcggaucagcaauugcguggccgacuacuccgugcuguacaacuccgccagcuucagcaccuucaagugcuacggcguguccccuaccaagcugaacgaccugugcuucacaaacguguacgccgacagcuucgugauccggggagaugaagugcggcagauugccccuggacagacaggcaagaucgccgacuacaacuacaagcugcccgacgacuucaccggcugugugauugccuggaacagcaacaaccuggacuccaaagucggcggcaacuacaauuaccuguuccggcuguuccggaaguccaaucugaagcccuucgagcgggacaucuccaccgagaucuaucaggccggcagcaccccuuguaacggcguggaaggcuucaacugcuacuucccacugcaguccuacggcuuucagcccacaaauggcgugggcuaucagcccuacagagugguggugcugagcuucgaacugcugcaugccccugccacagugugcggcccuaagaaaagcaccaaucucgugaagaacaaaugcgugaacuucaacuucaacggccugaccggcaccggcgugcugacagagagcaacaagaaguuccugccauuccagcaguuuggccgggauaucgccgauaccacagacgccguuagagauccccagacacuggaaauccuggacaucaccccuugcagcuucggcggagugucugugaucaccccuggcaccaacaccagcaaucagguggcagugcuguaccagggcgugaacuguaccgaagugcccguggccauucacgccgaucagcugacaccuacauggcggguguacuccaccggcagcaauguguuucagaccagagccggcugucugaucggagccgagcacgugaacaauagcuacgagugcgacauccccaucggcgcuggaaucugcgccagcuaccagacacagacaaacagcccucggagagccagaagcguggccagccagagcaucauugccuacacaaugucucugggcgccgagaacagcguggccuacuccaacaacucuaucgcuauccccaccaacuucaccaucagcgugaccacagagauccugccuguguccaugaccaagaccagcguggacugcaccauguacaucugcggcgauuccaccgagugcuccaaccugcugcugcaguacggcagcuucugcacccagcugaauagagcccugacagggaucgccguggaacaggacaagaacacccaagagguguucgcccaagugaagcagaucuacaagaccccuccuaucaaggacuucggcggcuucaauuucagccagauucugcccgauccuagcaagcccagcaagcggagcuucaucgaggaccugcuguucaacaaagugacacuggccgacgccggcuucaucaagcaguauggcgauugucugggcgacauugccgccagggaucugauuugcgcccagaaguuuaacggacugacagugcugccuccucugcugaccgaugagaugaucgcccaguacacaucugcccugcuggccggcacaaucacaagcggcuggacauuuggagcaggcgccgcucugcagauccccuuugcuaugcagauggccuaccgguucaacggcaucggagugacccagaaugugcuguacgagaaccagaagcugaucgccaaccaguucaacagcgccaucggcaagauccaggacagccugagcagcacagcaagcgcccugggaaagcugcaggacguggucaaccagaaugcccaggcacugaacacccuggucaagcagcuguccuccaacuucggcgccaucagcucugugcugaacgauauccugagcagacuggacaaggucgaggccgaggugcagaucgacagacugaucacaggcagacugcagagccuccagacauacgugacccagcagcugaucagagccgccgagauuagagccucugccaaucuggccgccaccaagaugucugagugugugcugggccagagcaagagaguggacuuuugcggcaagggcuaccaccugaugagcuucccucagucugccccucacggcgugguguuucugcacgugacauaugugcccgcucaagagaagaauuucaccaccgcuccagccaucugccacgacggcaaagcccacuuuccuagagaaggcguguucguguccaacggcacccauugguucgugacacagcggaacuucuacgagccccagaucaucaccaccgacaacaccuucgugucuggcaacugcgacgucgugaucggcauugugaacaauaccguguacgacccucugcagcccgagcuggacagcuucaaagaggaacuggacaaguacuuuaagaaccacacaagccccgacguggaccugggcgauaucagcggaaucaaugccagcgucgugaacauccagaaagagaucgaccggcugaacgagguggccaagaaucugaacgagagccugaucgaccugcaagaacuggggaaguacgagcaguacaucaaguggcccugguacaucuggcugggcuuuaucgccggacugauugccaucgugauggucacaaucaugcuguguugcaugaccagcugcuguagcugccugaagggcuguuguagcuguggcagcugcugcaaguucgacgaggacgauucugagcccgugcugaagggcgugaaacugcacuacacaugaggacuaguuauaagacugacuagcccgaugggccucccaacgggcccuccuccccuccuugcaccgagauuaaucaaaggcucuuuucagagccaccaaaaaaaaaaaaaaaaaaaaaaaaaaaaaaaaaaaaaaaaaaaaaaaaaaaaaaaaaaaaaaaaaaaaaaaaaaaaaaaaaaaaaaaaaaaaaaaaaaaaa

SEQ ID NO: 24167 - RNA, 4035 nt, Artificial Sequence
  SARS-CoV-2/Wuhan/WIV05/2019__EPI_ISL_402128 spike protein mRNA gc mod (1-1273)(D614G_I692V)
aggagaaagcuuaccauguucguguuccuggugcugcugccucugguguccagccagugugugaaccugaccaccagaacacagcugccuccagccuacaccaacagcuuuaccagaggcguguacuaccccgacaagguguucagauccagcgugcugcacucuacccaggaccuguuccugccuuucuucagcaacgugaccugguuccacgccauccacguguccggcaccaauggcaccaagagauucgacaaccccgugcugcccuucaacgacgggguguacuuugccagcaccgagaaguccaacaucaucagaggcuggaucuucggcaccacacuggacagcaagacccagagccugcugaucgugaacaacgccaccaacguggucaucaaagugugcgaguuccaguucugcaacgaccccuuccugggcgucuacuaccacaagaacaacaagagcuggauggaaagcgaguuccggguguacagcagcgccaacaacugcaccuucgaguacgugucccagccuuuccugauggaccuggaaggcaagcagggcaacuucaagaaccugcgcgaguucguguuuaagaacaucgacggcuacuucaagaucuacagcaagcacaccccuaucaaccucgugcgggaucugccucagggcuucucugcucuggaaccccugguggaucugcccaucggcaucaacaucacccgguuucagacacugcuggcccugcacagaagcuaccugacaccuggcgauagcagcagcggauggacagcuggugccgccgcuuacuaugugggcuaccugcagccuagaaccuuccugcugaaguacaacgagaacggcaccaucaccgacgccguggauugugcucuggauccucugagcgagacaaagugcacccugaaguccuucaccguggaaaagggcaucuaccagaccagcaacuuccgggugcagcccaccgaauccaucgugcgguuccccaauaucaccaaucugugccccuucggcgagguguucaaugccaccagauucgccucuguguacgccuggaaccggaagcggaucagcaauugcguggccgacuacuccgugcuguacaacuccgccagcuucagcaccuucaagugcuacggcguguccccuaccaagcugaacgaccugugcuucacaaacguguacgccgacagcuucgugauccggggagaugaagugcggcagauugccccuggacagacaggcaagaucgccgacuacaacuacaagcugcccgacgacuucaccggcugugugauugccuggaacagcaacaaccuggacuccaaagucggcggcaacuacaauuaccuguaccggcuguuccggaaguccaaucugaagcccuucgagcgggacaucuccaccgagaucuaucaggccggcagcaccccuuguaacggcguggaaggcuucaacugcuacuucccacugcaguccuacggcuuucagcccacaaauggcgugggcuaucagcccuacagagugguggugcugagcuucgaacugcugcaugccccugccacagugugcggcccuaagaaaagcaccaaucucgugaagaacaaaugcgugaacuucaacuucaacggccugaccggcaccggcgugcugacagagagcaacaagaaguuccugccauuccagcaguuuggccgggauaucgccgauaccacagacgccguuagagauccccagacacuggaaauccuggacaucaccccuugcagcuucggcggagugucugugaucaccccuggcaccaacaccagcaaucagguggcagugcuguaccagggcgugaacuguaccgaagugcccguggccauucacgccgaucagcugacaccuacauggcggguguacuccaccggcagcaauguguuucagaccagagccggcugucugaucggagccgagcacgugaacaauagcuacgagugcgacauccccaucggcgcuggaaucugcgccagcuaccagacacagacaaacagcccucggagagccagaagcguggccagccagagcgugauugccuacacaaugucucugggcgccgagaacagcguggccuacuccaacaacucuaucgcuauccccaccaacuucaccaucagcgugaccacagagauccugccuguguccaugaccaagaccagcguggacugcaccauguacaucugcggcgauuccaccgagugcuccaaccugcugcugcaguacggcagcuucugcacccagcugaauagagcccugacagggaucgccguggaacaggacaagaacacccaagagguguucgcccaagugaagcagaucuacaagaccccuccuaucaaggacuucggcggcuucaauuucagccagauucugcccgauccuagcaagcccagcaagcggagcuucaucgaggaccugcuguucaacaaagugacacuggccgacgccggcuucaucaagcaguauggcgauugucugggcgacauugccgccagggaucugauuugcgcccagaaguuuaacggacugacagugcugccuccucugcugaccgaugagaugaucgcccaguacacaucugcccugcuggccggcacaaucacaagcggcuggacauuuggagcaggcgccgcucugcagauccccuuugcuaugcagauggccuaccgguucaacggcaucggagugacccagaaugugcuguacgagaaccagaagcugaucgccaaccaguucaacagcgccaucggcaagauccaggacagccugagcagcacagcaagcgcccugggaaagcugcaggacguggucaaccagaaugcccaggcacugaacacccuggucaagcagcuguccuccaacuucggcgccaucagcucugugcugaacgauauccugagcagacuggacaaggucgaggccgaggugcagaucgacagacugaucacaggcagacugcagagccuccagacauacgugacccagcagcugaucagagccgccgagauuagagccucugccaaucuggccgccaccaagaugucugagugugugcugggccagagcaagagaguggacuuuugcggcaagggcuaccaccugaugagcuucccucagucugccccucacggcgugguguuucugcacgugacauaugugcccgcucaagagaagaauuucaccaccgcuccagccaucugccacgacggcaaagcccacuuuccuagagaaggcguguucguguccaacggcacccauugguucgugacacagcggaacuucuacgagccccagaucaucaccaccgacaacaccuucgugucuggcaacugcgacgucgugaucggcauugugaacaauaccguguacgacccucugcagcccgagcuggacagcuucaaagaggaacuggacaaguacuuuaagaaccacacaagccccgacguggaccugggcgauaucagcggaaucaaugccagcgucgugaacauccagaaagagaucgaccggcugaacgagguggccaagaaucugaacgagagccugaucgaccugcaagaacuggggaaguacgagcaguacaucaaguggcccugguacaucuggcugggcuuuaucgccggacugauugccaucgugauggucacaaucaugcuguguugcaugaccagcugcuguagcugccugaagggcuguuguagcuguggcagcugcugcaaguucgacgaggacgauucugagcccgugcugaagggcgugaaacugcacuacacaugaggacuaguuauaagacugacuagcccgaugggccucccaacgggcccuccuccccuccuugcaccgagauuaaucaaaggcucuuuucagagccaccaaaaaaaaaaaaaaaaaaaaaaaaaaaaaaaaaaaaaaaaaaaaaaaaaaaaaaaaaaaaaaaaaaaaaaaaaaaaaaaaaaaaaaaaaaaaaaaaaaaaa

SEQ ID NO: 24168 - RNA, 4035 nt, Artificial Sequence
  SARS-CoV-2/Wuhan/WIV05/2019__EPI_ISL_402128 spike protein mRNA gc mod (1-1273)(D614G_M1229I)
aggagaaagcuuaccauguucguguuccuggugcugcugccucugguguccagccagugugugaaccugaccaccagaacacagcugccuccagccuacaccaacagcuuuaccagaggcguguacuaccccgacaagguguucagauccagcgugcugcacucuacccaggaccuguuccugccuuucuucagcaacgugaccugguuccacgccauccacguguccggcaccaauggcaccaagagauucgacaaccccgugcugcccuucaacgacgggguguacuuugccagcaccgagaaguccaacaucaucagaggcuggaucuucggcaccacacuggacagcaagacccagagccugcugaucgugaacaacgccaccaacguggucaucaaagugugcgaguuccaguucugcaacgaccccuuccugggcgucuacuaccacaagaacaacaagagcuggauggaaagcgaguuccggguguacagcagcgccaacaacugcaccuucgaguacgugucccagccuuuccugauggaccuggaaggcaagcagggcaacuucaagaaccugcgcgaguucguguuuaagaacaucgacggcuacuucaagaucuacagcaagcacaccccuaucaaccucgugcgggaucugccucagggcuucucugcucuggaaccccugguggaucugcccaucggcaucaacaucacccgguuucagacacugcuggcccugcacagaagcuaccugacaccuggcgauagcagcagcggauggacagcuggugccgccgcuuacuaugugggcuaccugcagccuagaaccuuccugcugaaguacaacgagaacggcaccaucaccgacgccguggauugugcucuggauccucugagcgagacaaagugcacccugaaguccuucaccguggaaaagggcaucuaccagaccagcaacuuccgggugcagcccaccgaauccaucgugcgguuccccaauaucaccaaucugugccccuucggcgagguguucaaugccaccagauucgccucuguguacgccuggaaccggaagcggaucagcaauugcguggccgacuacuccgugcuguacaacuccgccagcuucagcaccuucaagugcuacggcguguccccuaccaagcugaacgaccugugcuucacaaacguguacgccgacagcuucgugauccggggagaugaagugcggcagauugccccuggacagacaggcaagaucgccgacuacaacuacaagcugcccgacgacuucaccggcugugugauugccuggaacagcaacaaccuggacuccaaagucggcggcaacuacaauuaccuguaccggcuguuccggaaguccaaucugaagcccuucgagcgggacaucuccaccgagaucuaucaggccggcagcaccccuuguaacggcguggaaggcuucaacugcuacuucccacugcaguccuacggcuuucagcccacaaauggcgugggcuaucagcccuacagagugguggugcugagcuucgaacugcugcaugccccugccacagugugcggcccuaagaaaagcaccaaucucgugaagaacaaaugcgugaacuucaacuucaacggccugaccggcaccggcgugcugacagagagcaacaagaaguuccugccauuccagcaguuuggccgggauaucgccgauaccacagacgccguuagagauccccagacacuggaaauccuggacaucaccccuugcagcuucggcggagugucugugaucaccccuggcaccaacaccagcaaucagguggcagugcuguaccagggcgugaacuguaccgaagugcccguggccauucacgccgaucagcugacaccuacauggcggguguacuccaccggcagcaauguguuucagaccagagccggcugucugaucggagccgagcacgugaacaauagcuacgagugcgacauccccaucggcgcuggaaucugcgccagcuaccagacacagacaaacagcccucggagagccagaagcguggccagccagagcaucauugccuacacaaugucucugggcgccgagaacagcguggccuacuccaacaacucuaucgcuauccccaccaacuucaccaucagcgugaccacagagauccugccuguguccaugaccaagaccagcguggacugcaccauguacaucugcggcgauuccaccgagugcuccaaccugcugcugcaguacggcagcuucugcacccagcugaauagagcccugacagggaucgccguggaacaggacaagaacacccaagagguguucgcccaagugaagcagaucuacaagaccccuccuaucaaggacuucggcggcuucaauuucagccagauucugcccgauccuagcaagcccagcaagcggagcuucaucgaggaccugcuguucaacaaagugacacuggccgacgccggcuucaucaagcaguauggcgauugucugggcgacauugccgccagggaucugauuugcgcccagaaguuuaacggacugacagugcugccuccucugcugaccgaugagaugaucgcccaguacacaucugcccugcuggccggcacaaucacaagcggcuggacauuuggagcaggcgccgcucugcagauccccuuugcuaugcagauggccuaccgguucaacggcaucggagugacccagaaugugcuguacgagaaccagaagcugaucgccaaccaguucaacagcgccaucggcaagauccaggacagccugagcagcacagcaagcgcccugggaaagcugcaggacguggucaaccagaaugcccaggcacugaacacccuggucaagcagcuguccuccaacuucggcgccaucagcucugugcugaacgauauccugagcagacuggacaaggucgaggccgaggugcagaucgacagacugaucacaggcagacugcagagccuccagacauacgugacccagcagcugaucagagccgccgagauuagagccucugccaaucuggccgccaccaagaugucugagugugugcugggccagagcaagagaguggacuuuugcggcaagggcuaccaccugaugagcuucccucagucugccccucacggcgugguguuucugcacgugacauaugugcccgcucaagagaagaauuucaccaccgcuccagccaucugccacgacggcaaagcccacuuuccuagagaaggcguguucguguccaacggcacccauugguucgugacacagcggaacuucuacgagccccagaucaucaccaccgacaacaccuucgugucuggcaacugcgacgucgugaucggcauugugaacaauaccguguacgacccucugcagcccgagcuggacagcuucaaagaggaacuggacaaguacuuuaagaaccacacaagccccgacguggaccugggcgauaucagcggaaucaaugccagcgucgugaacauccagaaagagaucgaccggcugaacgagguggccaagaaucugaacgagagccugaucgaccugcaagaacuggggaaguacgagcaguacaucaaguggcccugguacaucuggcugggcuuuaucgccggacugauugccaucgugaucgucacaaucaugcuguguugcaugaccagcugcuguagcugccugaagggcuguuguagcuguggcagcugcugcaaguucgacgaggacgauucugagcccgugcugaagggcgugaaacugcacuacacaugaggacuaguuauaagacugacuagcccgaugggccucccaacgggcccuccuccccuccuugcaccgagauuaaucaaaggcucuuuucagagccaccaaaaaaaaaaaaaaaaaaaaaaaaaaaaaaaaaaaaaaaaaaaaaaaaaaaaaaaaaaaaaaaaaaaaaaaaaaaaaaaaaaaaaaaaaaaaaaaaaaaaa

SEQ ID NO: 24169 - RNA, 4029 nt, Artificial Sequence
  SARS-CoV-2/Wuhan/WIV05/2019__EPI_ISL_402128 spike protein mRNA gc mod (1-1273)(H69del_V70del_A222V_Y453F_S477N_D614G_I692V)
aggagaaagcuuaccauguucguguuccuggugcugcugccucugguguccagccagugugugaaccugaccaccagaacacagcugccuccagccuacaccaacagcuuuaccagaggcguguacuaccccgacaagguguucagauccagcgugcugcacucuacccaggaccuguuccugccuuucuucagcaacgugaccugguuccacgccaucuccggcaccaauggcaccaagagauucgacaaccccgugcugcccuucaacgacgggguguacuuugccagcaccgagaaguccaacaucaucagaggcuggaucuucggcaccacacuggacagcaagacccagagccugcugaucgugaacaacgccaccaacguggucaucaaagugugcgaguuccaguucugcaacgaccccuuccugggcgucuacuaccacaagaacaacaagagcuggauggaaagcgaguuccggguguacagcagcgccaacaacugcaccuucgaguacgugucccagccuuuccugauggaccuggaaggcaagcagggcaacuucaagaaccugcgcgaguucguguuuaagaacaucgacggcuacuucaagaucuacagcaagcacaccccuaucaaccucgugcgggaucugccucagggcuucucugugcuggaaccccugguggaucugcccaucggcaucaacaucacccgguuucagacacugcuggcccugcacagaagcuaccugacaccuggcgauagcagcagcggauggacagcuggugccgccgcuuacuaugugggcuaccugcagccuagaaccuuccugcugaaguacaacgagaacggcaccaucaccgacgccguggauugugcucuggauccucugagcgagacaaagugcacccugaaguccuucaccguggaaaagggcaucuaccagaccagcaacuuccgggugcagcccaccgaauccaucgugcgguuccccaauaucaccaaucugugccccuucggcgagguguucaaugccaccagauucgccucuguguacgccuggaaccggaagcggaucagcaauugcguggccgacuacuccgugcuguacaacuccgccagcuucagcaccuucaagugcuacggcguguccccuaccaagcugaacgaccugugcuucacaaacguguacgccgacagcuucgugauccggggagaugaagugcggcagauugccccuggacagacaggcaagaucgccgacuacaacuacaagcugcccgacgacuucaccggcugugugauugccuggaacagcaacaaccuggacuccaaagucggcggcaacuacaauuaccuguuccggcuguuccggaaguccaaucugaagcccuucgagcgggacaucuccaccgagaucuaucaggccggcaacaccccuuguaacggcguggaaggcuucaacugcuacuucccacugcaguccuacggcuuucagcccacaaauggcgugggcuaucagcccuacagagugguggugcugagcuucgaacugcugcaugccccugccacagugugcggcccuaagaaaagcaccaaucucgugaagaacaaaugcgugaacuucaacuucaacggccugaccggcaccggcgugcugacagagagcaacaagaaguuccugccauuccagcaguuuggccgggauaucgccgauaccacagacgccguuagagauccccagacacuggaaauccuggacaucaccccuugcagcuucggcggagugucugugaucaccccuggcaccaacaccagcaaucagguggcagugcuguaccagggcgugaacuguaccgaagugcccguggccauucacgccgaucagcugacaccuacauggcggguguacuccaccggcagcaauguguuucagaccagagccggcugucugaucggagccgagcacgugaacaauagcuacgagugcgacauccccaucggcgcuggaaucugcgccagcuaccagacacagacaaacagcccucggagagccagaagcguggccagccagagcgugauugccuacacaaugucucugggcgccgagaacagcguggccuacuccaacaacucuaucgcuauccccaccaacuucaccaucagcgugaccacagagauccugccuguguccaugaccaagaccagcguggacugcaccauguacaucugcggcgauuccaccgagugcuccaaccugcugcugcaguacggcagcuucugcacccagcugaauagagcccugacagggaucgccguggaacaggacaagaacacccaagagguguucgcccaagugaagcagaucuacaagaccccuccuaucaaggacuucggcggcuucaauuucagccagauucugcccgauccuagcaagcccagcaagcggagcuucaucgaggaccugcuguucaacaaagugacacuggccgacgccggcuucaucaagcaguauggcgauugucugggcgacauugccgccagggaucugauuugcgcccagaaguuuaacggacugacagugcugccuccucugcugaccgaugagaugaucgcccaguacacaucugcccugcuggccggcacaaucacaagcggcuggacauuuggagcaggcgccgcucugcagauccccuuugcuaugcagauggccuaccgguucaacggcaucggagugacccagaaugugcuguacgagaaccagaagcugaucgccaaccaguucaacagcgccaucggcaagauccaggacagccugagcagcacagcaagcgcccugggaaagcugcaggacguggucaaccagaaugcccaggcacugaacacccuggucaagcagcuguccuccaacuucggcgccaucagcucugugcugaacgauauccugagcagacuggacaaggucgaggccgaggugcagaucgacagacugaucacaggcagacugcagagccuccagacauacgugacccagcagcugaucagagccgccgagauuagagccucugccaaucuggccgccaccaagaugucugagugugugcugggccagagcaagagaguggacuuuugcggcaagggcuaccaccugaugagcuucccucagucugccccucacggcgugguguuucugcacgugacauaugugcccgcucaagagaagaauuucaccaccgcuccagccaucugccacgacggcaaagcccacuuuccuagagaaggcguguucguguccaacggcacccauugguucgugacacagcggaacuucuacgagccccagaucaucaccaccgacaacaccuucgugucuggcaacugcgacgucgugaucggcauugugaacaauaccguguacgacccucugcagcccgagcuggacagcuucaaagaggaacuggacaaguacuuuaagaaccacacaagccccgacguggaccugggcgauaucagcggaaucaaugccagcgucgugaacauccagaaagagaucgaccggcugaacgagguggccaagaaucugaacgagagccugaucgaccugcaagaacuggggaaguacgagcaguacaucaaguggcccugguacaucuggcugggcuuuaucgccggacugauugccaucgugauggucacaaucaugcuguguugcaugaccagcugcuguagcugccugaagggcuguuguagcuguggcagcugcugcaaguucgacgaggacgauucugagcccgugcugaagggcgugaaacugcacuacacaugaggacuaguuauaagacugacuagcccgaugggccucccaacgggcccuccuccccuccuugcaccgagauuaaucaaaggcucuuuucagagccaccaaaaaaaaaaaaaaaaaaaaaaaaaaaaaaaaaaaaaaaaaaaaaaaaaaaaaaaaaaaaaaaaaaaaaaaaaaaaaaaaaaaaaaaaaaaaaaaaaaaaa

SEQ ID NO: 24170 - RNA, 4029 nt, Artificial Sequence
  SARS-CoV-2/Wuhan/WIV05/2019__EPI_ISL_402128 spike protein mRNA gc mod (1-1273)(H69del_V70del_Y453F_D614G_I692V_M1229I)
aggagaaagcuuaccauguucguguuccuggugcugcugccucugguguccagccagugugugaaccugaccaccagaacacagcugccuccagccuacaccaacagcuuuaccagaggcguguacuaccccgacaagguguucagauccagcgugcugcacucuacccaggaccuguuccugccuuucuucagcaacgugaccugguuccacgccaucuccggcaccaauggcaccaagagauucgacaaccccgugcugcccuucaacgacgggguguacuuugccagcaccgagaaguccaacaucaucagaggcuggaucuucggcaccacacuggacagcaagacccagagccugcugaucgugaacaacgccaccaacguggucaucaaagugugcgaguuccaguucugcaacgaccccuuccugggcgucuacuaccacaagaacaacaagagcuggauggaaagcgaguuccggguguacagcagcgccaacaacugcaccuucgaguacgugucccagccuuuccugauggaccuggaaggcaagcagggcaacuucaagaaccugcgcgaguucguguuuaagaacaucgacggcuacuucaagaucuacagcaagcacaccccuaucaaccucgugcgggaucugccucagggcuucucugcucuggaaccccugguggaucugcccaucggcaucaacaucacccgguuucagacacugcuggcccugcacagaagcuaccugacaccuggcgauagcagcagcggauggacagcuggugccgccgcuuacuaugugggcuaccugcagccuagaaccuuccugcugaaguacaacgagaacggcaccaucaccgacgccguggauugugcucuggauccucugagcgagacaaagugcacccugaaguccuucaccguggaaaagggcaucuaccagaccagcaacuuccgggugcagcccaccgaauccaucgugcgguuccccaauaucaccaaucugugccccuucggcgagguguucaaugccaccagauucgccucuguguacgccuggaaccggaagcggaucagcaauugcguggccgacuacuccgugcuguacaacuccgccagcuucagcaccuucaagugcuacggcguguccccuaccaagcugaacgaccugugcuucacaaacguguacgccgacagcuucgugauccggggagaugaagugcggcagauugccccuggacagacaggcaagaucgccgacuacaacuacaagcugcccgacgacuucaccggcugugugauugccuggaacagcaacaaccuggacuccaaagucggcggcaacuacaauuaccuguuccggcuguuccggaaguccaaucugaagcccuucgagcgggacaucuccaccgagaucuaucaggccggcagcaccccuuguaacggcguggaaggcuucaacugcuacuucccacugcaguccuacggcuuucagcccacaaauggcgugggcuaucagcccuacagagugguggugcugagcuucgaacugcugcaugccccugccacagugugcggcccuaagaaaagcaccaaucucgugaagaacaaaugcgugaacuucaacuucaacggccugaccggcaccggcgugcugacagagagcaacaagaaguuccugccauuccagcaguuuggccgggauaucgccgauaccacagacgccguuagagauccccagacacuggaaauccuggacaucaccccuugcagcuucggcggagugucugugaucaccccuggcaccaacaccagcaaucagguggcagugcuguaccagggcgugaacuguaccgaagugcccguggccauucacgccgaucagcugacaccuacauggcggguguacuccaccggcagcaauguguuucagaccagagccggcugucugaucggagccgagcacgugaacaauagcuacgagugcgacauccccaucggcgcuggaaucugcgccagcuaccagacacagacaaacagcccucggagagccagaagcguggccagccagagcgugauugccuacacaaugucucugggcgccgagaacagcguggccuacuccaacaacucuaucgcuauccccaccaacuucaccaucagcgugaccacagagauccugccuguguccaugaccaagaccagcguggacugcaccauguacaucugcggcgauuccaccgagugcuccaaccugcugcugcaguacggcagcuucugcacccagcugaauagagcccugacagggaucgccguggaacaggacaagaacacccaagagguguucgcccaagugaagcagaucuacaagaccccuccuaucaaggacuucggcggcuucaauuucagccagauucugcccgauccuagcaagcccagcaagcggagcuucaucgaggaccugcuguucaacaaagugacacuggccgacgccggcuucaucaagcaguauggcgauugucugggcgacauugccgccagggaucugauuugcgcccagaaguuuaacggacugacagugcugccuccucugcugaccgaugagaugaucgcccaguacacaucugcccugcuggccggcacaaucacaagcggcuggacauuuggagcaggcgccgcucugcagauccccuuugcuaugcagauggccuaccgguucaacggcaucggagugacccagaaugugcuguacgagaaccagaagcugaucgccaaccaguucaacagcgccaucggcaagauccaggacagccugagcagcacagcaagcgcccugggaaagcugcaggacguggucaaccagaaugcccaggcacugaacacccuggucaagcagcuguccuccaacuucggcgccaucagcucugugcugaacgauauccugagcagacuggacaaggucgaggccgaggugcagaucgacagacugaucacaggcagacugcagagccuccagacauacgugacccagcagcugaucagagccgccgagauuagagccucugccaaucuggccgccaccaagaugucugagugugugcugggccagagcaagagaguggacuuuugcggcaagggcuaccaccugaugagcuucccucagucugccccucacggcgugguguuucugcacgugacauaugugcccgcucaagagaagaauuucaccaccgcuccagccaucugccacgacggcaaagcccacuuuccuagagaaggcguguucguguccaacggcacccauugguucgugacacagcggaacuucuacgagccccagaucaucaccaccgacaacaccuucgugucuggcaacugcgacgucgugaucggcauugugaacaauaccguguacgacccucugcagcccgagcuggacagcuucaaagaggaacuggacaaguacuuuaagaaccacacaagccccgacguggaccugggcgauaucagcggaaucaaugccagcgucgugaacauccagaaagagaucgaccggcugaacgagguggccaagaaucugaacgagagccugaucgaccugcaagaacuggggaaguacgagcaguacaucaaguggcccugguacaucuggcugggcuuuaucgccggacugauugccaucgugaucgucacaaucaugcuguguugcaugaccagcugcuguagcugccugaagggcuguuguagcuguggcagcugcugcaaguucgacgaggacgauucugagcccgugcugaagggcgugaaacugcacuacacaugaggacuaguuauaagacugacuagcccgaugggccucccaacgggcccuccuccccuccuugcaccgagauuaaucaaaggcucuuuucagagccaccaaaaaaaaaaaaaaaaaaaaaaaaaaaaaaaaaaaaaaaaaaaaaaaaaaaaaaaaaaaaaaaaaaaaaaaaaaaaaaaaaaaaaaaaaaaaaaaaaaaaa

SEQ ID NO: 24171 - RNA, 4026 nt, Artificial Sequence
  SARS-CoV-2/Wuhan/WIV05/2019__EPI_ISL_402128 spike protein mRNA gc mod (1-1273)(H69del_V70del_Y144del_N501Y_A570D_D614G_P681H_T716I_S982 A_D1118H)
aggagaaagcuuaccauguucguguuccuggugcugcugccucugguguccagccagugugugaaccugaccaccagaacacagcugccuccagccuacaccaacagcuuuaccagaggcguguacuaccccgacaagguguucagauccagcgugcugcacucuacccaggaccuguuccugccuuucuucagcaacgugaccugguuccacgccaucuccggcaccaauggcaccaagagauucgacaaccccgugcugcccuucaacgacgggguguacuuugccagcaccgagaaguccaacaucaucagaggcuggaucuucggcaccacacuggacagcaagacccagagccugcugaucgugaacaacgccaccaacguggucaucaaagugugcgaguuccaguucugcaacgaccccuuccugggcgucuaccacaagaacaacaagagcuggauggaaagcgaguuccggguguacagcagcgccaacaacugcaccuucgaguacgugucccagccuuuccugauggaccuggaaggcaagcagggcaacuucaagaaccugcgcgaguucguguuuaagaacaucgacggcuacuucaagaucuacagcaagcacaccccuaucaaccucgugcgggaucugccucagggcuucucugcucuggaaccccugguggaucugcccaucggcaucaacaucacccgguuucagacacugcuggcccugcacagaagcuaccugacaccuggcgauagcagcagcggauggacagcuggugccgccgcuuacuaugugggcuaccugcagccuagaaccuuccugcugaaguacaacgagaacggcaccaucaccgacgccguggauugugcucuggauccucugagcgagacaaagugcacccugaaguccuucaccguggaaaagggcaucuaccagaccagcaacuuccgggugcagcccaccgaauccaucgugcgguuccccaauaucaccaaucugugccccuucggcgagguguucaaugccaccagauucgccucuguguacgccuggaaccggaagcggaucagcaauugcguggccgacuacuccgugcuguacaacuccgccagcuucagcaccuucaagugcuacggcguguccccuaccaagcugaacgaccugugcuucacaaacguguacgccgacagcuucgugauccggggagaugaagugcggcagauugccccuggacagacaggcaagaucgccgacuacaacuacaagcugcccgacgacuucaccggcugugugauugccuggaacagcaacaaccuggacuccaaagucggcggcaacuacaauuaccuguaccggcuguuccggaaguccaaucugaagcccuucgagcgggacaucuccaccgagaucuaucaggccggcagcaccccuuguaacggcguggaaggcuucaacugcuacuucccacugcaguccuacggcuuucagcccacauacggcgugggcuaucagcccuacagagugguggugcugagcuucgaacugcugcaugccccugccacagugugcggcccuaagaaaagcaccaaucucgugaagaacaaaugcgugaacuucaacuucaacggccugaccggcaccggcgugcugacagagagcaacaagaaguuccugccauuccagcaguuuggccgggauaucgacgauaccacagacgccguuagagauccccagacacuggaaauccuggacaucaccccuugcagcuucggcggagugucugugaucaccccuggcaccaacaccagcaaucagguggcagugcuguaccagggcgugaacuguaccgaagugcccguggccauucacgccgaucagcugacaccuacauggcggguguacuccaccggcagcaauguguuucagaccagagccggcugucugaucggagccgagcacgugaacaauagcuacgagugcgacauccccaucggcgcuggaaucugcgccagcuaccagacacagacaaacagccaccggagagccagaagcguggccagccagagcaucauugccuacacaaugucucugggcgccgagaacagcguggccuacuccaacaacucuaucgcuauccccaucaacuucaccaucagcgugaccacagagauccugccuguguccaugaccaagaccagcguggacugcaccauguacaucugcggcgauuccaccgagugcuccaaccugcugcugcaguacggcagcuucugcacccagcugaauagagcccugacagggaucgccguggaacaggacaagaacacccaagagguguucgcccaagugaagcagaucuacaagaccccuccuaucaaggacuucggcggcuucaauuucagccagauucugcccgauccuagcaagcccagcaagcggagcuucaucgaggaccugcuguucaacaaagugacacuggccgacgccggcuucaucaagcaguauggcgauugucugggcgacauugccgccagggaucugauuugcgcccagaaguuuaacggacugacagugcugccuccucugcugaccgaugagaugaucgcccaguacacaucugcccugcuggccggcacaaucacaagcggcuggacauuuggagcaggcgccgcucugcagauccccuuugcuaugcagauggccuaccgguucaacggcaucggagugacccagaaugugcuguacgagaaccagaagcugaucgccaaccaguucaacagcgccaucggcaagauccaggacagccugagcagcacagcaagcgcccugggaaagcugcaggacguggucaaccagaaugcccaggcacugaacacccuggucaagcagcuguccuccaacuucggcgccaucagcucugugcugaacgauauccuggccagacuggacaaggucgaggccgaggugcagaucgacagacugaucacaggcagacugcagagccuccagacauacgugacccagcagcugaucagagccgccgagauuagagccucugccaaucuggccgccaccaagaugucugagugugugcugggccagagcaagagaguggacuuuugcggcaagggcuaccaccugaugagcuucccucagucugccccucacggcgugguguuucugcacgugacauaugugcccgcucaagagaagaauuucaccaccgcuccagccaucugccacgacggcaaagcccacuuuccuagagaaggcguguucguguccaacggcacccauugguucgugacacagcggaacuucuacgagccccagaucaucaccacccacaacaccuucgugucuggcaacugcgacgucgugaucggcauugugaacaauaccguguacgacccucugcagcccgagcuggacagcuucaaagaggaacuggacaaguacuuuaagaaccacacaagccccgacguggaccugggcgauaucagcggaaucaaugccagcgucgugaacauccagaaagagaucgaccggcugaacgagguggccaagaaucugaacgagagccugaucgaccugcaagaacuggggaaguacgagcaguacaucaaguggcccugguacaucuggcugggcuuuaucgccggacugauugccaucgugauggucacaaucaugcuguguugcaugaccagcugcuguagcugccugaagggcuguuguagcuguggcagcugcugcaaguucgacgaggacgauucugagcccgugcugaagggcgugaaacugcacuacacaugaggacuaguuauaagacugacuagcccgaugggccucccaacgggcccuccuccccuccuugcaccgagauuaaucaaaggcucuuuucagagccaccaaaaaaaaaaaaaaaaaaaaaaaaaaaaaaaaaaaaaaaaaaaaaaaaaaaaaaaaaaaaaaaaaaaaaaaaaaaaaaaaaaaaaaaaaaaaaaaaaaaaa

SEQ ID NO: 24172 - RNA, 4035 nt, Artificial Sequence
  SARS-CoV-2/Wuhan/WIV05/2019__EPI_ISL_402128 spike protein mRNA gc mod (1-1273)(K417N_E484K_N501Y_D614G)
aggagaaagcuuaccauguucguguuccuggugcugcugccucugguguccagccagugugugaaccugaccaccagaacacagcugccuccagccuacaccaacagcuuuaccagaggcguguacuaccccgacaagguguucagauccagcgugcugcacucuacccaggaccuguuccugccuuucuucagcaacgugaccugguuccacgccauccacguguccggcaccaauggcaccaagagauucgacaaccccgugcugcccuucaacgacgggguguacuuugccagcaccgagaaguccaacaucaucagaggcuggaucuucggcaccacacuggacagcaagacccagagccugcugaucgugaacaacgccaccaacguggucaucaaagugugcgaguuccaguucugcaacgaccccuuccugggcgucuacuaccacaagaacaacaagagcuggauggaaagcgaguuccggguguacagcagcgccaacaacugcaccuucgaguacgugucccagccuuuccugauggaccuggaaggcaagcagggcaacuucaagaaccugcgcgaguucguguuuaagaacaucgacggcuacuucaagaucuacagcaagcacaccccuaucaaccucgugcgggaucugccucagggcuucucugcucuggaaccccugguggaucugcccaucggcaucaacaucacccgguuucagacacugcuggcccugcacagaagcuaccugacaccuggcgauagcagcagcggauggacagcuggugccgccgcuuacuaugugggcuaccugcagccuagaaccuuccugcugaaguacaacgagaacggcaccaucaccgacgccguggauugugcucuggauccucugagcgagacaaagugcacccugaaguccuucaccguggaaaagggcaucuaccagaccagcaacuuccgggugcagcccaccgaauccaucgugcgguuccccaauaucaccaaucugugccccuucggcgagguguucaaugccaccagauucgccucuguguacgccuggaaccggaagcggaucagcaauugcguggccgacuacuccgugcuguacaacuccgccagcuucagcaccuucaagugcuacggcguguccccuaccaagcugaacgaccugugcuucacaaacguguacgccgacagcuucgugauccggggagaugaagugcggcagauugccccuggacagacaggcaacaucgccgacuacaacuacaagcugcccgacgacuucaccggcugugugauugccuggaacagcaacaaccuggacuccaaagucggcggcaacuacaauuaccuguaccggcuguuccggaaguccaaucugaagcccuucgagcgggacaucuccaccgagaucuaucaggccggcagcaccccuuguaacggcgugaagggcuucaacugcuacuucccacugcaguccuacggcuuucagcccacauacggcgugggcuaucagcccuacagagugguggugcugagcuucgaacugcugcaugccccugccacagugugcggcccuaagaaaagcaccaaucucgugaagaacaaaugcgugaacuucaacuucaacggccugaccggcaccggcgugcugacagagagcaacaagaaguuccugccauuccagcaguuuggccgggauaucgccgauaccacagacgccguuagagauccccagacacuggaaauccuggacaucaccccuugcagcuucggcggagugucugugaucaccccuggcaccaacaccagcaaucagguggcagugcuguaccagggcgugaacuguaccgaagugcccguggccauucacgccgaucagcugacaccuacauggcggguguacuccaccggcagcaauguguuucagaccagagccggcugucugaucggagccgagcacgugaacaauagcuacgagugcgacauccccaucggcgcuggaaucugcgccagcuaccagacacagacaaacagcccucggagagccagaagcguggccagccagagcaucauugccuacacaaugucucugggcgccgagaacagcguggccuacuccaacaacucuaucgcuauccccaccaacuucaccaucagcgugaccacagagauccugccuguguccaugaccaagaccagcguggacugcaccauguacaucugcggcgauuccaccgagugcuccaaccugcugcugcaguacggcagcuucugcacccagcugaauagagcccugacagggaucgccguggaacaggacaagaacacccaagagguguucgcccaagugaagcagaucuacaagaccccuccuaucaaggacuucggcggcuucaauuucagccagauucugcccgauccuagcaagcccagcaagcggagcuucaucgaggaccugcuguucaacaaagugacacuggccgacgccggcuucaucaagcaguauggcgauugucugggcgacauugccgccagggaucugauuugcgcccagaaguuuaacggacugacagugcugccuccucugcugaccgaugagaugaucgcccaguacacaucugcccugcuggccggcacaaucacaagcggcuggacauuuggagcaggcgccgcucugcagauccccuuugcuaugcagauggccuaccgguucaacggcaucggagugacccagaaugugcuguacgagaaccagaagcugaucgccaaccaguucaacagcgccaucggcaagauccaggacagccugagcagcacagcaagcgcccugggaaagcugcaggacguggucaaccagaaugcccaggcacugaacacccuggucaagcagcuguccuccaacuucggcgccaucagcucugugcugaacgauauccugagcagacuggacaaggucgaggccgaggugcagaucgacagacugaucacaggcagacugcagagccuccagacauacgugacccagcagcugaucagagccgccgagauuagagccucugccaaucuggccgccaccaagaugucugagugugugcugggccagagcaagagaguggacuuuugcggcaagggcuaccaccugaugagcuucccucagucugccccucacggcgugguguuucugcacgugacauaugugcccgcucaagagaagaauuucaccaccgcuccagccaucugccacgacggcaaagcccacuuuccuagagaaggcguguucguguccaacggcacccauugguucgugacacagcggaacuucuacgagccccagaucaucaccaccgacaacaccuucgugucuggcaacugcgacgucgugaucggcauugugaacaauaccguguacgacccucugcagcccgagcuggacagcuucaaagaggaacuggacaaguacuuuaagaaccacacaagccccgacguggaccugggcgauaucagcggaaucaaugccagcgucgugaacauccagaaagagaucgaccggcugaacgagguggccaagaaucugaacgagagccugaucgaccugcaagaacuggggaaguacgagcaguacaucaaguggcccugguacaucuggcugggcuuuaucgccggacugauugccaucgugauggucacaaucaugcuguguugcaugaccagcugcuguagcugccugaagggcuguuguagcuguggcagcugcugcaaguucgacgaggacgauucugagcccgugcugaagggcgugaaacugcacuacacaugaggacuaguuauaagacugacuagcccgaugggccucccaacgggcccuccuccccuccuugcaccgagauuaaucaaaggcucuuuucagagccaccaaaaaaaaaaaaaaaaaaaaaaaaaaaaaaaaaaaaaaaaaaaaaaaaaaaaaaaaaaaaaaaaaaaaaaaaaaaaaaaaaaaaaaaaaaaaaaaaaaaaa

SEQ ID NO: 24173 - RNA, 4026 nt, Artificial Sequence
  SARS-CoV-2/Wuhan/WIV05/2019__EPI_ISL_402128 spike protein mRNA gc mod (1-1273)(L18F_D80A_D215G_L242del_A243del_L244del_R246I_K417N_E484 K_N501Y_D614G_A701V)
aggagaaagcuuaccauguucguguuccuggugcugcugccucugguguccagccagugugugaacuucaccaccagaacacagcugccuccagccuacaccaacagcuuuaccagaggcguguacuaccccgacaagguguucagauccagcgugcugcacucuacccaggaccuguuccugccuuucuucagcaacgugaccugguuccacgccauccacguguccggcaccaauggcaccaagagauucgccaaccccgugcugcccuucaacgacgggguguacuuugccagcaccgagaaguccaacaucaucagaggcuggaucuucggcaccacacuggacagcaagacccagagccugcugaucgugaacaacgccaccaacguggucaucaaagugugcgaguuccaguucugcaacgaccccuuccugggcgucuacuaccacaagaacaacaagagcuggauggaaagcgaguuccggguguacagcagcgccaacaacugcaccuucgaguacgugucccagccuuuccugauggaccuggaaggcaagcagggcaacuucaagaaccugcgcgaguucguguuuaagaacaucgacggcuacuucaagaucuacagcaagcacaccccuaucaaccucgugcggggccugccucagggcuucucugcucuggaaccccugguggaucugcccaucggcaucaacaucacccgguuucagacacugcacaucagcuaccugacaccuggcgauagcagcagcggauggacagcuggugccgccgcuuacuaugugggcuaccugcagccuagaaccuuccugcugaaguacaacgagaacggcaccaucaccgacgccguggauugugcucuggauccucugagcgagacaaagugcacccugaaguccuucaccguggaaaagggcaucuaccagaccagcaacuuccgggugcagcccaccgaauccaucgugcgguuccccaauaucaccaaucugugccccuucggcgagguguucaaugccaccagauucgccucuguguacgccuggaaccggaagcggaucagcaauugcguggccgacuacuccgugcuguacaacuccgccagcuucagcaccuucaagugcuacggcguguccccuaccaagcugaacgaccugugcuucacaaacguguacgccgacagcuucgugauccggggagaugaagugcggcagauugccccuggacagacaggcaacaucgccgacuacaacuacaagcugcccgacgacuucaccggcugugugauugccuggaacagcaacaaccuggacuccaaagucggcggcaacuacaauuaccuguaccggcuguuccggaaguccaaucugaagcccuucgagcgggacaucuccaccgagaucuaucaggccggcagcaccccuuguaacggcgugaagggcuucaacugcuacuucccacugcaguccuacggcuuucagcccacauacggcgugggcuaucagcccuacagagugguggugcugagcuucgaacugcugcaugccccugccacagugugcggcccuaagaaaagcaccaaucucgugaagaacaaaugcgugaacuucaacuucaacggccugaccggcaccggcgugcugacagagagcaacaagaaguuccugccauuccagcaguuuggccgggauaucgccgauaccacagacgccguuagagauccccagacacuggaaauccuggacaucaccccuugcagcuucggcggagugucugugaucaccccuggcaccaacaccagcaaucagguggcagugcuguaccagggcgugaacuguaccgaagugcccguggccauucacgccgaucagcugacaccuacauggcggguguacuccaccggcagcaauguguuucagaccagagccggcugucugaucggagccgagcacgugaacaauagcuacgagugcgacauccccaucggcgcuggaaucugcgccagcuaccagacacagacaaacagcccucggagagccagaagcguggccagccagagcaucauugccuacacaaugucucugggcguggagaacagcguggccuacuccaacaacucuaucgcuauccccaccaacuucaccaucagcgugaccacagagauccugccuguguccaugaccaagaccagcguggacugcaccauguacaucugcggcgauuccaccgagugcuccaaccugcugcugcaguacggcagcuucugcacccagcugaauagagcccugacagggaucgccguggaacaggacaagaacacccaagagguguucgcccaagugaagcagaucuacaagaccccuccuaucaaggacuucggcggcuucaauuucagccagauucugcccgauccuagcaagcccagcaagcggagcuucaucgaggaccugcuguucaacaaagugacacuggccgacgccggcuucaucaagcaguauggcgauugucugggcgacauugccgccagggaucugauuugcgcccagaaguuuaacggacugacagugcugccuccucugcugaccgaugagaugaucgcccaguacacaucugcccugcuggccggcacaaucacaagcggcuggacauuuggagcaggcgccgcucugcagauccccuuugcuaugcagauggccuaccgguucaacggcaucggagugacccagaaugugcuguacgagaaccagaagcugaucgccaaccaguucaacagcgccaucggcaagauccaggacagccugagcagcacagcaagcgcccugggaaagcugcaggacguggucaaccagaaugcccaggcacugaacacccuggucaagcagcuguccuccaacuucggcgccaucagcucugugcugaacgauauccugagcagacuggacaaggucgaggccgaggugcagaucgacagacugaucacaggcagacugcagagccuccagacauacgugacccagcagcugaucagagccgccgagauuagagccucugccaaucuggccgccaccaagaugucugagugugugcugggccagagcaagagaguggacuuuugcggcaagggcuaccaccugaugagcuucccucagucugccccucacggcgugguguuucugcacgugacauaugugcccgcucaagagaagaauuucaccaccgcuccagccaucugccacgacggcaaagcccacuuuccuagagaaggcguguucguguccaacggcacccauugguucgugacacagcggaacuucuacgagccccagaucaucaccaccgacaacaccuucgugucuggcaacugcgacgucgugaucggcauugugaacaauaccguguacgacccucugcagcccgagcuggacagcuucaaagaggaacuggacaaguacuuuaagaaccacacaagccccgacguggaccugggcgauaucagcggaaucaaugccagcgucgugaacauccagaaagagaucgaccggcugaacgagguggccaagaaucugaacgagagccugaucgaccugcaagaacuggggaaguacgagcaguacaucaaguggcccugguacaucuggcugggcuuuaucgccggacugauugccaucgugauggucacaaucaugcuguguugcaugaccagcugcuguagcugccugaagggcuguuguagcuguggcagcugcugcaaguucgacgaggacgauucugagcccgugcugaagggcgugaaacugcacuacacaugaggacuaguuauaagacugacuagcccgaugggccucccaacgggcccuccuccccuccuugcaccgagauuaaucaaaggcucuuuucagagccaccaaaaaaaaaaaaaaaaaaaaaaaaaaaaaaaaaaaaaaaaaaaaaaaaaaaaaaaaaaaaaaaaaaaaaaaaaaaaaaaaaaaaaaaaaaaaaaaaaaaaa

SEQ ID NO: 24174 - RNA, 4035 nt, Artificial Sequence
  SARS-CoV-2/Wuhan/WIV05/2019__EPI_ISL_402128 spike protein mRNA gc mod (1-1273)(E484K_D614G)
aggagaaagcuuaccauguucguguuccuggugcugcugccucugguguccagccagugugugaaccugaccaccagaacacagcugccuccagccuacaccaacagcuuuaccagaggcguguacuaccccgacaagguguucagauccagcgugcugcacucuacccaggaccuguuccugccuuucuucagcaacgugaccugguuccacgccauccacguguccggcaccaauggcaccaagagauucgacaaccccgugcugcccuucaacgacgggguguacuuugccagcaccgagaaguccaacaucaucagaggcuggaucuucggcaccacacuggacagcaagacccagagccugcugaucgugaacaacgccaccaacguggucaucaaagugugcgaguuccaguucugcaacgaccccuuccugggcgucuacuaccacaagaacaacaagagcuggauggaaagcgaguuccggguguacagcagcgccaacaacugcaccuucgaguacgugucccagccuuuccugauggaccuggaaggcaagcagggcaacuucaagaaccugcgcgaguucguguuuaagaacaucgacggcuacuucaagaucuacagcaagcacaccccuaucaaccucgugcgggaucugccucagggcuucucugcucuggaaccccugguggaucugcccaucggcaucaacaucacccgguuucagacacugcuggcccugcacagaagcuaccugacaccuggcgauagcagcagcggauggacagcuggugccgccgcuuacuaugugggcuaccugcagccuagaaccuuccugcugaaguacaacgagaacggcaccaucaccgacgccguggauugugcucuggauccucugagcgagacaaagugcacccugaaguccuucaccguggaaaagggcaucuaccagaccagcaacuuccgggugcagcccaccgaauccaucgugcgguuccccaauaucaccaaucugugccccuucggcgagguguucaaugccaccagauucgccucuguguacgccuggaaccggaagcggaucagcaauugcguggccgacuacuccgugcuguacaacuccgccagcuucagcaccuucaagugcuacggcguguccccuaccaagcugaacgaccugugcuucacaaacguguacgccgacagcuucgugauccggggagaugaagugcggcagauugccccuggacagacaggcaagaucgccgacuacaacuacaagcugcccgacgacuucaccggcugugugauugccuggaacagcaacaaccuggacuccaaagucggcggcaacuacaauuaccuguaccggcuguuccggaaguccaaucugaagcccuucgagcgggacaucuccaccgagaucuaucaggccggcagcaccccuuguaacggcgugaagggcuucaacugcuacuucccacugcaguccuacggcuuucagcccacaaauggcgugggcuaucagcccuacagagugguggugcugagcuucgaacugcugcaugccccugccacagugugcggcccuaagaaaagcaccaaucucgugaagaacaaaugcgugaacuucaacuucaacggccugaccggcaccggcgugcugacagagagcaacaagaaguuccugccauuccagcaguuuggccgggauaucgccgauaccacagacgccguuagagauccccagacacuggaaauccuggacaucaccccuugcagcuucggcggagugucugugaucaccccuggcaccaacaccagcaaucagguggcagugcuguaccagggcgugaacuguaccgaagugcccguggccauucacgccgaucagcugacaccuacauggcggguguacuccaccggcagcaauguguuucagaccagagccggcugucugaucggagccgagcacgugaacaauagcuacgagugcgacauccccaucggcgcuggaaucugcgccagcuaccagacacagacaaacagcccucggagagccagaagcguggccagccagagcaucauugccuacacaaugucucugggcgccgagaacagcguggccuacuccaacaacucuaucgcuauccccaccaacuucaccaucagcgugaccacagagauccugccuguguccaugaccaagaccagcguggacugcaccauguacaucugcggcgauuccaccgagugcuccaaccugcugcugcaguacggcagcuucugcacccagcugaauagagcccugacagggaucgccguggaacaggacaagaacacccaagagguguucgcccaagugaagcagaucuacaagaccccuccuaucaaggacuucggcggcuucaauuucagccagauucugcccgauccuagcaagcccagcaagcggagcuucaucgaggaccugcuguucaacaaagugacacuggccgacgccggcuucaucaagcaguauggcgauugucugggcgacauugccgccagggaucugauuugcgcccagaaguuuaacggacugacagugcugccuccucugcugaccgaugagaugaucgcccaguacacaucugcccugcuggccggcacaaucacaagcggcuggacauuuggagcaggcgccgcucugcagauccccuuugcuaugcagauggccuaccgguucaacggcaucggagugacccagaaugugcuguacgagaaccagaagcugaucgccaaccaguucaacagcgccaucggcaagauccaggacagccugagcagcacagcaagcgcccugggaaagcugcaggacguggucaaccagaaugcccaggcacugaacacccuggucaagcagcuguccuccaacuucggcgccaucagcucugugcugaacgauauccugagcagacuggacaaggucgaggccgaggugcagaucgacagacugaucacaggcagacugcagagccuccagacauacgugacccagcagcugaucagagccgccgagauuagagccucugccaaucuggccgccaccaagaugucugagugugugcugggccagagcaagagaguggacuuuugcggcaagggcuaccaccugaugagcuucccucagucugccccucacggcgugguguuucugcacgugacauaugugcccgcucaagagaagaauuucaccaccgcuccagccaucugccacgacggcaaagcccacuuuccuagagaaggcguguucguguccaacggcacccauugguucgugacacagcggaacuucuacgagccccagaucaucaccaccgacaacaccuucgugucuggcaacugcgacgucgugaucggcauugugaacaauaccguguacgacccucugcagcccgagcuggacagcuucaaagaggaacuggacaaguacuuuaagaaccacacaagccccgacguggaccugggcgauaucagcggaaucaaugccagcgucgugaacauccagaaagagaucgaccggcugaacgagguggccaagaaucugaacgagagccugaucgaccugcaagaacuggggaaguacgagcaguacaucaaguggcccugguacaucuggcugggcuuuaucgccggacugauugccaucgugauggucacaaucaugcuguguugcaugaccagcugcuguagcugccugaagggcuguuguagcuguggcagcugcugcaaguucgacgaggacgauucugagcccgugcugaagggcgugaaacugcacuacacaugaggacuaguuauaagacugacuagcccgaugggccucccaacgggcccuccuccccuccuugcaccgagauuaaucaaaggcucuuuucagagccaccaaaaaaaaaaaaaaaaaaaaaaaaaaaaaaaaaaaaaaaaaaaaaaaaaaaaaaaaaaaaaaaaaaaaaaaaaaaaaaaaaaaaaaaaaaaaaaaaaaaaa

SEQ ID NO: 24175 - RNA, 4035 nt, Artificial Sequence
  SARS-CoV-2/Wuhan/WIV05/2019__EPI_ISL_402128 spike protein mRNA gc mod (1-1273)(L18F_T20N_P26S_D138Y_R190S_K417T_E484K_N501Y_D614G_H655Y _T1027I)
aggagaaagcuuaccauguucguguuccuggugcugcugccucugguguccagccagugugugaacuucaccaacagaacacagcugccuagcgccuacaccaacagcuuuaccagaggcguguacuaccccgacaagguguucagauccagcgugcugcacucuacccaggaccuguuccugccuuucuucagcaacgugaccugguuccacgccauccacguguccggcaccaauggcaccaagagauucgacaaccccgugcugcccuucaacgacgggguguacuuugccagcaccgagaaguccaacaucaucagaggcuggaucuucggcaccacacuggacagcaagacccagagccugcugaucgugaacaacgccaccaacguggucaucaaagugugcgaguuccaguucugcaacuaccccuuccugggcgucuacuaccacaagaacaacaagagcuggauggaaagcgaguuccggguguacagcagcgccaacaacugcaccuucgaguacgugucccagccuuuccugauggaccuggaaggcaagcagggcaacuucaagaaccugagcgaguucguguuuaagaacaucgacggcuacuucaagaucuacagcaagcacaccccuaucaaccucgugcgggaucugccucagggcuucucugcucuggaaccccugguggaucugcccaucggcaucaacaucacccgguuucagacacugcuggcccugcacagaagcuaccugacaccuggcgauagcagcagcggauggacagcuggugccgccgcuuacuaugugggcuaccugcagccuagaaccuuccugcugaaguacaacgagaacggcaccaucaccgacgccguggauugugcucuggauccucugagcgagacaaagugcacccugaaguccuucaccguggaaaagggcaucuaccagaccagcaacuuccgggugcagcccaccgaauccaucgugcgguuccccaauaucaccaaucugugccccuucggcgagguguucaaugccaccagauucgccucuguguacgccuggaaccggaagcggaucagcaauugcguggccgacuacuccgugcuguacaacuccgccagcuucagcaccuucaagugcuacggcguguccccuaccaagcugaacgaccugugcuucacaaacguguacgccgacagcuucgugauccggggagaugaagugcggcagauugccccuggacagacaggcaccaucgccgacuacaacuacaagcugcccgacgacuucaccggcugugugauugccuggaacagcaacaaccuggacuccaaagucggcggcaacuacaauuaccuguaccggcuguuccggaaguccaaucugaagcccuucgagcgggacaucuccaccgagaucuaucaggccggcagcaccccuuguaacggcgugaagggcuucaacugcuacuucccacugcaguccuacggcuuucagcccacauacggcgugggcuaucagcccuacagagugguggugcugagcuucgaacugcugcaugccccugccacagugugcggcccuaagaaaagcaccaaucucgugaagaacaaaugcgugaacuucaacuucaacggccugaccggcaccggcgugcugacagagagcaacaagaaguuccugccauuccagcaguuuggccgggauaucgccgauaccacagacgccguuagagauccccagacacuggaaauccuggacaucaccccuugcagcuucggcggagugucugugaucaccccuggcaccaacaccagcaaucagguggcagugcuguaccagggcgugaacuguaccgaagugcccguggccauucacgccgaucagcugacaccuacauggcggguguacuccaccggcagcaauguguuucagaccagagccggcugucugaucggagccgaguacgugaacaauagcuacgagugcgacauccccaucggcgcuggaaucugcgccagcuaccagacacagacaaacagcccucggagagccagaagcguggccagccagagcaucauugccuacacaaugucucugggcgccgagaacagcguggccuacuccaacaacucuaucgcuauccccaccaacuucaccaucagcgugaccacagagauccugccuguguccaugaccaagaccagcguggacugcaccauguacaucugcggcgauuccaccgagugcuccaaccugcugcugcaguacggcagcuucugcacccagcugaauagagcccugacagggaucgccguggaacaggacaagaacacccaagagguguucgcccaagugaagcagaucuacaagaccccuccuaucaaggacuucggcggcuucaauuucagccagauucugcccgauccuagcaagcccagcaagcggagcuucaucgaggaccugcuguucaacaaagugacacuggccgacgccggcuucaucaagcaguauggcgauugucugggcgacauugccgccagggaucugauuugcgcccagaaguuuaacggacugacagugcugccuccucugcugaccgaugagaugaucgcccaguacacaucugcccugcuggccggcacaaucacaagcggcuggacauuuggagcaggcgccgcucugcagauccccuuugcuaugcagauggccuaccgguucaacggcaucggagugacccagaaugugcuguacgagaaccagaagcugaucgccaaccaguucaacagcgccaucggcaagauccaggacagccugagcagcacagcaagcgcccugggaaagcugcaggacguggucaaccagaaugcccaggcacugaacacccuggucaagcagcuguccuccaacuucggcgccaucagcucugugcugaacgauauccugagcagacuggacaaggucgaggccgaggugcagaucgacagacugaucacaggcagacugcagagccuccagacauacgugacccagcagcugaucagagccgccgagauuagagccucugccaaucuggccgccaucaagaugucugagugugugcugggccagagcaagagaguggacuuuugcggcaagggcuaccaccugaugagcuucccucagucugccccucacggcgugguguuucugcacgugacauaugugcccgcucaagagaagaauuucaccaccgcuccagccaucugccacgacggcaaagcccacuuuccuagagaaggcguguucguguccaacggcacccauugguucgugacacagcggaacuucuacgagccccagaucaucaccaccgacaacaccuucgugucuggcaacugcgacgucgugaucggcauugugaacaauaccguguacgacccucugcagcccgagcuggacagcuucaaagaggaacuggacaaguacuuuaagaaccacacaagccccgacguggaccugggcgauaucagcggaaucaaugccagcgucgugaacauccagaaagagaucgaccggcugaacgagguggccaagaaucugaacgagagccugaucgaccugcaagaacuggggaaguacgagcaguacaucaaguggcccugguacaucuggcugggcuuuaucgccggacugauugccaucgugauggucacaaucaugcuguguugcaugaccagcugcuguagcugccugaagggcuguuguagcuguggcagcugcugcaaguucgacgaggacgauucugagcccgugcugaagggcgugaaacugcacuacacaugaggacuaguuauaagacugacuagcccgaugggccucccaacgggcccuccuccccuccuugcaccgagauuaaucaaaggcucuuuucagagccaccaaaaaaaaaaaaaaaaaaaaaaaaaaaaaaaaaaaaaaaaaaaaaaaaaaaaaaaaaaaaaaaaaaaaaaaaaaaaaaaaaaaaaaaaaaaaaaaaaaaaa

SEQ ID NO: 24176 - RNA, 4035 nt, Artificial Sequence
  SARS-CoV-2/Wuhan/WIV05/2019__EPI_ISL_402128 spike protein mRNA gc mod (1-1273)(S13I_W152C_L452R_D614G)
aggagaaagcuuaccauguucguguuccuggugcugcugccucugguguccauccagugugugaaccugaccaccagaacacagcugccuccagccuacaccaacagcuuuaccagaggcguguacuaccccgacaagguguucagauccagcgugcugcacucuacccaggaccuguuccugccuuucuucagcaacgugaccugguuccacgccauccacguguccggcaccaauggcaccaagagauucgacaaccccgugcugcccuucaacgacgggguguacuuugccagcaccgagaaguccaacaucaucagaggcuggaucuucggcaccacacuggacagcaagacccagagccugcugaucgugaacaacgccaccaacguggucaucaaagugugcgaguuccaguucugcaacgaccccuuccugggcgucuacuaccacaagaacaacaagagcugcauggaaagcgaguuccggguguacagcagcgccaacaacugcaccuucgaguacgugucccagccuuuccugauggaccuggaaggcaagcagggcaacuucaagaaccugcgcgaguucguguuuaagaacaucgacggcuacuucaagaucuacagcaagcacaccccuaucaaccucgugcgggaucugccucagggcuucucugcucuggaaccccugguggaucugcccaucggcaucaacaucacccgguuucagacacugcuggcccugcacagaagcuaccugacaccuggcgauagcagcagcggauggacagcuggugccgccgcuuacuaugugggcuaccugcagccuagaaccuuccugcugaaguacaacgagaacggcaccaucaccgacgccguggauugugcucuggauccucugagcgagacaaagugcacccugaaguccuucaccguggaaaagggcaucuaccagaccagcaacuuccgggugcagcccaccgaauccaucgugcgguuccccaauaucaccaaucugugccccuucggcgagguguucaaugccaccagauucgccucuguguacgccuggaaccggaagcggaucagcaauugcguggccgacuacuccgugcuguacaacuccgccagcuucagcaccuucaagugcuacggcguguccccuaccaagcugaacgaccugugcuucacaaacguguacgccgacagcuucgugauccggggagaugaagugcggcagauugccccuggacagacaggcaagaucgccgacuacaacuacaagcugcccgacgacuucaccggcugugugauugccuggaacagcaacaaccuggacuccaaagucggcggcaacuacaauuaccgcuaccggcuguuccggaaguccaaucugaagcccuucgagcgggacaucuccaccgagaucuaucaggccggcagcaccccuuguaacggcguggaaggcuucaacugcuacuucccacugcaguccuacggcuuucagcccacaaauggcgugggcuaucagcccuacagagugguggugcugagcuucgaacugcugcaugccccugccacagugugcggcccuaagaaaagcaccaaucucgugaagaacaaaugcgugaacuucaacuucaacggccugaccggcaccggcgugcugacagagagcaacaagaaguuccugccauuccagcaguuuggccgggauaucgccgauaccacagacgccguuagagauccccagacacuggaaauccuggacaucaccccuugcagcuucggcggagugucugugaucaccccuggcaccaacaccagcaaucagguggcagugcuguaccagggcgugaacuguaccgaagugcccguggccauucacgccgaucagcugacaccuacauggcggguguacuccaccggcagcaauguguuucagaccagagccggcugucugaucggagccgagcacgugaacaauagcuacgagugcgacauccccaucggcgcuggaaucugcgccagcuaccagacacagacaaacagcccucggagagccagaagcguggccagccagagcaucauugccuacacaaugucucugggcgccgagaacagcguggccuacuccaacaacucuaucgcuauccccaccaacuucaccaucagcgugaccacagagauccugccuguguccaugaccaagaccagcguggacugcaccauguacaucugcggcgauuccaccgagugcuccaaccugcugcugcaguacggcagcuucugcacccagcugaauagagcccugacagggaucgccguggaacaggacaagaacacccaagagguguucgcccaagugaagcagaucuacaagaccccuccuaucaaggacuucggcggcuucaauuucagccagauucugcccgauccuagcaagcccagcaagcggagcuucaucgaggaccugcuguucaacaaagugacacuggccgacgccggcuucaucaagcaguauggcgauugucugggcgacauugccgccagggaucugauuugcgcccagaaguuuaacggacugacagugcugccuccucugcugaccgaugagaugaucgcccaguacacaucugcccugcuggccggcacaaucacaagcggcuggacauuuggagcaggcgccgcucugcagauccccuuugcuaugcagauggccuaccgguucaacggcaucggagugacccagaaugugcuguacgagaaccagaagcugaucgccaaccaguucaacagcgccaucggcaagauccaggacagccugagcagcacagcaagcgcccugggaaagcugcaggacguggucaaccagaaugcccaggcacugaacacccuggucaagcagcuguccuccaacuucggcgccaucagcucugugcugaacgauauccugagcagacuggacaaggucgaggccgaggugcagaucgacagacugaucacaggcagacugcagagccuccagacauacgugacccagcagcugaucagagccgccgagauuagagccucugccaaucuggccgccaccaagaugucugagugugugcugggccagagcaagagaguggacuuuugcggcaagggcuaccaccugaugagcuucccucagucugccccucacggcgugguguuucugcacgugacauaugugcccgcucaagagaagaauuucaccaccgcuccagccaucugccacgacggcaaagcccacuuuccuagagaaggcguguucguguccaacggcacccauugguucgugacacagcggaacuucuacgagccccagaucaucaccaccgacaacaccuucgugucuggcaacugcgacgucgugaucggcauugugaacaauaccguguacgacccucugcagcccgagcuggacagcuucaaagaggaacuggacaaguacuuuaagaaccacacaagccccgacguggaccugggcgauaucagcggaaucaaugccagcgucgugaacauccagaaagagaucgaccggcugaacgagguggccaagaaucugaacgagagccugaucgaccugcaagaacuggggaaguacgagcaguacaucaaguggcccugguacaucuggcugggcuuuaucgccggacugauugccaucgugauggucacaaucaugcuguguugcaugaccagcugcuguagcugccugaagggcuguuguagcuguggcagcugcugcaaguucgacgaggacgauucugagcccgugcugaagggcgugaaacugcacuacacaugaggacuaguuauaagacugacuagcccgaugggccucccaacgggcccuccuccccuccuugcaccgagauuaaucaaaggcucuuuucagagccaccaaaaaaaaaaaaaaaaaaaaaaaaaaaaaaaaaaaaaaaaaaaaaaaaaaaaaaaaaaaaaaaaaaaaaaaaaaaaaaaaaaaaaaaaaaaaaaaaaaaaa

SEQ ID NO: 24177 - RNA, 4035 nt, Artificial Sequence
  SARS-CoV-2/Wuhan/WIV05/2019__EPI_ISL_402128 spike protein mRNA gc (1-1273)(K986P_V987P)
aggagaaagcuuaccauguucguguuccugguccuccugccccuggugagcucccagugcgugaaccucaccacccgcacgcagcugccgcccgccuacaccaacagcuucacccggggcgucuacuaccccgacaagguguuccgcuccagcgugcugcacuccacccaggaccucuuccugcccuucuucagcaacgucacgugguuccacgccauccacguguccgggaccaacggcaccaagcgguucgacaacccggugcugcccuucaacgacggggucuacuucgcgagcaccgagaaguccaacaucauccgcggcuggaucuucgggacgacccucgacagcaagacccagucccugcugaucgugaacaacgccaccaacguggucaucaaggugugcgaguuccaguucugcaacgaccccuuccucggcguguacuaccacaagaacaacaagagcuggauggaguccgaguuccgggucuacagcuccgccaacaacugcacguucgaguacgugagccagcccuuccugauggaccuggagggcaagcaggggaacuucaagaaccuccgcgaguucguguucaagaacaucgacggcuacuucaagaucuacuccaagcacaccccgaucaaccugguccgggaccugccccagggguucagcgcccucgagccccugguggaccugcccaucggcaucaacaucacccgcuuccagacccuccuggcccugcaccgguccuaccucacgccgggggacagcagcuccggcuggaccgcgggcgccgccgccuacuacgugggguaccugcagccccgcaccuuccugcucaaguacaacgagaacggcaccaucacggacgcggucgacugcgcccuggacccccugagcgagaccaagugcacccucaaguccuucaccguggagaaggggaucuaccagacgagcaacuuccgggugcagcccaccgaguccaucguccgcuucccgaacaucaccaaccugugccccuucggcgagguguucaacgccacccgguucgccagcgucuacgccuggaaccgcaagcggaucuccaacugcguggcggacuacagcgugcuguacaacuccgccagcuucuccacguucaagugcuacggcgucagccccaccaagcucaacgaccugugcuucaccaacguguacgccgacuccuucgugauccgcggggacgagguccggcagaucgcccccggccagaccgggaagaucgccgacuacaacuacaagcugccggacgacuucacgggcugcgugaucgcguggaacagcaacaaccucgacuccaaggucgggggcaacuacaacuaccuguaccgccuguuccgcaagagcaaccucaagcccuucgagcgggacaucuccaccgagaucuaccaggccggcagcacccccugcaacgggguggagggcuucaacugcuacuucccccugcaguccuacggguuccagccgaccaacggcgugggguaccagcccuaccggguggucgugcugagcuucgagcuccugcacgcccccgccacggugugcggccccaagaaguccaccaaccuggucaagaacaagugcgugaacuucaacuucaacggccucaccgggaccggcgugcugaccgagagcaacaagaaguuccugccguuccagcaguucgggcgcgacaucgccgacacgaccgacgcgguccgcgacccccagacccuggagauccucgacaucacccccugcagcuucggcgggguguccgugaucacgccgggcaccaacaccagcaaccaggucgccgugcuguaccaggacgugaacugcaccgagguccccguggccauccacgccgaccagcugacgcccaccuggcggguguacuccaccggcagcaacgucuuccagacccgcgccgggugccucaucggcgcggagcacgugaacaacuccuacgagugcgacauccccaucggggccggcaucugcgccagcuaccagacgcagaccaacuccccgcggcgcgcccggagcguggcgucccagagcaucaucgccuacaccaugucccugggcgccgagaacagcgucgccuacuccaacaacagcaucgccauccccaccaacuucacgaucuccgugaccaccgagauccugcccgugagcaugaccaagacgagcgucgacugcaccauguacaucugcggggacuccaccgagugcagcaaccuccugcugcaguacggcuccuucugcacccagcucaaccgcgcgcugacggggaucgccguggagcaggacaagaacacccaggagguguucgcccaggucaagcagaucuacaagacgcccccgaucaaggacuucggcggguucaacuucagccagauccugcccgaccccuccaagcccagcaagcgguccuucaucgaggaccuccuguucaacaaggugacccuggccgacgccggcuucaucaagcaguacggcgacugccucggggacaucgcggcccgcgaccugaucugcgcccagaaguucaacggccugaccgugcucccgccccugcugaccgacgagaugaucgcccaguacaccagcgcccuccuggcggggaccaucacguccggcuggaccuucggggccggcgccgcccugcagauccccuucgcgaugcagauggccuaccgguucaacggcaucggggucacccagaacgugcucuacgagaaccagaagcugaucgccaaccaguucaacagcgccaucggcaagauccaggacucccugagcuccaccgccagcgcgcucgggaagcugcaggacguggucaaccagaacgcccaggcccugaacacgcucgugaagcagcuguccagcaacuucggcgccaucuccagcgugcugaacgacauccucucccgccuggacccgcccgaggccgaggugcagaucgaccggcugaucaccgggcgccuccagagccugcagaccuacgugacccagcagcugauccgggcggccgagauccgcgccagcgccaaccucgccgcgaccaagauguccgagugcguccugggccagagcaagcggguggacuucugcggcaagggguaccaccugauguccuucccccagagcgccccgcacggcguggucuuccuccacgugacguacguccccgcccaggagaagaacuucaccaccgcccccgcgaucugccacgacgggaaggcccacuucccccgcgagggcguguucguguccaacgggacccacugguucgucacgcagcggaacuucuacgagccgcagaucaucaccaccgacaacaccuucgugagcggcaacugcgacguggucaucggcaucgugaacaacacgguguacgacccccugcagcccgagcuggacuccuucaaggaggagcucgacaaguacuucaagaaccacaccagccccgacgucgaccugggggacaucuccggcaucaacgccagcguggugaacauccagaaggagaucgaccgccugaacgaggucgccaagaaccucaacgagucccugaucgaccugcaggagcucgggaaguacgagcaguacaucaaguggccgugguacaucuggcugggcuucaucgccggccugaucgcgaucgugauggugaccaucaugcucugcugcaugaccagcugcugcuccugccugaaggggugcugcagcugcggcuccugcugcaaguucgacgaggacgacagcgagcccguccugaagggggugaagcuccacuacacgugaggacuaguuauaagacugacuagcccgaugggccucccaacgggcccuccuccccuccuugcaccgagauuaaucaaaggcucuuuucagagccaccaaaaaaaaaaaaaaaaaaaaaaaaaaaaaaaaaaaaaaaaaaaaaaaaaaaaaaaaaaaaaaaaaaaaaaaaaaaaaaaaaaaaaaaaaaaaaaaaaaaaa

SEQ ID NO: 24178 - RNA, 4035 nt, Artificial Sequence
  SARS-CoV-2/Wuhan/WIV05/2019__EPI_ISL_402128 spike protein mRNA gc (1-1273)(K986P_V987P_ D614G)
aggagaaagcuuaccauguucguguuccugguccuccugccccuggugagcucccagugcgugaaccucaccacccgcacgcagcugccgcccgccuacaccaacagcuucacccggggcgucuacuaccccgacaagguguuccgcuccagcgugcugcacuccacccaggaccucuuccugcccuucuucagcaacgucacgugguuccacgccauccacguguccgggaccaacggcaccaagcgguucgacaacccggugcugcccuucaacgacggggucuacuucgcgagcaccgagaaguccaacaucauccgcggcuggaucuucgggacgacccucgacagcaagacccagucccugcugaucgugaacaacgccaccaacguggucaucaaggugugcgaguuccaguucugcaacgaccccuuccucggcguguacuaccacaagaacaacaagagcuggauggaguccgaguuccgggucuacagcuccgccaacaacugcacguucgaguacgugagccagcccuuccugauggaccuggagggcaagcaggggaacuucaagaaccuccgcgaguucguguucaagaacaucgacggcuacuucaagaucuacuccaagcacaccccgaucaaccugguccgggaccugccccagggguucagcgcccucgagccccugguggaccugcccaucggcaucaacaucacccgcuuccagacccuccuggcccugcaccgguccuaccucacgccgggggacagcagcuccggcuggaccgcgggcgccgccgccuacuacgugggguaccugcagccccgcaccuuccugcucaaguacaacgagaacggcaccaucacggacgcggucgacugcgcccuggacccccugagcgagaccaagugcacccucaaguccuucaccguggagaaggggaucuaccagacgagcaacuuccgggugcagcccaccgaguccaucguccgcuucccgaacaucaccaaccugugccccuucggcgagguguucaacgccacccgguucgccagcgucuacgccuggaaccgcaagcggaucuccaacugcguggcggacuacagcgugcuguacaacuccgccagcuucuccacguucaagugcuacggcgucagccccaccaagcucaacgaccugugcuucaccaacguguacgccgacuccuucgugauccgcggggacgagguccggcagaucgcccccggccagaccgggaagaucgccgacuacaacuacaagcugccggacgacuucacgggcugcgugaucgcguggaacagcaacaaccucgacuccaaggucgggggcaacuacaacuaccuguaccgccuguuccgcaagagcaaccucaagcccuucgagcgggacaucuccaccgagaucuaccaggccggcagcacccccugcaacgggguggagggcuucaacugcuacuucccccugcaguccuacggguuccagccgaccaacggcgugggguaccagcccuaccggguggucgugcugagcuucgagcuccugcacgcccccgccacggugugcggccccaagaaguccaccaaccuggucaagaacaagugcgugaacuucaacuucaacggccucaccgggaccggcgugcugaccgagagcaacaagaaguuccugccguuccagcaguucgggcgcgacaucgccgacacgaccgacgcgguccgcgacccccagacccuggagauccucgacaucacccccugcagcuucggcgggguguccgugaucacgccgggcaccaacaccagcaaccaggucgccgugcuguaccagggcgugaacugcaccgagguccccguggccauccacgccgaccagcugacgcccaccuggcggguguacuccaccggcagcaacgucuuccagacccgcgccgggugccucaucggcgcggagcacgugaacaacuccuacgagugcgacauccccaucggggccggcaucugcgccagcuaccagacgcagaccaacuccccgcggcgcgcccggagcguggcgucccagagcaucaucgccuacaccaugucccugggcgccgagaacagcgucgccuacuccaacaacagcaucgccauccccaccaacuucacgaucuccgugaccaccgagauccugcccgugagcaugaccaagacgagcgucgacugcaccauguacaucugcggggacuccaccgagugcagcaaccuccugcugcaguacggcuccuucugcacccagcucaaccgcgcgcugacggggaucgccguggagcaggacaagaacacccaggagguguucgcccaggucaagcagaucuacaagacgcccccgaucaaggacuucggcggguucaacuucagccagauccugcccgaccccuccaagcccagcaagcgguccuucaucgaggaccuccuguucaacaaggugacccuggccgacgccggcuucaucaagcaguacggcgacugccucggggacaucgcggcccgcgaccugaucugcgcccagaaguucaacggccugaccgugcucccgccccugcugaccgacgagaugaucgcccaguacaccagcgcccuccuggcggggaccaucacguccggcuggaccuucggggccggcgccgcccugcagauccccuucgcgaugcagauggccuaccgguucaacggcaucggggucacccagaacgugcucuacgagaaccagaagcugaucgccaaccaguucaacagcgccaucggcaagauccaggacucccugagcuccaccgccagcgcgcucgggaagcugcaggacguggucaaccagaacgcccaggcccugaacacgcucgugaagcagcuguccagcaacuucggcgccaucuccagcgugcugaacgacauccucucccgccuggacccgcccgaggccgaggugcagaucgaccggcugaucaccgggcgccuccagagccugcagaccuacgugacccagcagcugauccgggcggccgagauccgcgccagcgccaaccucgccgcgaccaagauguccgagugcguccugggccagagcaagcggguggacuucugcggcaagggguaccaccugauguccuucccccagagcgccccgcacggcguggucuuccuccacgugacguacguccccgcccaggagaagaacuucaccaccgcccccgcgaucugccacgacgggaaggcccacuucccccgcgagggcguguucguguccaacgggacccacugguucgucacgcagcggaacuucuacgagccgcagaucaucaccaccgacaacaccuucgugagcggcaacugcgacguggucaucggcaucgugaacaacacgguguacgacccccugcagcccgagcuggacuccuucaaggaggagcucgacaaguacuucaagaaccacaccagccccgacgucgaccugggggacaucuccggcaucaacgccagcguggugaacauccagaaggagaucgaccgccugaacgaggucgccaagaaccucaacgagucccugaucgaccugcaggagcucgggaaguacgagcaguacaucaaguggccgugguacaucuggcugggcuucaucgccggccugaucgcgaucgugauggugaccaucaugcucugcugcaugaccagcugcugcuccugccugaaggggugcugcagcugcggcuccugcugcaaguucgacgaggacgacagcgagcccguccugaagggggugaagcuccacuacacgugaggacuaguuauaagacugacuagcccgaugggccucccaacgggcccuccuccccuccuugcaccgagauuaaucaaaggcucuuuucagagccaccaaaaaaaaaaaaaaaaaaaaaaaaaaaaaaaaaaaaaaaaaaaaaaaaaaaaaaaaaaaaaaaaaaaaaaaaaaaaaaaaaaaaaaaaaaaaaaaaaaaaa

SEQ ID NO: 24179 - RNA, 4035 nt, Artificial Sequence
  SARS-CoV-2/Wuhan/WIV05/2019__EPI_ISL_402128 spike protein mRNA gc (1-1273)(K986P_V987P_A222V_D614G)
aggagaaagcuuaccauguucguguuccugguccuccugccccuggugagcucccagugcgugaaccucaccacccgcacgcagcugccgcccgccuacaccaacagcuucacccggggcgucuacuaccccgacaagguguuccgcuccagcgugcugcacuccacccaggaccucuuccugcccuucuucagcaacgucacgugguuccacgccauccacguguccgggaccaacggcaccaagcgguucgacaacccggugcugcccuucaacgacggggucuacuucgcgagcaccgagaaguccaacaucauccgcggcuggaucuucgggacgacccucgacagcaagacccagucccugcugaucgugaacaacgccaccaacguggucaucaaggugugcgaguuccaguucugcaacgaccccuuccucggcguguacuaccacaagaacaacaagagcuggauggaguccgaguuccgggucuacagcuccgccaacaacugcacguucgaguacgugagccagcccuuccugauggaccuggagggcaagcaggggaacuucaagaaccuccgcgaguucguguucaagaacaucgacggcuacuucaagaucuacuccaagcacaccccgaucaaccugguccgggaccugccccagggguucagcguccucgagccccugguggaccugcccaucggcaucaacaucacccgcuuccagacccuccuggcccugcaccgguccuaccucacgccgggggacagcagcuccggcuggaccgcgggcgccgccgccuacuacgugggguaccugcagccccgcaccuuccugcucaaguacaacgagaacggcaccaucacggacgcggucgacugcgcccuggacccccugagcgagaccaagugcacccucaaguccuucaccguggagaaggggaucuaccagacgagcaacuuccgggugcagcccaccgaguccaucguccgcuucccgaacaucaccaaccugugccccuucggcgagguguucaacgccacccgguucgccagcgucuacgccuggaaccgcaagcggaucuccaacugcguggcggacuacagcgugcuguacaacuccgccagcuucuccacguucaagugcuacggcgucagccccaccaagcucaacgaccugugcuucaccaacguguacgccgacuccuucgugauccgcggggacgagguccggcagaucgcccccggccagaccgggaagaucgccgacuacaacuacaagcugccggacgacuucacgggcugcgugaucgcguggaacagcaacaaccucgacuccaaggucgggggcaacuacaacuaccuguaccgccuguuccgcaagagcaaccucaagcccuucgagcgggacaucuccaccgagaucuaccaggccggcagcacccccugcaacgggguggagggcuucaacugcuacuucccccugcaguccuacggguuccagccgaccaacggcgugggguaccagcccuaccggguggucgugcugagcuucgagcuccugcacgcccccgccacggugugcggccccaagaaguccaccaaccuggucaagaacaagugcgugaacuucaacuucaacggccucaccgggaccggcgugcugaccgagagcaacaagaaguuccugccguuccagcaguucgggcgcgacaucgccgacacgaccgacgcgguccgcgacccccagacccuggagauccucgacaucacccccugcagcuucggcgggguguccgugaucacgccgggcaccaacaccagcaaccaggucgccgugcuguaccagggcgugaacugcaccgagguccccguggccauccacgccgaccagcugacgcccaccuggcggguguacuccaccggcagcaacgucuuccagacccgcgccgggugccucaucggcgcggagcacgugaacaacuccuacgagugcgacauccccaucggggccggcaucugcgccagcuaccagacgcagaccaacuccccgcggcgcgcccggagcguggcgucccagagcaucaucgccuacaccaugucccugggcgccgagaacagcgucgccuacuccaacaacagcaucgccauccccaccaacuucacgaucuccgugaccaccgagauccugcccgugagcaugaccaagacgagcgucgacugcaccauguacaucugcggggacuccaccgagugcagcaaccuccugcugcaguacggcuccuucugcacccagcucaaccgcgcgcugacggggaucgccguggagcaggacaagaacacccaggagguguucgcccaggucaagcagaucuacaagacgcccccgaucaaggacuucggcggguucaacuucagccagauccugcccgaccccuccaagcccagcaagcgguccuucaucgaggaccuccuguucaacaaggugacccuggccgacgccggcuucaucaagcaguacggcgacugccucggggacaucgcggcccgcgaccugaucugcgcccagaaguucaacggccugaccgugcucccgccccugcugaccgacgagaugaucgcccaguacaccagcgcccuccuggcggggaccaucacguccggcuggaccuucggggccggcgccgcccugcagauccccuucgcgaugcagauggccuaccgguucaacggcaucggggucacccagaacgugcucuacgagaaccagaagcugaucgccaaccaguucaacagcgccaucggcaagauccaggacucccugagcuccaccgccagcgcgcucgggaagcugcaggacguggucaaccagaacgcccaggcccugaacacgcucgugaagcagcuguccagcaacuucggcgccaucuccagcgugcugaacgacauccucucccgccuggacccgcccgaggccgaggugcagaucgaccggcugaucaccgggcgccuccagagccugcagaccuacgugacccagcagcugauccgggcggccgagauccgcgccagcgccaaccucgccgcgaccaagauguccgagugcguccugggccagagcaagcggguggacuucugcggcaagggguaccaccugauguccuucccccagagcgccccgcacggcguggucuuccuccacgugacguacguccccgcccaggagaagaacuucaccaccgcccccgcgaucugccacgacgggaaggcccacuucccccgcgagggcguguucguguccaacgggacccacugguucgucacgcagcggaacuucuacgagccgcagaucaucaccaccgacaacaccuucgugagcggcaacugcgacguggucaucggcaucgugaacaacacgguguacgacccccugcagcccgagcuggacuccuucaaggaggagcucgacaaguacuucaagaaccacaccagccccgacgucgaccugggggacaucuccggcaucaacgccagcguggugaacauccagaaggagaucgaccgccugaacgaggucgccaagaaccucaacgagucccugaucgaccugcaggagcucgggaaguacgagcaguacaucaaguggccgugguacaucuggcugggcuucaucgccggccugaucgcgaucgugauggugaccaucaugcucugcugcaugaccagcugcugcuccugccugaaggggugcugcagcugcggcuccugcugcaaguucgacgaggacgacagcgagcccguccugaagggggugaagcuccacuacacgugaggacuaguuauaagacugacuagcccgaugggccucccaacgggcccuccuccccuccuugcaccgagauuaaucaaaggcucuuuucagagccaccaaaaaaaaaaaaaaaaaaaaaaaaaaaaaaaaaaaaaaaaaaaaaaaaaaaaaaaaaaaaaaaaaaaaaaaaaaaaaaaaaaaaaaaaaaaaaaaaaaaaa

SEQ ID NO: 24180 - RNA, 4035 nt, Artificial Sequence
  SARS-CoV-2/Wuhan/WIV05/2019__EPI_ISL_402128 spike protein mRNA gc (1-1273)(K986P_V987P_N439K_D614G)
aggagaaagcuuaccauguucguguuccugguccuccugccccuggugagcucccagugcgugaaccucaccacccgcacgcagcugccgcccgccuacaccaacagcuucacccggggcgucuacuaccccgacaagguguuccgcuccagcgugcugcacuccacccaggaccucuuccugcccuucuucagcaacgucacgugguuccacgccauccacguguccgggaccaacggcaccaagcgguucgacaacccggugcugcccuucaacgacggggucuacuucgcgagcaccgagaaguccaacaucauccgcggcuggaucuucgggacgacccucgacagcaagacccagucccugcugaucgugaacaacgccaccaacguggucaucaaggugugcgaguuccaguucugcaacgaccccuuccucggcguguacuaccacaagaacaacaagagcuggauggaguccgaguuccgggucuacagcuccgccaacaacugcacguucgaguacgugagccagcccuuccugauggaccuggagggcaagcaggggaacuucaagaaccuccgcgaguucguguucaagaacaucgacggcuacuucaagaucuacuccaagcacaccccgaucaaccugguccgggaccugccccagggguucagcgcccucgagccccugguggaccugcccaucggcaucaacaucacccgcuuccagacccuccuggcccugcaccgguccuaccucacgccgggggacagcagcuccggcuggaccgcgggcgccgccgccuacuacgugggguaccugcagccccgcaccuuccugcucaaguacaacgagaacggcaccaucacggacgcggucgacugcgcccuggacccccugagcgagaccaagugcacccucaaguccuucaccguggagaaggggaucuaccagacgagcaacuuccgggugcagcccaccgaguccaucguccgcuucccgaacaucaccaaccugugccccuucggcgagguguucaacgccacccgguucgccagcgucuacgccuggaaccgcaagcggaucuccaacugcguggcggacuacagcgugcuguacaacuccgccagcuucuccacguucaagugcuacggcgucagccccaccaagcucaacgaccugugcuucaccaacguguacgccgacuccuucgugauccgcggggacgagguccggcagaucgcccccggccagaccgggaagaucgccgacuacaacuacaagcugccggacgacuucacgggcugcgugaucgcguggaacagcaagaaccucgacuccaaggucgggggcaacuacaacuaccuguaccgccuguuccgcaagagcaaccucaagcccuucgagcgggacaucuccaccgagaucuaccaggccggcagcacccccugcaacgggguggagggcuucaacugcuacuucccccugcaguccuacggguuccagccgaccaacggcgugggguaccagcccuaccggguggucgugcugagcuucgagcuccugcacgcccccgccacggugugcggccccaagaaguccaccaaccuggucaagaacaagugcgugaacuucaacuucaacggccucaccgggaccggcgugcugaccgagagcaacaagaaguuccugccguuccagcaguucgggcgcgacaucgccgacacgaccgacgcgguccgcgacccccagacccuggagauccucgacaucacccccugcagcuucggcgggguguccgugaucacgccgggcaccaacaccagcaaccaggucgccgugcuguaccagggcgugaacugcaccgagguccccguggccauccacgccgaccagcugacgcccaccuggcggguguacuccaccggcagcaacgucuuccagacccgcgccgggugccucaucggcgcggagcacgugaacaacuccuacgagugcgacauccccaucggggccggcaucugcgccagcuaccagacgcagaccaacuccccgcggcgcgcccggagcguggcgucccagagcaucaucgccuacaccaugucccugggcgccgagaacagcgucgccuacuccaacaacagcaucgccauccccaccaacuucacgaucuccgugaccaccgagauccugcccgugagcaugaccaagacgagcgucgacugcaccauguacaucugcggggacuccaccgagugcagcaaccuccugcugcaguacggcuccuucugcacccagcucaaccgcgcgcugacggggaucgccguggagcaggacaagaacacccaggagguguucgcccaggucaagcagaucuacaagacgcccccgaucaaggacuucggcggguucaacuucagccagauccugcccgaccccuccaagcccagcaagcgguccuucaucgaggaccuccuguucaacaaggugacccuggccgacgccggcuucaucaagcaguacggcgacugccucggggacaucgcggcccgcgaccugaucugcgcccagaaguucaacggccugaccgugcucccgccccugcugaccgacgagaugaucgcccaguacaccagcgcccuccuggcggggaccaucacguccggcuggaccuucggggccggcgccgcccugcagauccccuucgcgaugcagauggccuaccgguucaacggcaucggggucacccagaacgugcucuacgagaaccagaagcugaucgccaaccaguucaacagcgccaucggcaagauccaggacucccugagcuccaccgccagcgcgcucgggaagcugcaggacguggucaaccagaacgcccaggcccugaacacgcucgugaagcagcuguccagcaacuucggcgccaucuccagcgugcugaacgacauccucucccgccuggacccgcccgaggccgaggugcagaucgaccggcugaucaccgggcgccuccagagccugcagaccuacgugacccagcagcugauccgggcggccgagauccgcgccagcgccaaccucgccgcgaccaagauguccgagugcguccugggccagagcaagcggguggacuucugcggcaagggguaccaccugauguccuucccccagagcgccccgcacggcguggucuuccuccacgugacguacguccccgcccaggagaagaacuucaccaccgcccccgcgaucugccacgacgggaaggcccacuucccccgcgagggcguguucguguccaacgggacccacugguucgucacgcagcggaacuucuacgagccgcagaucaucaccaccgacaacaccuucgugagcggcaacugcgacguggucaucggcaucgugaacaacacgguguacgacccccugcagcccgagcuggacuccuucaaggaggagcucgacaaguacuucaagaaccacaccagccccgacgucgaccugggggacaucuccggcaucaacgccagcguggugaacauccagaaggagaucgaccgccugaacgaggucgccaagaaccucaacgagucccugaucgaccugcaggagcucgggaaguacgagcaguacaucaaguggccgugguacaucuggcugggcuucaucgccggccugaucgcgaucgugauggugaccaucaugcucugcugcaugaccagcugcugcuccugccugaaggggugcugcagcugcggcuccugcugcaaguucgacgaggacgacagcgagcccguccugaagggggugaagcuccacuacacgugaggacuaguuauaagacugacuagcccgaugggccucccaacgggcccuccuccccuccuugcaccgagauuaaucaaaggcucuuuucagagccaccaaaaaaaaaaaaaaaaaaaaaaaaaaaaaaaaaaaaaaaaaaaaaaaaaaaaaaaaaaaaaaaaaaaaaaaaaaaaaaaaaaaaaaaaaaaaaaaaaaaaa

SEQ ID NO: 24181 - RNA, 4035 nt, Artificial Sequence
  SARS-CoV-2/Wuhan/WIV05/2019__EPI_ISL_402128 spike protein mRNA gc (1-1273)(K986P_V987P_S477N_D614G)
aggagaaagcuuaccauguucguguuccugguccuccugccccuggugagcucccagugcgugaaccucaccacccgcacgcagcugccgcccgccuacaccaacagcuucacccggggcgucuacuaccccgacaagguguuccgcuccagcgugcugcacuccacccaggaccucuuccugcccuucuucagcaacgucacgugguuccacgccauccacguguccgggaccaacggcaccaagcgguucgacaacccggugcugcccuucaacgacggggucuacuucgcgagcaccgagaaguccaacaucauccgcggcuggaucuucgggacgacccucgacagcaagacccagucccugcugaucgugaacaacgccaccaacguggucaucaaggugugcgaguuccaguucugcaacgaccccuuccucggcguguacuaccacaagaacaacaagagcuggauggaguccgaguuccgggucuacagcuccgccaacaacugcacguucgaguacgugagccagcccuuccugauggaccuggagggcaagcaggggaacuucaagaaccuccgcgaguucguguucaagaacaucgacggcuacuucaagaucuacuccaagcacaccccgaucaaccugguccgggaccugccccagggguucagcgcccucgagccccugguggaccugcccaucggcaucaacaucacccgcuuccagacccuccuggcccugcaccgguccuaccucacgccgggggacagcagcuccggcuggaccgcgggcgccgccgccuacuacgugggguaccugcagccccgcaccuuccugcucaaguacaacgagaacggcaccaucacggacgcggucgacugcgcccuggacccccugagcgagaccaagugcacccucaaguccuucaccguggagaaggggaucuaccagacgagcaacuuccgggugcagcccaccgaguccaucguccgcuucccgaacaucaccaaccugugccccuucggcgagguguucaacgccacccgguucgccagcgucuacgccuggaaccgcaagcggaucuccaacugcguggcggacuacagcgugcuguacaacuccgccagcuucuccacguucaagugcuacggcgucagccccaccaagcucaacgaccugugcuucaccaacguguacgccgacuccuucgugauccgcggggacgagguccggcagaucgcccccggccagaccgggaagaucgccgacuacaacuacaagcugccggacgacuucacgggcugcgugaucgcguggaacagcaacaaccucgacuccaaggucgggggcaacuacaacuaccuguaccgccuguuccgcaagagcaaccucaagcccuucgagcgggacaucuccaccgagaucuaccaggccggcaacacccccugcaacgggguggagggcuucaacugcuacuucccccugcaguccuacggguuccagccgaccaacggcgugggguaccagcccuaccggguggucgugcugagcuucgagcuccugcacgcccccgccacggugugcggccccaagaaguccaccaaccuggucaagaacaagugcgugaacuucaacuucaacggccucaccgggaccggcgugcugaccgagagcaacaagaaguuccugccguuccagcaguucgggcgcgacaucgccgacacgaccgacgcgguccgcgacccccagacccuggagauccucgacaucacccccugcagcuucggcgggguguccgugaucacgccgggcaccaacaccagcaaccaggucgccgugcuguaccagggcgugaacugcaccgagguccccguggccauccacgccgaccagcugacgcccaccuggcggguguacuccaccggcagcaacgucuuccagacccgcgccgggugccucaucggcgcggagcacgugaacaacuccuacgagugcgacauccccaucggggccggcaucugcgccagcuaccagacgcagaccaacuccccgcggcgcgcccggagcguggcgucccagagcaucaucgccuacaccaugucccugggcgccgagaacagcgucgccuacuccaacaacagcaucgccauccccaccaacuucacgaucuccgugaccaccgagauccugcccgugagcaugaccaagacgagcgucgacugcaccauguacaucugcggggacuccaccgagugcagcaaccuccugcugcaguacggcuccuucugcacccagcucaaccgcgcgcugacggggaucgccguggagcaggacaagaacacccaggagguguucgcccaggucaagcagaucuacaagacgcccccgaucaaggacuucggcggguucaacuucagccagauccugcccgaccccuccaagcccagcaagcgguccuucaucgaggaccuccuguucaacaaggugacccuggccgacgccggcuucaucaagcaguacggcgacugccucggggacaucgcggcccgcgaccugaucugcgcccagaaguucaacggccugaccgugcucccgccccugcugaccgacgagaugaucgcccaguacaccagcgcccuccuggcggggaccaucacguccggcuggaccuucggggccggcgccgcccugcagauccccuucgcgaugcagauggccuaccgguucaacggcaucggggucacccagaacgugcucuacgagaaccagaagcugaucgccaaccaguucaacagcgccaucggcaagauccaggacucccugagcuccaccgccagcgcgcucgggaagcugcaggacguggucaaccagaacgcccaggcccugaacacgcucgugaagcagcuguccagcaacuucggcgccaucuccagcgugcugaacgacauccucucccgccuggacccgcccgaggccgaggugcagaucgaccggcugaucaccgggcgccuccagagccugcagaccuacgugacccagcagcugauccgggcggccgagauccgcgccagcgccaaccucgccgcgaccaagauguccgagugcguccugggccagagcaagcggguggacuucugcggcaagggguaccaccugauguccuucccccagagcgccccgcacggcguggucuuccuccacgugacguacguccccgcccaggagaagaacuucaccaccgcccccgcgaucugccacgacgggaaggcccacuucccccgcgagggcguguucguguccaacgggacccacugguucgucacgcagcggaacuucuacgagccgcagaucaucaccaccgacaacaccuucgugagcggcaacugcgacguggucaucggcaucgugaacaacacgguguacgacccccugcagcccgagcuggacuccuucaaggaggagcucgacaaguacuucaagaaccacaccagccccgacgucgaccugggggacaucuccggcaucaacgccagcguggugaacauccagaaggagaucgaccgccugaacgaggucgccaagaaccucaacgagucccugaucgaccugcaggagcucgggaaguacgagcaguacaucaaguggccgugguacaucuggcugggcuucaucgccggccugaucgcgaucgugauggugaccaucaugcucugcugcaugaccagcugcugcuccugccugaaggggugcugcagcugcggcuccugcugcaaguucgacgaggacgacagcgagcccguccugaagggggugaagcuccacuacacgugaggacuaguuauaagacugacuagcccgaugggccucccaacgggcccuccuccccuccuugcaccgagauuaaucaaaggcucuuuucagagccaccaaaaaaaaaaaaaaaaaaaaaaaaaaaaaaaaaaaaaaaaaaaaaaaaaaaaaaaaaaaaaaaaaaaaaaaaaaaaaaaaaaaaaaaaaaaaaaaaaaaaa

SEQ ID NO: 24182 - RNA, 4035 nt, Artificial Sequence
  SARS-CoV-2/Wuhan/WIV05/2019__EPI_ISL_402128 spike protein mRNA gc (1-1273)(K986P_V987P_N501Y_D614G)
aggagaaagcuuaccauguucguguuccugguccuccugccccuggugagcucccagugcgugaaccucaccacccgcacgcagcugccgcccgccuacaccaacagcuucacccggggcgucuacuaccccgacaagguguuccgcuccagcgugcugcacuccacccaggaccucuuccugcccuucuucagcaacgucacgugguuccacgccauccacguguccgggaccaacggcaccaagcgguucgacaacccggugcugcccuucaacgacggggucuacuucgcgagcaccgagaaguccaacaucauccgcggcuggaucuucgggacgacccucgacagcaagacccagucccugcugaucgugaacaacgccaccaacguggucaucaaggugugcgaguuccaguucugcaacgaccccuuccucggcguguacuaccacaagaacaacaagagcuggauggaguccgaguuccgggucuacagcuccgccaacaacugcacguucgaguacgugagccagcccuuccugauggaccuggagggcaagcaggggaacuucaagaaccuccgcgaguucguguucaagaacaucgacggcuacuucaagaucuacuccaagcacaccccgaucaaccugguccgggaccugccccagggguucagcgcccucgagccccugguggaccugcccaucggcaucaacaucacccgcuuccagacccuccuggcccugcaccgguccuaccucacgccgggggacagcagcuccggcuggaccgcgggcgccgccgccuacuacgugggguaccugcagccccgcaccuuccugcucaaguacaacgagaacggcaccaucacggacgcggucgacugcgcccuggacccccugagcgagaccaagugcacccucaaguccuucaccguggagaaggggaucuaccagacgagcaacuuccgggugcagcccaccgaguccaucguccgcuucccgaacaucaccaaccugugccccuucggcgagguguucaacgccacccgguucgccagcgucuacgccuggaaccgcaagcggaucuccaacugcguggcggacuacagcgugcuguacaacuccgccagcuucuccacguucaagugcuacggcgucagccccaccaagcucaacgaccugugcuucaccaacguguacgccgacuccuucgugauccgcggggacgagguccggcagaucgcccccggccagaccgggaagaucgccgacuacaacuacaagcugccggacgacuucacgggcugcgugaucgcguggaacagcaacaaccucgacuccaaggucgggggcaacuacaacuaccuguaccgccuguuccgcaagagcaaccucaagcccuucgagcgggacaucuccaccgagaucuaccaggccggcagcacccccugcaacgggguggagggcuucaacugcuacuucccccugcaguccuacggguuccagccgaccuacggcgugggguaccagcccuaccggguggucgugcugagcuucgagcuccugcacgcccccgccacggugugcggccccaagaaguccaccaaccuggucaagaacaagugcgugaacuucaacuucaacggccucaccgggaccggcgugcugaccgagagcaacaagaaguuccugccguuccagcaguucgggcgcgacaucgccgacacgaccgacgcgguccgcgacccccagacccuggagauccucgacaucacccccugcagcuucggcgggguguccgugaucacgccgggcaccaacaccagcaaccaggucgccgugcuguaccagggcgugaacugcaccgagguccccguggccauccacgccgaccagcugacgcccaccuggcggguguacuccaccggcagcaacgucuuccagacccgcgccgggugccucaucggcgcggagcacgugaacaacuccuacgagugcgacauccccaucggggccggcaucugcgccagcuaccagacgcagaccaacuccccgcggcgcgcccggagcguggcgucccagagcaucaucgccuacaccaugucccugggcgccgagaacagcgucgccuacuccaacaacagcaucgccauccccaccaacuucacgaucuccgugaccaccgagauccugcccgugagcaugaccaagacgagcgucgacugcaccauguacaucugcggggacuccaccgagugcagcaaccuccugcugcaguacggcuccuucugcacccagcucaaccgcgcgcugacggggaucgccguggagcaggacaagaacacccaggagguguucgcccaggucaagcagaucuacaagacgcccccgaucaaggacuucggcggguucaacuucagccagauccugcccgaccccuccaagcccagcaagcgguccuucaucgaggaccuccuguucaacaaggugacccuggccgacgccggcuucaucaagcaguacggcgacugccucggggacaucgcggcccgcgaccugaucugcgcccagaaguucaacggccugaccgugcucccgccccugcugaccgacgagaugaucgcccaguacaccagcgcccuccuggcggggaccaucacguccggcuggaccuucggggccggcgccgcccugcagauccccuucgcgaugcagauggccuaccgguucaacggcaucggggucacccagaacgugcucuacgagaaccagaagcugaucgccaaccaguucaacagcgccaucggcaagauccaggacucccugagcuccaccgccagcgcgcucgggaagcugcaggacguggucaaccagaacgcccaggcccugaacacgcucgugaagcagcuguccagcaacuucggcgccaucuccagcgugcugaacgacauccucucccgccuggacccgcccgaggccgaggugcagaucgaccggcugaucaccgggcgccuccagagccugcagaccuacgugacccagcagcugauccgggcggccgagauccgcgccagcgccaaccucgccgcgaccaagauguccgagugcguccugggccagagcaagcggguggacuucugcggcaagggguaccaccugauguccuucccccagagcgccccgcacggcguggucuuccuccacgugacguacguccccgcccaggagaagaacuucaccaccgcccccgcgaucugccacgacgggaaggcccacuucccccgcgagggcguguucguguccaacgggacccacugguucgucacgcagcggaacuucuacgagccgcagaucaucaccaccgacaacaccuucgugagcggcaacugcgacguggucaucggcaucgugaacaacacgguguacgacccccugcagcccgagcuggacuccuucaaggaggagcucgacaaguacuucaagaaccacaccagccccgacgucgaccugggggacaucuccggcaucaacgccagcguggugaacauccagaaggagaucgaccgccugaacgaggucgccaagaaccucaacgagucccugaucgaccugcaggagcucgggaaguacgagcaguacaucaaguggccgugguacaucuggcugggcuucaucgccggccugaucgcgaucgugauggugaccaucaugcucugcugcaugaccagcugcugcuccugccugaaggggugcugcagcugcggcuccugcugcaaguucgacgaggacgacagcgagcccguccugaagggggugaagcuccacuacacgugaggacuaguuauaagacugacuagcccgaugggccucccaacgggcccuccuccccuccuugcaccgagauuaaucaaaggcucuuuucagagccaccaaaaaaaaaaaaaaaaaaaaaaaaaaaaaaaaaaaaaaaaaaaaaaaaaaaaaaaaaaaaaaaaaaaaaaaaaaaaaaaaaaaaaaaaaaaaaaaaaaaaa

SEQ ID NO: 24183 - RNA, 4029 nt, Artificial Sequence
  SARS-CoV-2/Wuhan/WIV05/2019__EPI_ISL_402128 spike protein mRNA gc (1-1273)(K986P_V987P_H69del_V70del_D614G)
aggagaaagcuuaccauguucguguuccugguccuccugccccuggugagcucccagugcgugaaccucaccacccgcacgcagcugccgcccgccuacaccaacagcuucacccggggcgucuacuaccccgacaagguguuccgcuccagcgugcugcacuccacccaggaccucuuccugcccuucuucagcaacgucacgugguuccacgccaucuccgggaccaacggcaccaagcgguucgacaacccggugcugcccuucaacgacggggucuacuucgcgagcaccgagaaguccaacaucauccgcggcuggaucuucgggacgacccucgacagcaagacccagucccugcugaucgugaacaacgccaccaacguggucaucaaggugugcgaguuccaguucugcaacgaccccuuccucggcguguacuaccacaagaacaacaagagcuggauggaguccgaguuccgggucuacagcuccgccaacaacugcacguucgaguacgugagccagcccuuccugauggaccuggagggcaagcaggggaacuucaagaaccuccgcgaguucguguucaagaacaucgacggcuacuucaagaucuacuccaagcacaccccgaucaaccugguccgggaccugccccagggguucagcgcccucgagccccugguggaccugcccaucggcaucaacaucacccgcuuccagacccuccuggcccugcaccgguccuaccucacgccgggggacagcagcuccggcuggaccgcgggcgccgccgccuacuacgugggguaccugcagccccgcaccuuccugcucaaguacaacgagaacggcaccaucacggacgcggucgacugcgcccuggacccccugagcgagaccaagugcacccucaaguccuucaccguggagaaggggaucuaccagacgagcaacuuccgggugcagcccaccgaguccaucguccgcuucccgaacaucaccaaccugugccccuucggcgagguguucaacgccacccgguucgccagcgucuacgccuggaaccgcaagcggaucuccaacugcguggcggacuacagcgugcuguacaacuccgccagcuucuccacguucaagugcuacggcgucagccccaccaagcucaacgaccugugcuucaccaacguguacgccgacuccuucgugauccgcggggacgagguccggcagaucgcccccggccagaccgggaagaucgccgacuacaacuacaagcugccggacgacuucacgggcugcgugaucgcguggaacagcaacaaccucgacuccaaggucgggggcaacuacaacuaccuguaccgccuguuccgcaagagcaaccucaagcccuucgagcgggacaucuccaccgagaucuaccaggccggcagcacccccugcaacgggguggagggcuucaacugcuacuucccccugcaguccuacggguuccagccgaccaacggcgugggguaccagcccuaccggguggucgugcugagcuucgagcuccugcacgcccccgccacggugugcggccccaagaaguccaccaaccuggucaagaacaagugcgugaacuucaacuucaacggccucaccgggaccggcgugcugaccgagagcaacaagaaguuccugccguuccagcaguucgggcgcgacaucgccgacacgaccgacgcgguccgcgacccccagacccuggagauccucgacaucacccccugcagcuucggcgggguguccgugaucacgccgggcaccaacaccagcaaccaggucgccgugcuguaccagggcgugaacugcaccgagguccccguggccauccacgccgaccagcugacgcccaccuggcggguguacuccaccggcagcaacgucuuccagacccgcgccgggugccucaucggcgcggagcacgugaacaacuccuacgagugcgacauccccaucggggccggcaucugcgccagcuaccagacgcagaccaacuccccgcggcgcgcccggagcguggcgucccagagcaucaucgccuacaccaugucccugggcgccgagaacagcgucgccuacuccaacaacagcaucgccauccccaccaacuucacgaucuccgugaccaccgagauccugcccgugagcaugaccaagacgagcgucgacugcaccauguacaucugcggggacuccaccgagugcagcaaccuccugcugcaguacggcuccuucugcacccagcucaaccgcgcgcugacggggaucgccguggagcaggacaagaacacccaggagguguucgcccaggucaagcagaucuacaagacgcccccgaucaaggacuucggcggguucaacuucagccagauccugcccgaccccuccaagcccagcaagcgguccuucaucgaggaccuccuguucaacaaggugacccuggccgacgccggcuucaucaagcaguacggcgacugccucggggacaucgcggcccgcgaccugaucugcgcccagaaguucaacggccugaccgugcucccgccccugcugaccgacgagaugaucgcccaguacaccagcgcccuccuggcggggaccaucacguccggcuggaccuucggggccggcgccgcccugcagauccccuucgcgaugcagauggccuaccgguucaacggcaucggggucacccagaacgugcucuacgagaaccagaagcugaucgccaaccaguucaacagcgccaucggcaagauccaggacucccugagcuccaccgccagcgcgcucgggaagcugcaggacguggucaaccagaacgcccaggcccugaacacgcucgugaagcagcuguccagcaacuucggcgccaucuccagcgugcugaacgacauccucucccgccuggacccgcccgaggccgaggugcagaucgaccggcugaucaccgggcgccuccagagccugcagaccuacgugacccagcagcugauccgggcggccgagauccgcgccagcgccaaccucgccgcgaccaagauguccgagugcguccugggccagagcaagcggguggacuucugcggcaagggguaccaccugauguccuucccccagagcgccccgcacggcguggucuuccuccacgugacguacguccccgcccaggagaagaacuucaccaccgcccccgcgaucugccacgacgggaaggcccacuucccccgcgagggcguguucguguccaacgggacccacugguucgucacgcagcggaacuucuacgagccgcagaucaucaccaccgacaacaccuucgugagcggcaacugcgacguggucaucggcaucgugaacaacacgguguacgacccccugcagcccgagcuggacuccuucaaggaggagcucgacaaguacuucaagaaccacaccagccccgacgucgaccugggggacaucuccggcaucaacgccagcguggugaacauccagaaggagaucgaccgccugaacgaggucgccaagaaccucaacgagucccugaucgaccugcaggagcucgggaaguacgagcaguacaucaaguggccgugguacaucuggcugggcuucaucgccggccugaucgcgaucgugauggugaccaucaugcucugcugcaugaccagcugcugcuccugccugaaggggugcugcagcugcggcuccugcugcaaguucgacgaggacgacagcgagcccguccugaagggggugaagcuccacuacacgugaggacuaguuauaagacugacuagcccgaugggccucccaacgggcccuccuccccuccuugcaccgagauuaaucaaaggcucuuuucagagccaccaaaaaaaaaaaaaaaaaaaaaaaaaaaaaaaaaaaaaaaaaaaaaaaaaaaaaaaaaaaaaaaaaaaaaaaaaaaaaaaaaaaaaaaaaaaaaaaaaaaaa

SEQ ID NO: 24184 - RNA, 4035 nt, Artificial Sequence
  SARS-CoV-2/Wuhan/WIV05/2019__EPI_ISL_402128 spike protein mRNA gc (1-1273)(K986P_V987P_Y453F_D614G)
aggagaaagcuuaccauguucguguuccugguccuccugccccuggugagcucccagugcgugaaccucaccacccgcacgcagcugccgcccgccuacaccaacagcuucacccggggcgucuacuaccccgacaagguguuccgcuccagcgugcugcacuccacccaggaccucuuccugcccuucuucagcaacgucacgugguuccacgccauccacguguccgggaccaacggcaccaagcgguucgacaacccggugcugcccuucaacgacggggucuacuucgcgagcaccgagaaguccaacaucauccgcggcuggaucuucgggacgacccucgacagcaagacccagucccugcugaucgugaacaacgccaccaacguggucaucaaggugugcgaguuccaguucugcaacgaccccuuccucggcguguacuaccacaagaacaacaagagcuggauggaguccgaguuccgggucuacagcuccgccaacaacugcacguucgaguacgugagccagcccuuccugauggaccuggagggcaagcaggggaacuucaagaaccuccgcgaguucguguucaagaacaucgacggcuacuucaagaucuacuccaagcacaccccgaucaaccugguccgggaccugccccagggguucagcgcccucgagccccugguggaccugcccaucggcaucaacaucacccgcuuccagacccuccuggcccugcaccgguccuaccucacgccgggggacagcagcuccggcuggaccgcgggcgccgccgccuacuacgugggguaccugcagccccgcaccuuccugcucaaguacaacgagaacggcaccaucacggacgcggucgacugcgcccuggacccccugagcgagaccaagugcacccucaaguccuucaccguggagaaggggaucuaccagacgagcaacuuccgggugcagcccaccgaguccaucguccgcuucccgaacaucaccaaccugugccccuucggcgagguguucaacgccacccgguucgccagcgucuacgccuggaaccgcaagcggaucuccaacugcguggcggacuacagcgugcuguacaacuccgccagcuucuccacguucaagugcuacggcgucagccccaccaagcucaacgaccugugcuucaccaacguguacgccgacuccuucgugauccgcggggacgagguccggcagaucgcccccggccagaccgggaagaucgccgacuacaacuacaagcugccggacgacuucacgggcugcgugaucgcguggaacagcaacaaccucgacuccaaggucgggggcaacuacaacuaccuguuccgccuguuccgcaagagcaaccucaagcccuucgagcgggacaucuccaccgagaucuaccaggccggcagcacccccugcaacgggguggagggcuucaacugcuacuucccccugcaguccuacggguuccagccgaccaacggcgugggguaccagcccuaccggguggucgugcugagcuucgagcuccugcacgcccccgccacggugugcggccccaagaaguccaccaaccuggucaagaacaagugcgugaacuucaacuucaacggccucaccgggaccggcgugcugaccgagagcaacaagaaguuccugccguuccagcaguucgggcgcgacaucgccgacacgaccgacgcgguccgcgacccccagacccuggagauccucgacaucacccccugcagcuucggcgggguguccgugaucacgccgggcaccaacaccagcaaccaggucgccgugcuguaccagggcgugaacugcaccgagguccccguggccauccacgccgaccagcugacgcccaccuggcggguguacuccaccggcagcaacgucuuccagacccgcgccgggugccucaucggcgcggagcacgugaacaacuccuacgagugcgacauccccaucggggccggcaucugcgccagcuaccagacgcagaccaacuccccgcggcgcgcccggagcguggcgucccagagcaucaucgccuacaccaugucccugggcgccgagaacagcgucgccuacuccaacaacagcaucgccauccccaccaacuucacgaucuccgugaccaccgagauccugcccgugagcaugaccaagacgagcgucgacugcaccauguacaucugcggggacuccaccgagugcagcaaccuccugcugcaguacggcuccuucugcacccagcucaaccgcgcgcugacggggaucgccguggagcaggacaagaacacccaggagguguucgcccaggucaagcagaucuacaagacgcccccgaucaaggacuucggcggguucaacuucagccagauccugcccgaccccuccaagcccagcaagcgguccuucaucgaggaccuccuguucaacaaggugacccuggccgacgccggcuucaucaagcaguacggcgacugccucggggacaucgcggcccgcgaccugaucugcgcccagaaguucaacggccugaccgugcucccgccccugcugaccgacgagaugaucgcccaguacaccagcgcccuccuggcggggaccaucacguccggcuggaccuucggggccggcgccgcccugcagauccccuucgcgaugcagauggccuaccgguucaacggcaucggggucacccagaacgugcucuacgagaaccagaagcugaucgccaaccaguucaacagcgccaucggcaagauccaggacucccugagcuccaccgccagcgcgcucgggaagcugcaggacguggucaaccagaacgcccaggcccugaacacgcucgugaagcagcuguccagcaacuucggcgccaucuccagcgugcugaacgacauccucucccgccuggacccgcccgaggccgaggugcagaucgaccggcugaucaccgggcgccuccagagccugcagaccuacgugacccagcagcugauccgggcggccgagauccgcgccagcgccaaccucgccgcgaccaagauguccgagugcguccugggccagagcaagcggguggacuucugcggcaagggguaccaccugauguccuucccccagagcgccccgcacggcguggucuuccuccacgugacguacguccccgcccaggagaagaacuucaccaccgcccccgcgaucugccacgacgggaaggcccacuucccccgcgagggcguguucguguccaacgggacccacugguucgucacgcagcggaacuucuacgagccgcagaucaucaccaccgacaacaccuucgugagcggcaacugcgacguggucaucggcaucgugaacaacacgguguacgacccccugcagcccgagcuggacuccuucaaggaggagcucgacaaguacuucaagaaccacaccagccccgacgucgaccugggggacaucuccggcaucaacgccagcguggugaacauccagaaggagaucgaccgccugaacgaggucgccaagaaccucaacgagucccugaucgaccugcaggagcucgggaaguacgagcaguacaucaaguggccgugguacaucuggcugggcuucaucgccggccugaucgcgaucgugauggugaccaucaugcucugcugcaugaccagcugcugcuccugccugaaggggugcugcagcugcggcuccugcugcaaguucgacgaggacgacagcgagcccguccugaagggggugaagcuccacuacacgugaggacuaguuauaagacugacuagcccgaugggccucccaacgggcccuccuccccuccuugcaccgagauuaaucaaaggcucuuuucagagccaccaaaaaaaaaaaaaaaaaaaaaaaaaaaaaaaaaaaaaaaaaaaaaaaaaaaaaaaaaaaaaaaaaaaaaaaaaaaaaaaaaaaaaaaaaaaaaaaaaaaaa

SEQ ID NO: 24185 - RNA, 4035 nt, Artificial Sequence
  SARS-CoV-2/Wuhan/WIV05/2019__EPI_ISL_402128 spike protein mRNA gc (1-1273)(K986P_V987P_D614G_I692V)
aggagaaagcuuaccauguucguguuccugguccuccugccccuggugagcucccagugcgugaaccucaccacccgcacgcagcugccgcccgccuacaccaacagcuucacccggggcgucuacuaccccgacaagguguuccgcuccagcgugcugcacuccacccaggaccucuuccugcccuucuucagcaacgucacgugguuccacgccauccacguguccgggaccaacggcaccaagcgguucgacaacccggugcugcccuucaacgacggggucuacuucgcgagcaccgagaaguccaacaucauccgcggcuggaucuucgggacgacccucgacagcaagacccagucccugcugaucgugaacaacgccaccaacguggucaucaaggugugcgaguuccaguucugcaacgaccccuuccucggcguguacuaccacaagaacaacaagagcuggauggaguccgaguuccgggucuacagcuccgccaacaacugcacguucgaguacgugagccagcccuuccugauggaccuggagggcaagcaggggaacuucaagaaccuccgcgaguucguguucaagaacaucgacggcuacuucaagaucuacuccaagcacaccccgaucaaccugguccgggaccugccccagggguucagcgcccucgagccccugguggaccugcccaucggcaucaacaucacccgcuuccagacccuccuggcccugcaccgguccuaccucacgccgggggacagcagcuccggcuggaccgcgggcgccgccgccuacuacgugggguaccugcagccccgcaccuuccugcucaaguacaacgagaacggcaccaucacggacgcggucgacugcgcccuggacccccugagcgagaccaagugcacccucaaguccuucaccguggagaaggggaucuaccagacgagcaacuuccgggugcagcccaccgaguccaucguccgcuucccgaacaucaccaaccugugccccuucggcgagguguucaacgccacccgguucgccagcgucuacgccuggaaccgcaagcggaucuccaacugcguggcggacuacagcgugcuguacaacuccgccagcuucuccacguucaagugcuacggcgucagccccaccaagcucaacgaccugugcuucaccaacguguacgccgacuccuucgugauccgcggggacgagguccggcagaucgcccccggccagaccgggaagaucgccgacuacaacuacaagcugccggacgacuucacgggcugcgugaucgcguggaacagcaacaaccucgacuccaaggucgggggcaacuacaacuaccuguaccgccuguuccgcaagagcaaccucaagcccuucgagcgggacaucuccaccgagaucuaccaggccggcagcacccccugcaacgggguggagggcuucaacugcuacuucccccugcaguccuacggguuccagccgaccaacggcgugggguaccagcccuaccggguggucgugcugagcuucgagcuccugcacgcccccgccacggugugcggccccaagaaguccaccaaccuggucaagaacaagugcgugaacuucaacuucaacggccucaccgggaccggcgugcugaccgagagcaacaagaaguuccugccguuccagcaguucgggcgcgacaucgccgacacgaccgacgcgguccgcgacccccagacccuggagauccucgacaucacccccugcagcuucggcgggguguccgugaucacgccgggcaccaacaccagcaaccaggucgccgugcuguaccagggcgugaacugcaccgagguccccguggccauccacgccgaccagcugacgcccaccuggcggguguacuccaccggcagcaacgucuuccagacccgcgccgggugccucaucggcgcggagcacgugaacaacuccuacgagugcgacauccccaucggggccggcaucugcgccagcuaccagacgcagaccaacuccccgcggcgcgcccggagcguggcgucccagagcgucaucgccuacaccaugucccugggcgccgagaacagcgucgccuacuccaacaacagcaucgccauccccaccaacuucacgaucuccgugaccaccgagauccugcccgugagcaugaccaagacgagcgucgacugcaccauguacaucugcggggacuccaccgagugcagcaaccuccugcugcaguacggcuccuucugcacccagcucaaccgcgcgcugacggggaucgccguggagcaggacaagaacacccaggagguguucgcccaggucaagcagaucuacaagacgcccccgaucaaggacuucggcggguucaacuucagccagauccugcccgaccccuccaagcccagcaagcgguccuucaucgaggaccuccuguucaacaaggugacccuggccgacgccggcuucaucaagcaguacggcgacugccucggggacaucgcggcccgcgaccugaucugcgcccagaaguucaacggccugaccgugcucccgccccugcugaccgacgagaugaucgcccaguacaccagcgcccuccuggcggggaccaucacguccggcuggaccuucggggccggcgccgcccugcagauccccuucgcgaugcagauggccuaccgguucaacggcaucggggucacccagaacgugcucuacgagaaccagaagcugaucgccaaccaguucaacagcgccaucggcaagauccaggacucccugagcuccaccgccagcgcgcucgggaagcugcaggacguggucaaccagaacgcccaggcccugaacacgcucgugaagcagcuguccagcaacuucggcgccaucuccagcgugcugaacgacauccucucccgccuggacccgcccgaggccgaggugcagaucgaccggcugaucaccgggcgccuccagagccugcagaccuacgugacccagcagcugauccgggcggccgagauccgcgccagcgccaaccucgccgcgaccaagauguccgagugcguccugggccagagcaagcggguggacuucugcggcaagggguaccaccugauguccuucccccagagcgccccgcacggcguggucuuccuccacgugacguacguccccgcccaggagaagaacuucaccaccgcccccgcgaucugccacgacgggaaggcccacuucccccgcgagggcguguucguguccaacgggacccacugguucgucacgcagcggaacuucuacgagccgcagaucaucaccaccgacaacaccuucgugagcggcaacugcgacguggucaucggcaucgugaacaacacgguguacgacccccugcagcccgagcuggacuccuucaaggaggagcucgacaaguacuucaagaaccacaccagccccgacgucgaccugggggacaucuccggcaucaacgccagcguggugaacauccagaaggagaucgaccgccugaacgaggucgccaagaaccucaacgagucccugaucgaccugcaggagcucgggaaguacgagcaguacaucaaguggccgugguacaucuggcugggcuucaucgccggccugaucgcgaucgugauggugaccaucaugcucugcugcaugaccagcugcugcuccugccugaaggggugcugcagcugcggcuccugcugcaaguucgacgaggacgacagcgagcccguccugaagggggugaagcuccacuacacgugaggacuaguuauaagacugacuagcccgaugggccucccaacgggcccuccuccccuccuugcaccgagauuaaucaaaggcucuuuucagagccaccaaaaaaaaaaaaaaaaaaaaaaaaaaaaaaaaaaaaaaaaaaaaaaaaaaaaaaaaaaaaaaaaaaaaaaaaaaaaaaaaaaaaaaaaaaaaaaaaaaaaa

SEQ ID NO: 24186 - RNA, 4035 nt, Artificial Sequence
  SARS-CoV-2/Wuhan/WIV05/2019__EPI_ISL_402128 spike protein mRNA gc (1-1273)(K986P_V987P_D614G_M1229I)
aggagaaagcuuaccauguucguguuccugguccuccugccccuggugagcucccagugcgugaaccucaccacccgcacgcagcugccgcccgccuacaccaacagcuucacccggggcgucuacuaccccgacaagguguuccgcuccagcgugcugcacuccacccaggaccucuuccugcccuucuucagcaacgucacgugguuccacgccauccacguguccgggaccaacggcaccaagcgguucgacaacccggugcugcccuucaacgacggggucuacuucgcgagcaccgagaaguccaacaucauccgcggcuggaucuucgggacgacccucgacagcaagacccagucccugcugaucgugaacaacgccaccaacguggucaucaaggugugcgaguuccaguucugcaacgaccccuuccucggcguguacuaccacaagaacaacaagagcuggauggaguccgaguuccgggucuacagcuccgccaacaacugcacguucgaguacgugagccagcccuuccugauggaccuggagggcaagcaggggaacuucaagaaccuccgcgaguucguguucaagaacaucgacggcuacuucaagaucuacuccaagcacaccccgaucaaccugguccgggaccugccccagggguucagcgcccucgagccccugguggaccugcccaucggcaucaacaucacccgcuuccagacccuccuggcccugcaccgguccuaccucacgccgggggacagcagcuccggcuggaccgcgggcgccgccgccuacuacgugggguaccugcagccccgcaccuuccugcucaaguacaacgagaacggcaccaucacggacgcggucgacugcgcccuggacccccugagcgagaccaagugcacccucaaguccuucaccguggagaaggggaucuaccagacgagcaacuuccgggugcagcccaccgaguccaucguccgcuucccgaacaucaccaaccugugccccuucggcgagguguucaacgccacccgguucgccagcgucuacgccuggaaccgcaagcggaucuccaacugcguggcggacuacagcgugcuguacaacuccgccagcuucuccacguucaagugcuacggcgucagccccaccaagcucaacgaccugugcuucaccaacguguacgccgacuccuucgugauccgcggggacgagguccggcagaucgcccccggccagaccgggaagaucgccgacuacaacuacaagcugccggacgacuucacgggcugcgugaucgcguggaacagcaacaaccucgacuccaaggucgggggcaacuacaacuaccuguaccgccuguuccgcaagagcaaccucaagcccuucgagcgggacaucuccaccgagaucuaccaggccggcagcacccccugcaacgggguggagggcuucaacugcuacuucccccugcaguccuacggguuccagccgaccaacggcgugggguaccagcccuaccggguggucgugcugagcuucgagcuccugcacgcccccgccacggugugcggccccaagaaguccaccaaccuggucaagaacaagugcgugaacuucaacuucaacggccucaccgggaccggcgugcugaccgagagcaacaagaaguuccugccguuccagcaguucgggcgcgacaucgccgacacgaccgacgcgguccgcgacccccagacccuggagauccucgacaucacccccugcagcuucggcgggguguccgugaucacgccgggcaccaacaccagcaaccaggucgccgugcuguaccagggcgugaacugcaccgagguccccguggccauccacgccgaccagcugacgcccaccuggcggguguacuccaccggcagcaacgucuuccagacccgcgccgggugccucaucggcgcggagcacgugaacaacuccuacgagugcgacauccccaucggggccggcaucugcgccagcuaccagacgcagaccaacuccccgcggcgcgcccggagcguggcgucccagagcaucaucgccuacaccaugucccugggcgccgagaacagcgucgccuacuccaacaacagcaucgccauccccaccaacuucacgaucuccgugaccaccgagauccugcccgugagcaugaccaagacgagcgucgacugcaccauguacaucugcggggacuccaccgagugcagcaaccuccugcugcaguacggcuccuucugcacccagcucaaccgcgcgcugacggggaucgccguggagcaggacaagaacacccaggagguguucgcccaggucaagcagaucuacaagacgcccccgaucaaggacuucggcggguucaacuucagccagauccugcccgaccccuccaagcccagcaagcgguccuucaucgaggaccuccuguucaacaaggugacccuggccgacgccggcuucaucaagcaguacggcgacugccucggggacaucgcggcccgcgaccugaucugcgcccagaaguucaacggccugaccgugcucccgccccugcugaccgacgagaugaucgcccaguacaccagcgcccuccuggcggggaccaucacguccggcuggaccuucggggccggcgccgcccugcagauccccuucgcgaugcagauggccuaccgguucaacggcaucggggucacccagaacgugcucuacgagaaccagaagcugaucgccaaccaguucaacagcgccaucggcaagauccaggacucccugagcuccaccgccagcgcgcucgggaagcugcaggacguggucaaccagaacgcccaggcccugaacacgcucgugaagcagcuguccagcaacuucggcgccaucuccagcgugcugaacgacauccucucccgccuggacccgcccgaggccgaggugcagaucgaccggcugaucaccgggcgccuccagagccugcagaccuacgugacccagcagcugauccgggcggccgagauccgcgccagcgccaaccucgccgcgaccaagauguccgagugcguccugggccagagcaagcggguggacuucugcggcaagggguaccaccugauguccuucccccagagcgccccgcacggcguggucuuccuccacgugacguacguccccgcccaggagaagaacuucaccaccgcccccgcgaucugccacgacgggaaggcccacuucccccgcgagggcguguucguguccaacgggacccacugguucgucacgcagcggaacuucuacgagccgcagaucaucaccaccgacaacaccuucgugagcggcaacugcgacguggucaucggcaucgugaacaacacgguguacgacccccugcagcccgagcuggacuccuucaaggaggagcucgacaaguacuucaagaaccacaccagccccgacgucgaccugggggacaucuccggcaucaacgccagcguggugaacauccagaaggagaucgaccgccugaacgaggucgccaagaaccucaacgagucccugaucgaccugcaggagcucgggaaguacgagcaguacaucaaguggccgugguacaucuggcugggcuucaucgccggccugaucgcgaucgugaucgugaccaucaugcucugcugcaugaccagcugcugcuccugccugaaggggugcugcagcugcggcuccugcugcaaguucgacgaggacgacagcgagcccguccugaagggggugaagcuccacuacacgugaggacuaguuauaagacugacuagcccgaugggccucccaacgggcccuccuccccuccuugcaccgagauuaaucaaaggcucuuuucagagccaccaaaaaaaaaaaaaaaaaaaaaaaaaaaaaaaaaaaaaaaaaaaaaaaaaaaaaaaaaaaaaaaaaaaaaaaaaaaaaaaaaaaaaaaaaaaaaaaaaaaaa

SEQ ID NO: 24187 - RNA, 4029 nt, Artificial Sequence
  SARS-CoV-2/Wuhan/WIV05/2019__EPI_ISL_402128 spike protein mRNA gc (1-1273)(K986P_V987P_H69del_V70del_A222V_Y453F_S477N_D614G_I692V)
aggagaaagcuuaccauguucguguuccugguccuccugccccuggugagcucccagugcgugaaccucaccacccgcacgcagcugccgcccgccuacaccaacagcuucacccggggcgucuacuaccccgacaagguguuccgcuccagcgugcugcacuccacccaggaccucuuccugcccuucuucagcaacgucacgugguuccacgccaucuccgggaccaacggcaccaagcgguucgacaacccggugcugcccuucaacgacggggucuacuucgcgagcaccgagaaguccaacaucauccgcggcuggaucuucgggacgacccucgacagcaagacccagucccugcugaucgugaacaacgccaccaacguggucaucaaggugugcgaguuccaguucugcaacgaccccuuccucggcguguacuaccacaagaacaacaagagcuggauggaguccgaguuccgggucuacagcuccgccaacaacugcacguucgaguacgugagccagcccuuccugauggaccuggagggcaagcaggggaacuucaagaaccuccgcgaguucguguucaagaacaucgacggcuacuucaagaucuacuccaagcacaccccgaucaaccugguccgggaccugccccagggguucagcguccucgagccccugguggaccugcccaucggcaucaacaucacccgcuuccagacccuccuggcccugcaccgguccuaccucacgccgggggacagcagcuccggcuggaccgcgggcgccgccgccuacuacgugggguaccugcagccccgcaccuuccugcucaaguacaacgagaacggcaccaucacggacgcggucgacugcgcccuggacccccugagcgagaccaagugcacccucaaguccuucaccguggagaaggggaucuaccagacgagcaacuuccgggugcagcccaccgaguccaucguccgcuucccgaacaucaccaaccugugccccuucggcgagguguucaacgccacccgguucgccagcgucuacgccuggaaccgcaagcggaucuccaacugcguggcggacuacagcgugcuguacaacuccgccagcuucuccacguucaagugcuacggcgucagccccaccaagcucaacgaccugugcuucaccaacguguacgccgacuccuucgugauccgcggggacgagguccggcagaucgcccccggccagaccgggaagaucgccgacuacaacuacaagcugccggacgacuucacgggcugcgugaucgcguggaacagcaacaaccucgacuccaaggucgggggcaacuacaacuaccuguuccgccuguuccgcaagagcaaccucaagcccuucgagcgggacaucuccaccgagaucuaccaggccggcaacacccccugcaacgggguggagggcuucaacugcuacuucccccugcaguccuacggguuccagccgaccaacggcgugggguaccagcccuaccggguggucgugcugagcuucgagcuccugcacgcccccgccacggugugcggccccaagaaguccaccaaccuggucaagaacaagugcgugaacuucaacuucaacggccucaccgggaccggcgugcugaccgagagcaacaagaaguuccugccguuccagcaguucgggcgcgacaucgccgacacgaccgacgcgguccgcgacccccagacccuggagauccucgacaucacccccugcagcuucggcgggguguccgugaucacgccgggcaccaacaccagcaaccaggucgccgugcuguaccagggcgugaacugcaccgagguccccguggccauccacgccgaccagcugacgcccaccuggcggguguacuccaccggcagcaacgucuuccagacccgcgccgggugccucaucggcgcggagcacgugaacaacuccuacgagugcgacauccccaucggggccggcaucugcgccagcuaccagacgcagaccaacuccccgcggcgcgcccggagcguggcgucccagagcgucaucgccuacaccaugucccugggcgccgagaacagcgucgccuacuccaacaacagcaucgccauccccaccaacuucacgaucuccgugaccaccgagauccugcccgugagcaugaccaagacgagcgucgacugcaccauguacaucugcggggacuccaccgagugcagcaaccuccugcugcaguacggcuccuucugcacccagcucaaccgcgcgcugacggggaucgccguggagcaggacaagaacacccaggagguguucgcccaggucaagcagaucuacaagacgcccccgaucaaggacuucggcggguucaacuucagccagauccugcccgaccccuccaagcccagcaagcgguccuucaucgaggaccuccuguucaacaaggugacccuggccgacgccggcuucaucaagcaguacggcgacugccucggggacaucgcggcccgcgaccugaucugcgcccagaaguucaacggccugaccgugcucccgccccugcugaccgacgagaugaucgcccaguacaccagcgcccuccuggcggggaccaucacguccggcuggaccuucggggccggcgccgcccugcagauccccuucgcgaugcagauggccuaccgguucaacggcaucggggucacccagaacgugcucuacgagaaccagaagcugaucgccaaccaguucaacagcgccaucggcaagauccaggacucccugagcuccaccgccagcgcgcucgggaagcugcaggacguggucaaccagaacgcccaggcccugaacacgcucgugaagcagcuguccagcaacuucggcgccaucuccagcgugcugaacgacauccucucccgccuggacccgcccgaggccgaggugcagaucgaccggcugaucaccgggcgccuccagagccugcagaccuacgugacccagcagcugauccgggcggccgagauccgcgccagcgccaaccucgccgcgaccaagauguccgagugcguccugggccagagcaagcggguggacuucugcggcaagggguaccaccugauguccuucccccagagcgccccgcacggcguggucuuccuccacgugacguacguccccgcccaggagaagaacuucaccaccgcccccgcgaucugccacgacgggaaggcccacuucccccgcgagggcguguucguguccaacgggacccacugguucgucacgcagcggaacuucuacgagccgcagaucaucaccaccgacaacaccuucgugagcggcaacugcgacguggucaucggcaucgugaacaacacgguguacgacccccugcagcccgagcuggacuccuucaaggaggagcucgacaaguacuucaagaaccacaccagccccgacgucgaccugggggacaucuccggcaucaacgccagcguggugaacauccagaaggagaucgaccgccugaacgaggucgccaagaaccucaacgagucccugaucgaccugcaggagcucgggaaguacgagcaguacaucaaguggccgugguacaucuggcugggcuucaucgccggccugaucgcgaucgugauggugaccaucaugcucugcugcaugaccagcugcugcuccugccugaaggggugcugcagcugcggcuccugcugcaaguucgacgaggacgacagcgagcccguccugaagggggugaagcuccacuacacgugaggacuaguuauaagacugacuagcccgaugggccucccaacgggcccuccuccccuccuugcaccgagauuaaucaaaggcucuuuucagagccaccaaaaaaaaaaaaaaaaaaaaaaaaaaaaaaaaaaaaaaaaaaaaaaaaaaaaaaaaaaaaaaaaaaaaaaaaaaaaaaaaaaaaaaaaaaaaaaaaaaaaa

SEQ ID NO: 24188 - RNA, 4029 nt, Artificial Sequence
  SARS-CoV-2/Wuhan/WIV05/2019__EPI_ISL_402128 spike protein mRNA gc (1-1273)(K986P_V987P_H69del_V70del_Y453F_D614G_I692V_M1229I)
aggagaaagcuuaccauguucguguuccugguccuccugccccuggugagcucccagugcgugaaccucaccacccgcacgcagcugccgcccgccuacaccaacagcuucacccggggcgucuacuaccccgacaagguguuccgcuccagcgugcugcacuccacccaggaccucuuccugcccuucuucagcaacgucacgugguuccacgccaucuccgggaccaacggcaccaagcgguucgacaacccggugcugcccuucaacgacggggucuacuucgcgagcaccgagaaguccaacaucauccgcggcuggaucuucgggacgacccucgacagcaagacccagucccugcugaucgugaacaacgccaccaacguggucaucaaggugugcgaguuccaguucugcaacgaccccuuccucggcguguacuaccacaagaacaacaagagcuggauggaguccgaguuccgggucuacagcuccgccaacaacugcacguucgaguacgugagccagcccuuccugauggaccuggagggcaagcaggggaacuucaagaaccuccgcgaguucguguucaagaacaucgacggcuacuucaagaucuacuccaagcacaccccgaucaaccugguccgggaccugccccagggguucagcgcccucgagccccugguggaccugcccaucggcaucaacaucacccgcuuccagacccuccuggcccugcaccgguccuaccucacgccgggggacagcagcuccggcuggaccgcgggcgccgccgccuacuacgugggguaccugcagccccgcaccuuccugcucaaguacaacgagaacggcaccaucacggacgcggucgacugcgcccuggacccccugagcgagaccaagugcacccucaaguccuucaccguggagaaggggaucuaccagacgagcaacuuccgggugcagcccaccgaguccaucguccgcuucccgaacaucaccaaccugugccccuucggcgagguguucaacgccacccgguucgccagcgucuacgccuggaaccgcaagcggaucuccaacugcguggcggacuacagcgugcuguacaacuccgccagcuucuccacguucaagugcuacggcgucagccccaccaagcucaacgaccugugcuucaccaacguguacgccgacuccuucgugauccgcggggacgagguccggcagaucgcccccggccagaccgggaagaucgccgacuacaacuacaagcugccggacgacuucacgggcugcgugaucgcguggaacagcaacaaccucgacuccaaggucgggggcaacuacaacuaccuguuccgccuguuccgcaagagcaaccucaagcccuucgagcgggacaucuccaccgagaucuaccaggccggcagcacccccugcaacgggguggagggcuucaacugcuacuucccccugcaguccuacggguuccagccgaccaacggcgugggguaccagcccuaccggguggucgugcugagcuucgagcuccugcacgcccccgccacggugugcggccccaagaaguccaccaaccuggucaagaacaagugcgugaacuucaacuucaacggccucaccgggaccggcgugcugaccgagagcaacaagaaguuccugccguuccagcaguucgggcgcgacaucgccgacacgaccgacgcgguccgcgacccccagacccuggagauccucgacaucacccccugcagcuucggcgggguguccgugaucacgccgggcaccaacaccagcaaccaggucgccgugcuguaccagggcgugaacugcaccgagguccccguggccauccacgccgaccagcugacgcccaccuggcggguguacuccaccggcagcaacgucuuccagacccgcgccgggugccucaucggcgcggagcacgugaacaacuccuacgagugcgacauccccaucggggccggcaucugcgccagcuaccagacgcagaccaacuccccgcggcgcgcccggagcguggcgucccagagcgugaucgccuacaccaugucccugggcgccgagaacagcgucgccuacuccaacaacagcaucgccauccccaccaacuucacgaucuccgugaccaccgagauccugcccgugagcaugaccaagacgagcgucgacugcaccauguacaucugcggggacuccaccgagugcagcaaccuccugcugcaguacggcuccuucugcacccagcucaaccgcgcgcugacggggaucgccguggagcaggacaagaacacccaggagguguucgcccaggucaagcagaucuacaagacgcccccgaucaaggacuucggcggguucaacuucagccagauccugcccgaccccuccaagcccagcaagcgguccuucaucgaggaccuccuguucaacaaggugacccuggccgacgccggcuucaucaagcaguacggcgacugccucggggacaucgcggcccgcgaccugaucugcgcccagaaguucaacggccugaccgugcucccgccccugcugaccgacgagaugaucgcccaguacaccagcgcccuccuggcggggaccaucacguccggcuggaccuucggggccggcgccgcccugcagauccccuucgcgaugcagauggccuaccgguucaacggcaucggggucacccagaacgugcucuacgagaaccagaagcugaucgccaaccaguucaacagcgccaucggcaagauccaggacucccugagcuccaccgccagcgcgcucgggaagcugcaggacguggucaaccagaacgcccaggcccugaacacgcucgugaagcagcuguccagcaacuucggcgccaucuccagcgugcugaacgacauccucucccgccuggacccgcccgaggccgaggugcagaucgaccggcugaucaccgggcgccuccagagccugcagaccuacgugacccagcagcugauccgggcggccgagauccgcgccagcgccaaccucgccgcgaccaagauguccgagugcguccugggccagagcaagcggguggacuucugcggcaagggguaccaccugauguccuucccccagagcgccccgcacggcguggucuuccuccacgugacguacguccccgcccaggagaagaacuucaccaccgcccccgcgaucugccacgacgggaaggcccacuucccccgcgagggcguguucguguccaacgggacccacugguucgucacgcagcggaacuucuacgagccgcagaucaucaccaccgacaacaccuucgugagcggcaacugcgacguggucaucggcaucgugaacaacacgguguacgacccccugcagcccgagcuggacuccuucaaggaggagcucgacaaguacuucaagaaccacaccagccccgacgucgaccugggggacaucuccggcaucaacgccagcguggugaacauccagaaggagaucgaccgccugaacgaggucgccaagaaccucaacgagucccugaucgaccugcaggagcucgggaaguacgagcaguacaucaaguggccgugguacaucuggcugggcuucaucgccggccugaucgcgaucgugaucgugaccaucaugcucugcugcaugaccagcugcugcuccugccugaaggggugcugcagcugcggcuccugcugcaaguucgacgaggacgacagcgagcccguccugaagggggugaagcuccacuacacgugaggacuaguuauaagacugacuagcccgaugggccucccaacgggcccuccuccccuccuugcaccgagauuaaucaaaggcucuuuucagagccaccaaaaaaaaaaaaaaaaaaaaaaaaaaaaaaaaaaaaaaaaaaaaaaaaaaaaaaaaaaaaaaaaaaaaaaaaaaaaaaaaaaaaaaaaaaaaaaaaaaaaa

SEQ ID NO: 24189 - RNA, 4026 nt, Artificial Sequence
  SARS-CoV-2/Wuhan/WIV05/2019__EPI_ISL_402128 spike protein mRNA gc (1-1273)(K986P_V987P_K986P_V987P_H69del_V70del_Y144del_N501Y_A570 D_D614G_P681H_T716I_S982A_D1118H)
aggagaaagcuuaccauguucguguuccugguccuccugccccuggugagcucccagugcgugaaccucaccacccgcacgcagcugccgcccgccuacaccaacagcuucacccggggcgucuacuaccccgacaagguguuccgcuccagcgugcugcacuccacccaggaccucuuccugcccuucuucagcaacgucacgugguuccacgccaucuccgggaccaacggcaccaagcgguucgacaacccggugcugcccuucaacgacggggucuacuucgcgagcaccgagaaguccaacaucauccgcggcuggaucuucgggacgacccucgacagcaagacccagucccugcugaucgugaacaacgccaccaacguggucaucaaggugugcgaguuccaguucugcaacgaccccuuccucggcguguaccacaagaacaacaagagcuggauggaguccgaguuccgggucuacagcuccgccaacaacugcacguucgaguacgugagccagcccuuccugauggaccuggagggcaagcaggggaacuucaagaaccuccgcgaguucguguucaagaacaucgacggcuacuucaagaucuacuccaagcacaccccgaucaaccugguccgggaccugccccagggguucagcgcccucgagccccugguggaccugcccaucggcaucaacaucacccgcuuccagacccuccuggcccugcaccgguccuaccucacgccgggggacagcagcuccggcuggaccgcgggcgccgccgccuacuacgugggguaccugcagccccgcaccuuccugcucaaguacaacgagaacggcaccaucacggacgcggucgacugcgcccuggacccccugagcgagaccaagugcacccucaaguccuucaccguggagaaggggaucuaccagacgagcaacuuccgggugcagcccaccgaguccaucguccgcuucccgaacaucaccaaccugugccccuucggcgagguguucaacgccacccgguucgccagcgucuacgccuggaaccgcaagcggaucuccaacugcguggcggacuacagcgugcuguacaacuccgccagcuucuccacguucaagugcuacggcgucagccccaccaagcucaacgaccugugcuucaccaacguguacgccgacuccuucgugauccgcggggacgagguccggcagaucgcccccggccagaccgggaagaucgccgacuacaacuacaagcugccggacgacuucacgggcugcgugaucgcguggaacagcaacaaccucgacuccaaggucgggggcaacuacaacuaccuguaccgccuguuccgcaagagcaaccucaagcccuucgagcgggacaucuccaccgagaucuaccaggccggcagcacccccugcaacgggguggagggcuucaacugcuacuucccccugcaguccuacggguuccagccgaccuacggcgugggguaccagcccuaccggguggucgugcugagcuucgagcuccugcacgcccccgccacggugugcggccccaagaaguccaccaaccuggucaagaacaagugcgugaacuucaacuucaacggccucaccgggaccggcgugcugaccgagagcaacaagaaguuccugccguuccagcaguucgggcgcgacaucgacgacacgaccgacgcgguccgcgacccccagacccuggagauccucgacaucacccccugcagcuucggcgggguguccgugaucacgccgggcaccaacaccagcaaccaggucgccgugcuguaccagggcgugaacugcaccgagguccccguggccauccacgccgaccagcugacgcccaccuggcggguguacuccaccggcagcaacgucuuccagacccgcgccgggugccucaucggcgcggagcacgugaacaacuccuacgagugcgacauccccaucggggccggcaucugcgccagcuaccagacgcagaccaacucccaccggcgcgcccggagcguggcgucccagagcaucaucgccuacaccaugucccugggcgccgagaacagcgucgccuacuccaacaacagcaucgccauccccaucaacuucacgaucuccgugaccaccgagauccugcccgugagcaugaccaagacgagcgucgacugcaccauguacaucugcggggacuccaccgagugcagcaaccuccugcugcaguacggcuccuucugcacccagcucaaccgcgcgcugacggggaucgccguggagcaggacaagaacacccaggagguguucgcccaggucaagcagaucuacaagacgcccccgaucaaggacuucggcggguucaacuucagccagauccugcccgaccccuccaagcccagcaagcgguccuucaucgaggaccuccuguucaacaaggugacccuggccgacgccggcuucaucaagcaguacggcgacugccucggggacaucgcggcccgcgaccugaucugcgcccagaaguucaacggccugaccgugcucccgccccugcugaccgacgagaugaucgcccaguacaccagcgcccuccuggcggggaccaucacguccggcuggaccuucggggccggcgccgcccugcagauccccuucgcgaugcagauggccuaccgguucaacggcaucggggucacccagaacgugcucuacgagaaccagaagcugaucgccaaccaguucaacagcgccaucggcaagauccaggacucccugagcuccaccgccagcgcgcucgggaagcugcaggacguggucaaccagaacgcccaggcccugaacacgcucgugaagcagcuguccagcaacuucggcgccaucuccagcgugcugaacgacauccucgcccgccuggacccgcccgaggccgaggugcagaucgaccggcugaucaccgggcgccuccagagccugcagaccuacgugacccagcagcugauccgggcggccgagauccgcgccagcgccaaccucgccgcgaccaagauguccgagugcguccugggccagagcaagcggguggacuucugcggcaagggguaccaccugauguccuucccccagagcgccccgcacggcguggucuuccuccacgugacguacguccccgcccaggagaagaacuucaccaccgcccccgcgaucugccacgacgggaaggcccacuucccccgcgagggcguguucguguccaacgggacccacugguucgucacgcagcggaacuucuacgagccgcagaucaucaccacccacaacaccuucgugagcggcaacugcgacguggucaucggcaucgugaacaacacgguguacgacccccugcagcccgagcuggacuccuucaaggaggagcucgacaaguacuucaagaaccacaccagccccgacgucgaccugggggacaucuccggcaucaacgccagcguggugaacauccagaaggagaucgaccgccugaacgaggucgccaagaaccucaacgagucccugaucgaccugcaggagcucgggaaguacgagcaguacaucaaguggccgugguacaucuggcugggcuucaucgccggccugaucgcgaucgugauggugaccaucaugcucugcugcaugaccagcugcugcuccugccugaaggggugcugcagcugcggcuccugcugcaaguucgacgaggacgacagcgagcccguccugaagggggugaagcuccacuacacgugaggacuaguuauaagacugacuagcccgaugggccucccaacgggcccuccuccccuccuugcaccgagauuaaucaaaggcucuuuucagagccaccaaaaaaaaaaaaaaaaaaaaaaaaaaaaaaaaaaaaaaaaaaaaaaaaaaaaaaaaaaaaaaaaaaaaaaaaaaaaaaaaaaaaaaaaaaaaaaaaaaaaa

SEQ ID NO: 24190 - RNA, 4035 nt, Artificial Sequence
  SARS-CoV-2/Wuhan/WIV05/2019__EPI_ISL_402128 spike protein mRNA gc (1-1273)(K986P_V987P_K986P_V987P_K417N_E484K_N501Y_D614G)
aggagaaagcuuaccauguucguguuccugguccuccugccccuggugagcucccagugcgugaaccucaccacccgcacgcagcugccgcccgccuacaccaacagcuucacccggggcgucuacuaccccgacaagguguuccgcuccagcgugcugcacuccacccaggaccucuuccugcccuucuucagcaacgucacgugguuccacgccauccacguguccgggaccaacggcaccaagcgguucgacaacccggugcugcccuucaacgacggggucuacuucgcgagcaccgagaaguccaacaucauccgcggcuggaucuucgggacgacccucgacagcaagacccagucccugcugaucgugaacaacgccaccaacguggucaucaaggugugcgaguuccaguucugcaacgaccccuuccucggcguguacuaccacaagaacaacaagagcuggauggaguccgaguuccgggucuacagcuccgccaacaacugcacguucgaguacgugagccagcccuuccugauggaccuggagggcaagcaggggaacuucaagaaccuccgcgaguucguguucaagaacaucgacggcuacuucaagaucuacuccaagcacaccccgaucaaccugguccgggaccugccccagggguucagcgcccucgagccccugguggaccugcccaucggcaucaacaucacccgcuuccagacccuccuggcccugcaccgguccuaccucacgccgggggacagcagcuccggcuggaccgcgggcgccgccgccuacuacgugggguaccugcagccccgcaccuuccugcucaaguacaacgagaacggcaccaucacggacgcggucgacugcgcccuggacccccugagcgagaccaagugcacccucaaguccuucaccguggagaaggggaucuaccagacgagcaacuuccgggugcagcccaccgaguccaucguccgcuucccgaacaucaccaaccugugccccuucggcgagguguucaacgccacccgguucgccagcgucuacgccuggaaccgcaagcggaucuccaacugcguggcggacuacagcgugcuguacaacuccgccagcuucuccacguucaagugcuacggcgucagccccaccaagcucaacgaccugugcuucaccaacguguacgccgacuccuucgugauccgcggggacgagguccggcagaucgcccccggccagaccgggaacaucgccgacuacaacuacaagcugccggacgacuucacgggcugcgugaucgcguggaacagcaacaaccucgacuccaaggucgggggcaacuacaacuaccuguaccgccuguuccgcaagagcaaccucaagcccuucgagcgggacaucuccaccgagaucuaccaggccggcagcacccccugcaacggggugaagggcuucaacugcuacuucccccugcaguccuacggguuccagccgaccuacggcgugggguaccagcccuaccggguggucgugcugagcuucgagcuccugcacgcccccgccacggugugcggccccaagaaguccaccaaccuggucaagaacaagugcgugaacuucaacuucaacggccucaccgggaccggcgugcugaccgagagcaacaagaaguuccugccguuccagcaguucgggcgcgacaucgccgacacgaccgacgcgguccgcgacccccagacccuggagauccucgacaucacccccugcagcuucggcgggguguccgugaucacgccgggcaccaacaccagcaaccaggucgccgugcuguaccagggcgugaacugcaccgagguccccguggccauccacgccgaccagcugacgcccaccuggcggguguacuccaccggcagcaacgucuuccagacccgcgccgggugccucaucggcgcggagcacgugaacaacuccuacgagugcgacauccccaucggggccggcaucugcgccagcuaccagacgcagaccaacuccccgcggcgcgcccggagcguggcgucccagagcaucaucgccuacaccaugucccugggcgccgagaacagcgucgccuacuccaacaacagcaucgccauccccaccaacuucacgaucuccgugaccaccgagauccugcccgugagcaugaccaagacgagcgucgacugcaccauguacaucugcggggacuccaccgagugcagcaaccuccugcugcaguacggcuccuucugcacccagcucaaccgcgcgcugacggggaucgccguggagcaggacaagaacacccaggagguguucgcccaggucaagcagaucuacaagacgcccccgaucaaggacuucggcggguucaacuucagccagauccugcccgaccccuccaagcccagcaagcgguccuucaucgaggaccuccuguucaacaaggugacccuggccgacgccggcuucaucaagcaguacggcgacugccucggggacaucgcggcccgcgaccugaucugcgcccagaaguucaacggccugaccgugcucccgccccugcugaccgacgagaugaucgcccaguacaccagcgcccuccuggcggggaccaucacguccggcuggaccuucggggccggcgccgcccugcagauccccuucgcgaugcagauggccuaccgguucaacggcaucggggucacccagaacgugcucuacgagaaccagaagcugaucgccaaccaguucaacagcgccaucggcaagauccaggacucccugagcuccaccgccagcgcgcucgggaagcugcaggacguggucaaccagaacgcccaggcccugaacacgcucgugaagcagcuguccagcaacuucggcgccaucuccagcgugcugaacgacauccucucccgccuggacccgcccgaggccgaggugcagaucgaccggcugaucaccgggcgccuccagagccugcagaccuacgugacccagcagcugauccgggcggccgagauccgcgccagcgccaaccucgccgcgaccaagauguccgagugcguccugggccagagcaagcggguggacuucugcggcaagggguaccaccugauguccuucccccagagcgccccgcacggcguggucuuccuccacgugacguacguccccgcccaggagaagaacuucaccaccgcccccgcgaucugccacgacgggaaggcccacuucccccgcgagggcguguucguguccaacgggacccacugguucgucacgcagcggaacuucuacgagccgcagaucaucaccaccgacaacaccuucgugagcggcaacugcgacguggucaucggcaucgugaacaacacgguguacgacccccugcagcccgagcuggacuccuucaaggaggagcucgacaaguacuucaagaaccacaccagccccgacgucgaccugggggacaucuccggcaucaacgccagcguggugaacauccagaaggagaucgaccgccugaacgaggucgccaagaaccucaacgagucccugaucgaccugcaggagcucgggaaguacgagcaguacaucaaguggccgugguacaucuggcugggcuucaucgccggccugaucgcgaucgugauggugaccaucaugcucugcugcaugaccagcugcugcuccugccugaaggggugcugcagcugcggcuccugcugcaaguucgacgaggacgacagcgagcccguccugaagggggugaagcuccacuacacgugaggacuaguuauaagacugacuagcccgaugggccucccaacgggcccuccuccccuccuugcaccgagauuaaucaaaggcucuuuucagagccaccaaaaaaaaaaaaaaaaaaaaaaaaaaaaaaaaaaaaaaaaaaaaaaaaaaaaaaaaaaaaaaaaaaaaaaaaaaaaaaaaaaaaaaaaaaaaaaaaaaaaa

SEQ ID NO: 24191 - RNA, 4026 nt, Artificial Sequence
  SARS-CoV-2/Wuhan/WIV05/2019__EPI_ISL_402128 spike protein mRNA gc (1-1273)(K986P_V987P_K986P_V987P_L18F_D80A_D215G_L242del_A243del_ L244del_R246I_K417N_E484K_N501Y_D614G_A701V)
aggagaaagcuuaccauguucguguuccugguccuccugccccuggugagcucccagugcgugaacuucaccacccgcacgcagcugccgcccgccuacaccaacagcuucacccggggcgucuacuaccccgacaagguguuccgcuccagcgugcugcacuccacccaggaccucuuccugcccuucuucagcaacgucacgugguuccacgccauccacguguccgggaccaacggcaccaagcgguucgccaacccggugcugcccuucaacgacggggucuacuucgcgagcaccgagaaguccaacaucauccgcggcuggaucuucgggacgacccucgacagcaagacccagucccugcugaucgugaacaacgccaccaacguggucaucaaggugugcgaguuccaguucugcaacgaccccuuccucggcguguacuaccacaagaacaacaagagcuggauggaguccgaguuccgggucuacagcuccgccaacaacugcacguucgaguacgugagccagcccuuccugauggaccuggagggcaagcaggggaacuucaagaaccuccgcgaguucguguucaagaacaucgacggcuacuucaagaucuacuccaagcacaccccgaucaaccugguccggggccugccccagggguucagcgcccucgagccccugguggaccugcccaucggcaucaacaucacccgcuuccagacccuccacaucuccuaccucacgccgggggacagcagcuccggcuggaccgcgggcgccgccgccuacuacgugggguaccugcagccccgcaccuuccugcucaaguacaacgagaacggcaccaucacggacgcggucgacugcgcccuggacccccugagcgagaccaagugcacccucaaguccuucaccguggagaaggggaucuaccagacgagcaacuuccgggugcagcccaccgaguccaucguccgcuucccgaacaucaccaaccugugccccuucggcgagguguucaacgccacccgguucgccagcgucuacgccuggaaccgcaagcggaucuccaacugcguggcggacuacagcgugcuguacaacuccgccagcuucuccacguucaagugcuacggcgucagccccaccaagcucaacgaccugugcuucaccaacguguacgccgacuccuucgugauccgcggggacgagguccggcagaucgcccccggccagaccgggaacaucgccgacuacaacuacaagcugccggacgacuucacgggcugcgugaucgcguggaacagcaacaaccucgacuccaaggucgggggcaacuacaacuaccuguaccgccuguuccgcaagagcaaccucaagcccuucgagcgggacaucuccaccgagaucuaccaggccggcagcacccccugcaacggggugaagggcuucaacugcuacuucccccugcaguccuacggguuccagccgaccuacggcgugggguaccagcccuaccggguggucgugcugagcuucgagcuccugcacgcccccgccacggugugcggccccaagaaguccaccaaccuggucaagaacaagugcgugaacuucaacuucaacggccucaccgggaccggcgugcugaccgagagcaacaagaaguuccugccguuccagcaguucgggcgcgacaucgccgacacgaccgacgcgguccgcgacccccagacccuggagauccucgacaucacccccugcagcuucggcgggguguccgugaucacgccgggcaccaacaccagcaaccaggucgccgugcuguaccagggcgugaacugcaccgagguccccguggccauccacgccgaccagcugacgcccaccuggcggguguacuccaccggcagcaacgucuuccagacccgcgccgggugccucaucggcgcggagcacgugaacaacuccuacgagugcgacauccccaucggggccggcaucugcgccagcuaccagacgcagaccaacuccccgcggcgcgcccggagcguggcgucccagagcaucaucgccuacaccaugucccugggcguggagaacagcgucgccuacuccaacaacagcaucgccauccccaccaacuucacgaucuccgugaccaccgagauccugcccgugagcaugaccaagacgagcgucgacugcaccauguacaucugcggggacuccaccgagugcagcaaccuccugcugcaguacggcuccuucugcacccagcucaaccgcgcgcugacggggaucgccguggagcaggacaagaacacccaggagguguucgcccaggucaagcagaucuacaagacgcccccgaucaaggacuucggcggguucaacuucagccagauccugcccgaccccuccaagcccagcaagcgguccuucaucgaggaccuccuguucaacaaggugacccuggccgacgccggcuucaucaagcaguacggcgacugccucggggacaucgcggcccgcgaccugaucugcgcccagaaguucaacggccugaccgugcucccgccccugcugaccgacgagaugaucgcccaguacaccagcgcccuccuggcggggaccaucacguccggcuggaccuucggggccggcgccgcccugcagauccccuucgcgaugcagauggccuaccgguucaacggcaucggggucacccagaacgugcucuacgagaaccagaagcugaucgccaaccaguucaacagcgccaucggcaagauccaggacucccugagcuccaccgccagcgcgcucgggaagcugcaggacguggucaaccagaacgcccaggcccugaacacgcucgugaagcagcuguccagcaacuucggcgccaucuccagcgugcugaacgacauccucucccgccuggacccgcccgaggccgaggugcagaucgaccggcugaucaccgggcgccuccagagccugcagaccuacgugacccagcagcugauccgggcggccgagauccgcgccagcgccaaccucgccgcgaccaagauguccgagugcguccugggccagagcaagcggguggacuucugcggcaagggguaccaccugauguccuucccccagagcgccccgcacggcguggucuuccuccacgugacguacguccccgcccaggagaagaacuucaccaccgcccccgcgaucugccacgacgggaaggcccacuucccccgcgagggcguguucguguccaacgggacccacugguucgucacgcagcggaacuucuacgagccgcagaucaucaccaccgacaacaccuucgugagcggcaacugcgacguggucaucggcaucgugaacaacacgguguacgacccccugcagcccgagcuggacuccuucaaggaggagcucgacaaguacuucaagaaccacaccagccccgacgucgaccugggggacaucuccggcaucaacgccagcguggugaacauccagaaggagaucgaccgccugaacgaggucgccaagaaccucaacgagucccugaucgaccugcaggagcucgggaaguacgagcaguacaucaaguggccgugguacaucuggcugggcuucaucgccggccugaucgcgaucgugauggugaccaucaugcucugcugcaugaccagcugcugcuccugccugaaggggugcugcagcugcggcuccugcugcaaguucgacgaggacgacagcgagcccguccugaagggggugaagcuccacuacacgugaggacuaguuauaagacugacuagcccgaugggccucccaacgggcccuccuccccuccuugcaccgagauuaaucaaaggcucuuuucagagccaccaaaaaaaaaaaaaaaaaaaaaaaaaaaaaaaaaaaaaaaaaaaaaaaaaaaaaaaaaaaaaaaaaaaaaaaaaaaaaaaaaaaaaaaaaaaaaaaaaaaaa

SEQ ID NO: 24192 - RNA, 4035 nt, Artificial Sequence
  SARS-CoV-2/Wuhan/WIV05/2019__EPI_ISL_402128 spike protein mRNA gc (1-1273)(K986P_V987P_K986P_V987P_E484K_D614G)
aggagaaagcuuaccauguucguguuccugguccuccugccccuggugagcucccagugcgugaaccucaccacccgcacgcagcugccgcccgccuacaccaacagcuucacccggggcgucuacuaccccgacaagguguuccgcuccagcgugcugcacuccacccaggaccucuuccugcccuucuucagcaacgucacgugguuccacgccauccacguguccgggaccaacggcaccaagcgguucgacaacccggugcugcccuucaacgacggggucuacuucgcgagcaccgagaaguccaacaucauccgcggcuggaucuucgggacgacccucgacagcaagacccagucccugcugaucgugaacaacgccaccaacguggucaucaaggugugcgaguuccaguucugcaacgaccccuuccucggcguguacuaccacaagaacaacaagagcuggauggaguccgaguuccgggucuacagcuccgccaacaacugcacguucgaguacgugagccagcccuuccugauggaccuggagggcaagcaggggaacuucaagaaccuccgcgaguucguguucaagaacaucgacggcuacuucaagaucuacuccaagcacaccccgaucaaccugguccgggaccugccccagggguucagcgcccucgagccccugguggaccugcccaucggcaucaacaucacccgcuuccagacccuccuggcccugcaccgguccuaccucacgccgggggacagcagcuccggcuggaccgcgggcgccgccgccuacuacgugggguaccugcagccccgcaccuuccugcucaaguacaacgagaacggcaccaucacggacgcggucgacugcgcccuggacccccugagcgagaccaagugcacccucaaguccuucaccguggagaaggggaucuaccagacgagcaacuuccgggugcagcccaccgaguccaucguccgcuucccgaacaucaccaaccugugccccuucggcgagguguucaacgccacccgguucgccagcgucuacgccuggaaccgcaagcggaucuccaacugcguggcggacuacagcgugcuguacaacuccgccagcuucuccacguucaagugcuacggcgucagccccaccaagcucaacgaccugugcuucaccaacguguacgccgacuccuucgugauccgcggggacgagguccggcagaucgcccccggccagaccgggaagaucgccgacuacaacuacaagcugccggacgacuucacgggcugcgugaucgcguggaacagcaacaaccucgacuccaaggucgggggcaacuacaacuaccuguaccgccuguuccgcaagagcaaccucaagcccuucgagcgggacaucuccaccgagaucuaccaggccggcagcacccccugcaacggggugaagggcuucaacugcuacuucccccugcaguccuacggguuccagccgaccaacggcgugggguaccagcccuaccggguggucgugcugagcuucgagcuccugcacgcccccgccacggugugcggccccaagaaguccaccaaccuggucaagaacaagugcgugaacuucaacuucaacggccucaccgggaccggcgugcugaccgagagcaacaagaaguuccugccguuccagcaguucgggcgcgacaucgccgacacgaccgacgcgguccgcgacccccagacccuggagauccucgacaucacccccugcagcuucggcgggguguccgugaucacgccgggcaccaacaccagcaaccaggucgccgugcuguaccagggcgugaacugcaccgagguccccguggccauccacgccgaccagcugacgcccaccuggcggguguacuccaccggcagcaacgucuuccagacccgcgccgggugccucaucggcgcggagcacgugaacaacuccuacgagugcgacauccccaucggggccggcaucugcgccagcuaccagacgcagaccaacuccccgcggcgcgcccggagcguggcgucccagagcaucaucgccuacaccaugucccugggcgccgagaacagcgucgccuacuccaacaacagcaucgccauccccaccaacuucacgaucuccgugaccaccgagauccugcccgugagcaugaccaagacgagcgucgacugcaccauguacaucugcggggacuccaccgagugcagcaaccuccugcugcaguacggcuccuucugcacccagcucaaccgcgcgcugacggggaucgccguggagcaggacaagaacacccaggagguguucgcccaggucaagcagaucuacaagacgcccccgaucaaggacuucggcggguucaacuucagccagauccugcccgaccccuccaagcccagcaagcgguccuucaucgaggaccuccuguucaacaaggugacccuggccgacgccggcuucaucaagcaguacggcgacugccucggggacaucgcggcccgcgaccugaucugcgcccagaaguucaacggccugaccgugcucccgccccugcugaccgacgagaugaucgcccaguacaccagcgcccuccuggcggggaccaucacguccggcuggaccuucggggccggcgccgcccugcagauccccuucgcgaugcagauggccuaccgguucaacggcaucggggucacccagaacgugcucuacgagaaccagaagcugaucgccaaccaguucaacagcgccaucggcaagauccaggacucccugagcuccaccgccagcgcgcucgggaagcugcaggacguggucaaccagaacgcccaggcccugaacacgcucgugaagcagcuguccagcaacuucggcgccaucuccagcgugcugaacgacauccucucccgccuggacccgcccgaggccgaggugcagaucgaccggcugaucaccgggcgccuccagagccugcagaccuacgugacccagcagcugauccgggcggccgagauccgcgccagcgccaaccucgccgcgaccaagauguccgagugcguccugggccagagcaagcggguggacuucugcggcaagggguaccaccugauguccuucccccagagcgccccgcacggcguggucuuccuccacgugacguacguccccgcccaggagaagaacuucaccaccgcccccgcgaucugccacgacgggaaggcccacuucccccgcgagggcguguucguguccaacgggacccacugguucgucacgcagcggaacuucuacgagccgcagaucaucaccaccgacaacaccuucgugagcggcaacugcgacguggucaucggcaucgugaacaacacgguguacgacccccugcagcccgagcuggacuccuucaaggaggagcucgacaaguacuucaagaaccacaccagccccgacgucgaccugggggacaucuccggcaucaacgccagcguggugaacauccagaaggagaucgaccgccugaacgaggucgccaagaaccucaacgagucccugaucgaccugcaggagcucgggaaguacgagcaguacaucaaguggccgugguacaucuggcugggcuucaucgccggccugaucgcgaucgugauggugaccaucaugcucugcugcaugaccagcugcugcuccugccugaaggggugcugcagcugcggcuccugcugcaaguucgacgaggacgacagcgagcccguccugaagggggugaagcuccacuacacgugaggacuaguuauaagacugacuagcccgaugggccucccaacgggcccuccuccccuccuugcaccgagauuaaucaaaggcucuuuucagagccaccaaaaaaaaaaaaaaaaaaaaaaaaaaaaaaaaaaaaaaaaaaaaaaaaaaaaaaaaaaaaaaaaaaaaaaaaaaaaaaaaaaaaaaaaaaaaaaaaaaaaa

SEQ ID NO: 24193 - RNA, 4035 nt, Artificial Sequence
  SARS-CoV-2/Wuhan/WIV05/2019__EPI_ISL_402128 spike protein mRNA gc (1-1273)(K986P_V987P_K986P_V987P_L18F_T20N_P26S_D138Y_R190S_K417T _E484K_N501Y_D614G_H655Y_T1027I)
aggagaaagcuuaccauguucguguuccugguccuccugccccuggugagcucccagugcgugaacuucaccaaccgcacgcagcugccgagcgccuacaccaacagcuucacccggggcgucuacuaccccgacaagguguuccgcuccagcgugcugcacuccacccaggaccucuuccugcccuucuucagcaacgucacgugguuccacgccauccacguguccgggaccaacggcaccaagcgguucgacaacccggugcugcccuucaacgacggggucuacuucgcgagcaccgagaaguccaacaucauccgcggcuggaucuucgggacgacccucgacagcaagacccagucccugcugaucgugaacaacgccaccaacguggucaucaaggugugcgaguuccaguucugcaacuaccccuuccucggcguguacuaccacaagaacaacaagagcuggauggaguccgaguuccgggucuacagcuccgccaacaacugcacguucgaguacgugagccagcccuuccugauggaccuggagggcaagcaggggaacuucaagaaccucagcgaguucguguucaagaacaucgacggcuacuucaagaucuacuccaagcacaccccgaucaaccugguccgggaccugccccagggguucagcgcccucgagccccugguggaccugcccaucggcaucaacaucacccgcuuccagacccuccuggcccugcaccgguccuaccucacgccgggggacagcagcuccggcuggaccgcgggcgccgccgccuacuacgugggguaccugcagccccgcaccuuccugcucaaguacaacgagaacggcaccaucacggacgcggucgacugcgcccuggacccccugagcgagaccaagugcacccucaaguccuucaccguggagaaggggaucuaccagacgagcaacuuccgggugcagcccaccgaguccaucguccgcuucccgaacaucaccaaccugugccccuucggcgagguguucaacgccacccgguucgccagcgucuacgccuggaaccgcaagcggaucuccaacugcguggcggacuacagcgugcuguacaacuccgccagcuucuccacguucaagugcuacggcgucagccccaccaagcucaacgaccugugcuucaccaacguguacgccgacuccuucgugauccgcggggacgagguccggcagaucgcccccggccagaccgggaccaucgccgacuacaacuacaagcugccggacgacuucacgggcugcgugaucgcguggaacagcaacaaccucgacuccaaggucgggggcaacuacaacuaccuguaccgccuguuccgcaagagcaaccucaagcccuucgagcgggacaucuccaccgagaucuaccaggccggcagcacccccugcaacggggugaagggcuucaacugcuacuucccccugcaguccuacggguuccagccgaccuacggcgugggguaccagcccuaccggguggucgugcugagcuucgagcuccugcacgcccccgccacggugugcggccccaagaaguccaccaaccuggucaagaacaagugcgugaacuucaacuucaacggccucaccgggaccggcgugcugaccgagagcaacaagaaguuccugccguuccagcaguucgggcgcgacaucgccgacacgaccgacgcgguccgcgacccccagacccuggagauccucgacaucacccccugcagcuucggcgggguguccgugaucacgccgggcaccaacaccagcaaccaggucgccgugcuguaccagggcgugaacugcaccgagguccccguggccauccacgccgaccagcugacgcccaccuggcggguguacuccaccggcagcaacgucuuccagacccgcgccgggugccucaucggcgcggaguacgugaacaacuccuacgagugcgacauccccaucggggccggcaucugcgccagcuaccagacgcagaccaacuccccgcggcgcgcccggagcguggcgucccagagcaucaucgccuacaccaugucccugggcgccgagaacagcgucgccuacuccaacaacagcaucgccauccccaccaacuucacgaucuccgugaccaccgagauccugcccgugagcaugaccaagacgagcgucgacugcaccauguacaucugcggggacuccaccgagugcagcaaccuccugcugcaguacggcuccuucugcacccagcucaaccgcgcgcugacggggaucgccguggagcaggacaagaacacccaggagguguucgcccaggucaagcagaucuacaagacgcccccgaucaaggacuucggcggguucaacuucagccagauccugcccgaccccuccaagcccagcaagcgguccuucaucgaggaccuccuguucaacaaggugacccuggccgacgccggcuucaucaagcaguacggcgacugccucggggacaucgcggcccgcgaccugaucugcgcccagaaguucaacggccugaccgugcucccgccccugcugaccgacgagaugaucgcccaguacaccagcgcccuccuggcggggaccaucacguccggcuggaccuucggggccggcgccgcccugcagauccccuucgcgaugcagauggccuaccgguucaacggcaucggggucacccagaacgugcucuacgagaaccagaagcugaucgccaaccaguucaacagcgccaucggcaagauccaggacucccugagcuccaccgccagcgcgcucgggaagcugcaggacguggucaaccagaacgcccaggcccugaacacgcucgugaagcagcuguccagcaacuucggcgccaucuccagcgugcugaacgacauccucucccgccuggacccgcccgaggccgaggugcagaucgaccggcugaucaccgggcgccuccagagccugcagaccuacgugacccagcagcugauccgggcggccgagauccgcgccagcgccaaccucgccgcgaucaagauguccgagugcguccugggccagagcaagcggguggacuucugcggcaagggguaccaccugauguccuucccccagagcgccccgcacggcguggucuuccuccacgugacguacguccccgcccaggagaagaacuucaccaccgcccccgcgaucugccacgacgggaaggcccacuucccccgcgagggcguguucguguccaacgggacccacugguucgucacgcagcggaacuucuacgagccgcagaucaucaccaccgacaacaccuucgugagcggcaacugcgacguggucaucggcaucgugaacaacacgguguacgacccccugcagcccgagcuggacuccuucaaggaggagcucgacaaguacuucaagaaccacaccagccccgacgucgaccugggggacaucuccggcaucaacgccagcguggugaacauccagaaggagaucgaccgccugaacgaggucgccaagaaccucaacgagucccugaucgaccugcaggagcucgggaaguacgagcaguacaucaaguggccgugguacaucuggcugggcuucaucgccggccugaucgcgaucgugauggugaccaucaugcucugcugcaugaccagcugcugcuccugccugaaggggugcugcagcugcggcuccugcugcaaguucgacgaggacgacagcgagcccguccugaagggggugaagcuccacuacacgugaggacuaguuauaagacugacuagcccgaugggccucccaacgggcccuccuccccuccuugcaccgagauuaaucaaaggcucuuuucagagccaccaaaaaaaaaaaaaaaaaaaaaaaaaaaaaaaaaaaaaaaaaaaaaaaaaaaaaaaaaaaaaaaaaaaaaaaaaaaaaaaaaaaaaaaaaaaaaaaaaaaaa

SEQ ID NO: 24194 - RNA, 4035 nt, Artificial Sequence
  SARS-CoV-2/Wuhan/WIV05/2019__EPI_ISL_402128 spike protein mRNA gc (1-1273)(K986P_V987P_K986P_V987P_S13I_W152C_L452R_D614G)
aggagaaagcuuaccauguucguguuccugguccuccugccccuggugagcauccagugcgugaaccucaccacccgcacgcagcugccgcccgccuacaccaacagcuucacccggggcgucuacuaccccgacaagguguuccgcuccagcgugcugcacuccacccaggaccucuuccugcccuucuucagcaacgucacgugguuccacgccauccacguguccgggaccaacggcaccaagcgguucgacaacccggugcugcccuucaacgacggggucuacuucgcgagcaccgagaaguccaacaucauccgcggcuggaucuucgggacgacccucgacagcaagacccagucccugcugaucgugaacaacgccaccaacguggucaucaaggugugcgaguuccaguucugcaacgaccccuuccucggcguguacuaccacaagaacaacaagagcugcauggaguccgaguuccgggucuacagcuccgccaacaacugcacguucgaguacgugagccagcccuuccugauggaccuggagggcaagcaggggaacuucaagaaccuccgcgaguucguguucaagaacaucgacggcuacuucaagaucuacuccaagcacaccccgaucaaccugguccgggaccugccccagggguucagcgcccucgagccccugguggaccugcccaucggcaucaacaucacccgcuuccagacccuccuggcccugcaccgguccuaccucacgccgggggacagcagcuccggcuggaccgcgggcgccgccgccuacuacgugggguaccugcagccccgcaccuuccugcucaaguacaacgagaacggcaccaucacggacgcggucgacugcgcccuggacccccugagcgagaccaagugcacccucaaguccuucaccguggagaaggggaucuaccagacgagcaacuuccgggugcagcccaccgaguccaucguccgcuucccgaacaucaccaaccugugccccuucggcgagguguucaacgccacccgguucgccagcgucuacgccuggaaccgcaagcggaucuccaacugcguggcggacuacagcgugcuguacaacuccgccagcuucuccacguucaagugcuacggcgucagccccaccaagcucaacgaccugugcuucaccaacguguacgccgacuccuucgugauccgcggggacgagguccggcagaucgcccccggccagaccgggaagaucgccgacuacaacuacaagcugccggacgacuucacgggcugcgugaucgcguggaacagcaacaaccucgacuccaaggucgggggcaacuacaacuaccgcuaccgccuguuccgcaagagcaaccucaagcccuucgagcgggacaucuccaccgagaucuaccaggccggcagcacccccugcaacgggguggagggcuucaacugcuacuucccccugcaguccuacggguuccagccgaccaacggcgugggguaccagcccuaccggguggucgugcugagcuucgagcuccugcacgcccccgccacggugugcggccccaagaaguccaccaaccuggucaagaacaagugcgugaacuucaacuucaacggccucaccgggaccggcgugcugaccgagagcaacaagaaguuccugccguuccagcaguucgggcgcgacaucgccgacacgaccgacgcgguccgcgacccccagacccuggagauccucgacaucacccccugcagcuucggcgggguguccgugaucacgccgggcaccaacaccagcaaccaggucgccgugcuguaccagggcgugaacugcaccgagguccccguggccauccacgccgaccagcugacgcccaccuggcggguguacuccaccggcagcaacgucuuccagacccgcgccgggugccucaucggcgcggagcacgugaacaacuccuacgagugcgacauccccaucggggccggcaucugcgccagcuaccagacgcagaccaacuccccgcggcgcgcccggagcguggcgucccagagcaucaucgccuacaccaugucccugggcgccgagaacagcgucgccuacuccaacaacagcaucgccauccccaccaacuucacgaucuccgugaccaccgagauccugcccgugagcaugaccaagacgagcgucgacugcaccauguacaucugcggggacuccaccgagugcagcaaccuccugcugcaguacggcuccuucugcacccagcucaaccgcgcgcugacggggaucgccguggagcaggacaagaacacccaggagguguucgcccaggucaagcagaucuacaagacgcccccgaucaaggacuucggcggguucaacuucagccagauccugcccgaccccuccaagcccagcaagcgguccuucaucgaggaccuccuguucaacaaggugacccuggccgacgccggcuucaucaagcaguacggcgacugccucggggacaucgcggcccgcgaccugaucugcgcccagaaguucaacggccugaccgugcucccgccccugcugaccgacgagaugaucgcccaguacaccagcgcccuccuggcggggaccaucacguccggcuggaccuucggggccggcgccgcccugcagauccccuucgcgaugcagauggccuaccgguucaacggcaucggggucacccagaacgugcucuacgagaaccagaagcugaucgccaaccaguucaacagcgccaucggcaagauccaggacucccugagcuccaccgccagcgcgcucgggaagcugcaggacguggucaaccagaacgcccaggcccugaacacgcucgugaagcagcuguccagcaacuucggcgccaucuccagcgugcugaacgacauccucucccgccuggacccgcccgaggccgaggugcagaucgaccggcugaucaccgggcgccuccagagccugcagaccuacgugacccagcagcugauccgggcggccgagauccgcgccagcgccaaccucgccgcgaccaagauguccgagugcguccugggccagagcaagcggguggacuucugcggcaagggguaccaccugauguccuucccccagagcgccccgcacggcguggucuuccuccacgugacguacguccccgcccaggagaagaacuucaccaccgcccccgcgaucugccacgacgggaaggcccacuucccccgcgagggcguguucguguccaacgggacccacugguucgucacgcagcggaacuucuacgagccgcagaucaucaccaccgacaacaccuucgugagcggcaacugcgacguggucaucggcaucgugaacaacacgguguacgacccccugcagcccgagcuggacuccuucaaggaggagcucgacaaguacuucaagaaccacaccagccccgacgucgaccugggggacaucuccggcaucaacgccagcguggugaacauccagaaggagaucgaccgccugaacgaggucgccaagaaccucaacgagucccugaucgaccugcaggagcucgggaaguacgagcaguacaucaaguggccgugguacaucuggcugggcuucaucgccggccugaucgcgaucgugauggugaccaucaugcucugcugcaugaccagcugcugcuccugccugaaggggugcugcagcugcggcuccugcugcaaguucgacgaggacgacagcgagcccguccugaagggggugaagcuccacuacacgugaggacuaguuauaagacugacuagcccgaugggccucccaacgggcccuccuccccuccuugcaccgagauuaaucaaaggcucuuuucagagccaccaaaaaaaaaaaaaaaaaaaaaaaaaaaaaaaaaaaaaaaaaaaaaaaaaaaaaaaaaaaaaaaaaaaaaaaaaaaaaaaaaaaaaaaaaaaaaaaaaaaaa

SEQ ID NO: 24195 - RNA, 4035 nt, Artificial Sequence
  SARS-CoV-2/Wuhan/WIV05/2019__EPI_ISL_402128 spike protein mRNA gc (1-1273)(K986P_V987P)
aggagaaagcuuaccauguucguguuccugguccuccugccccuggugagcucccagugcgugaaccucaccacccgcacgcagcugccgcccgccuacaccaacagcuucacccggggcgucuacuaccccgacaagguguuccgcuccagcgugcugcacuccacccaggaccucuuccugcccuucuucagcaacgucacgugguuccacgccauccacguguccgggaccaacggcaccaagcgguucgacaacccggugcugcccuucaacgacggggucuacuucgcgagcaccgagaaguccaacaucauccgcggcuggaucuucgggacgacccucgacagcaagacccagucccugcugaucgugaacaacgccaccaacguggucaucaaggugugcgaguuccaguucugcaacgaccccuuccucggcguguacuaccacaagaacaacaagagcuggauggaguccgaguuccgggucuacagcuccgccaacaacugcacguucgaguacgugagccagcccuuccugauggaccuggagggcaagcaggggaacuucaagaaccuccgcgaguucguguucaagaacaucgacggcuacuucaagaucuacuccaagcacaccccgaucaaccugguccgggaccugccccagggguucagcgcccucgagccccugguggaccugcccaucggcaucaacaucacccgcuuccagacccuccuggcccugcaccgguccuaccucacgccgggggacagcagcuccggcuggaccgcgggcgccgccgccuacuacgugggguaccugcagccccgcaccuuccugcucaaguacaacgagaacggcaccaucacggacgcggucgacugcgcccuggacccccugagcgagaccaagugcacccucaaguccuucaccguggagaaggggaucuaccagacgagcaacuuccgggugcagcccaccgaguccaucguccgcuucccgaacaucaccaaccugugccccuucggcgagguguucaacgccacccgguucgccagcgucuacgccuggaaccgcaagcggaucuccaacugcguggcggacuacagcgugcuguacaacuccgccagcuucuccacguucaagugcuacggcgucagccccaccaagcucaacgaccugugcuucaccaacguguacgccgacuccuucgugauccgcggggacgagguccggcagaucgcccccggccagaccgggaagaucgccgacuacaacuacaagcugccggacgacuucacgggcugcgugaucgcguggaacagcaacaaccucgacuccaaggucgggggcaacuacaacuaccuguaccgccuguuccgcaagagcaaccucaagcccuucgagcgggacaucuccaccgagaucuaccaggccggcagcacccccugcaacgggguggagggcuucaacugcuacuucccccugcaguccuacggguuccagccgaccaacggcgugggguaccagcccuaccggguggucgugcugagcuucgagcuccugcacgcccccgccacggugugcggccccaagaaguccaccaaccuggucaagaacaagugcgugaacuucaacuucaacggccucaccgggaccggcgugcugaccgagagcaacaagaaguuccugccguuccagcaguucgggcgcgacaucgccgacacgaccgacgcgguccgcgacccccagacccuggagauccucgacaucacccccugcagcuucggcgggguguccgugaucacgccgggcaccaacaccagcaaccaggucgccgugcuguaccaggacgugaacugcaccgagguccccguggccauccacgccgaccagcugacgcccaccuggcggguguacuccaccggcagcaacgucuuccagacccgcgccgggugccucaucggcgcggagcacgugaacaacuccuacgagugcgacauccccaucggggccggcaucugcgccagcuaccagacgcagaccaacuccccgcggcgcgcccggagcguggcgucccagagcaucaucgccuacaccaugucccugggcgccgagaacagcgucgccuacuccaacaacagcaucgccauccccaccaacuucacgaucuccgugaccaccgagauccugcccgugagcaugaccaagacgagcgucgacugcaccauguacaucugcggggacuccaccgagugcagcaaccuccugcugcaguacggcuccuucugcacccagcucaaccgcgcgcugacggggaucgccguggagcaggacaagaacacccaggagguguucgcccaggucaagcagaucuacaagacgcccccgaucaaggacuucggcggguucaacuucagccagauccugcccgaccccuccaagcccagcaagcgguccuucaucgaggaccuccuguucaacaaggugacccuggccgacgccggcuucaucaagcaguacggcgacugccucggggacaucgcggcccgcgaccugaucugcgcccagaaguucaacggccugaccgugcucccgccccugcugaccgacgagaugaucgcccaguacaccagcgcccuccuggcggggaccaucacguccggcuggaccuucggggccggcgccgcccugcagauccccuucgcgaugcagauggccuaccgguucaacggcaucggggucacccagaacgugcucuacgagaaccagaagcugaucgccaaccaguucaacagcgccaucggcaagauccaggacucccugagcuccaccgccagcgcgcucgggaagcugcaggacguggucaaccagaacgcccaggcccugaacacgcucgugaagcagcuguccagcaacuucggcgccaucuccagcgugcugaacgacauccucucccgccuggacccgcccgaggccgagguccagaucgaccggcugaucaccgggcgccuccagagccugcagaccuacgugacccagcagcugauccgggcggccgagauccgcgccagcgccaaccucgccgcgaccaagauguccgagugcgugcugggccagagcaagcgggucgacuucugcggcaagggguaccaccugauguccuucccccagagcgcgccccacggcgugguguuccuccacgucacguacgugcccgcccaggagaagaacuucaccaccgccccggccaucugccacgacgggaaggcccacuucccccgcgagggcgucuucguguccaacgggacccacugguucgugacgcagcggaacuucuacgagccccagaucaucaccaccgacaacaccuucgucagcggcaacugcgacguggugaucggcaucgucaacaacacgguguacgacccccugcagccggagcuggacuccuucaaggaggagcucgacaaguacuucaagaaccacaccagccccgacguggaccugggggacaucuccggcaucaacgccagcgucgugaacauccagaaggagaucgaccgccugaacgagguggccaagaaccucaacgagucccugaucgaccugcaggagcucgggaaguacgagcaguacaucaaguggcccugguacaucuggcugggcuucaucgccggccugaucgcgaucgucauggugaccaucaugcucugcugcaugaccagcugcugcuccugccugaaggggugcugcagcugcggcuccugcugcaaguucgacgaggacgacagcgagccggugcugaagggggucaagcuccacuacacgugaggacuaguuauaagacugacuagcccgaugggccucccaacgggcccuccuccccuccuugcaccgagauuaaucaaaggcucuuuucagagccaccaaaaaaaaaaaaaaaaaaaaaaaaaaaaaaaaaaaaaaaaaaaaaaaaaaaaaaaaaaaaaaaaaaaaaaaaaaaaaaaaaaaaaaaaaaaaaaaaaaaaa

SEQ ID NO: 24196 - RNA, 4035 nt, Artificial Sequence
  SARS-CoV-2/Wuhan/WIV05/2019__EPI_ISL_402128 spike protein mRNA gc (1-1273)(K986P_V987P_ D614G)
aggagaaagcuuaccauguucguguuccugguccuccugccccuggugagcucccagugcgugaaccucaccacccgcacgcagcugccgcccgccuacaccaacagcuucacccggggcgucuacuaccccgacaagguguuccgcuccagcgugcugcacuccacccaggaccucuuccugcccuucuucagcaacgucacgugguuccacgccauccacguguccgggaccaacggcaccaagcgguucgacaacccggugcugcccuucaacgacggggucuacuucgcgagcaccgagaaguccaacaucauccgcggcuggaucuucgggacgacccucgacagcaagacccagucccugcugaucgugaacaacgccaccaacguggucaucaaggugugcgaguuccaguucugcaacgaccccuuccucggcguguacuaccacaagaacaacaagagcuggauggaguccgaguuccgggucuacagcuccgccaacaacugcacguucgaguacgugagccagcccuuccugauggaccuggagggcaagcaggggaacuucaagaaccuccgcgaguucguguucaagaacaucgacggcuacuucaagaucuacuccaagcacaccccgaucaaccugguccgggaccugccccagggguucagcgcccucgagccccugguggaccugcccaucggcaucaacaucacccgcuuccagacccuccuggcccugcaccgguccuaccucacgccgggggacagcagcuccggcuggaccgcgggcgccgccgccuacuacgugggguaccugcagccccgcaccuuccugcucaaguacaacgagaacggcaccaucacggacgcggucgacugcgcccuggacccccugagcgagaccaagugcacccucaaguccuucaccguggagaaggggaucuaccagacgagcaacuuccgggugcagcccaccgaguccaucguccgcuucccgaacaucaccaaccugugccccuucggcgagguguucaacgccacccgguucgccagcgucuacgccuggaaccgcaagcggaucuccaacugcguggcggacuacagcgugcuguacaacuccgccagcuucuccacguucaagugcuacggcgucagccccaccaagcucaacgaccugugcuucaccaacguguacgccgacuccuucgugauccgcggggacgagguccggcagaucgcccccggccagaccgggaagaucgccgacuacaacuacaagcugccggacgacuucacgggcugcgugaucgcguggaacagcaacaaccucgacuccaaggucgggggcaacuacaacuaccuguaccgccuguuccgcaagagcaaccucaagcccuucgagcgggacaucuccaccgagaucuaccaggccggcagcacccccugcaacgggguggagggcuucaacugcuacuucccccugcaguccuacggguuccagccgaccaacggcgugggguaccagcccuaccggguggucgugcugagcuucgagcuccugcacgcccccgccacggugugcggccccaagaaguccaccaaccuggucaagaacaagugcgugaacuucaacuucaacggccucaccgggaccggcgugcugaccgagagcaacaagaaguuccugccguuccagcaguucgggcgcgacaucgccgacacgaccgacgcgguccgcgacccccagacccuggagauccucgacaucacccccugcagcuucggcgggguguccgugaucacgccgggcaccaacaccagcaaccaggucgccgugcuguaccagggcgugaacugcaccgagguccccguggccauccacgccgaccagcugacgcccaccuggcggguguacuccaccgggagcaacgucuuccagacccgcgccggcugccucaucggggcggagcacgugaacaacuccuacgagugcgacauccccaucggcgccggcaucugcgccagcuaccagacgcagaccaacuccccgcggcgcgcccggagcguggcgucccagagcaucaucgccuacaccaugucccugggggccgagaacagcgucgccuacuccaacaacagcaucgccauccccaccaacuucacgaucuccgugaccaccgagauccugcccgugagcaugaccaagacgagcgucgacugcaccauguacaucugcggcgacuccaccgagugcagcaaccuccugcugcaguacggguccuucugcacccagcucaaccgcgcgcugacgggcaucgccguggagcaggacaagaacacccaggagguguucgcccaggucaagcagaucuacaagacgcccccgaucaaggacuucgggggcuucaacuucagccagauccugcccgaccccuccaagcccagcaagcgguccuucaucgaggaccuccuguucaacaaggugacccuggccgacgccggcuucaucaagcaguacggggacugccucggcgacaucgcggcccgcgaccugaucugcgcccagaaguucaacgggcugaccgugcucccgccccugcugaccgacgagaugaucgcccaguacaccagcgcccuccuggcgggcaccaucacguccggguggaccuucggcgccggcgccgcccugcagauccccuucgcgaugcagauggccuaccgguucaacgggaucggcgucacccagaacgugcucuacgagaaccagaagcugaucgccaaccaguucaacagcgccaucgggaagauccaggacucccugagcuccaccgccagcgcgcucggcaagcugcaggacguggucaaccagaacgcccaggcccugaacacgcucgugaagcagcuguccagcaacuucggggccaucuccagcgugcugaacgacauccucucccgccuggacccgcccgaggccgagguccagaucgaccggcugaucaccggccgccuccagagccugcagaccuacgugacccagcagcugauccgggcggccgagauccgcgccagcgccaaccucgccgcgaccaagauguccgagugcgugcugggccagagcaagcgggucgacuucugcgggaagggcuaccaccugauguccuucccccagagcgcgccccacggggugguguuccuccacgucacguacgugcccgcccaggagaagaacuucaccaccgccccggccaucugccacgacggcaaggcccacuucccccgcgagggggucuucguguccaacggcacccacugguucgugacgcagcggaacuucuacgagccccagaucaucaccaccgacaacaccuucgucagcggcaacugcgacguggugaucgggaucgucaacaacacgguguacgacccccugcagccggagcuggacuccuucaaggaggagcucgacaaguacuucaagaaccacaccagccccgacguggaccugggcgacaucuccgggaucaacgccagcgucgugaacauccagaaggagaucgaccgccugaacgagguggccaagaaccucaacgagucccugaucgaccugcaggagcucggcaaguacgagcaguacaucaaguggcccugguacaucuggcugggcuucaucgccgggcugaucgcgaucgucauggugaccaucaugcucugcugcaugaccagcugcugcuccugccugaagggcugcugcagcugcggguccugcugcaaguucgacgaggacgacagcgagccggugcugaagggcgucaagcuccacuacacgugaggacuaguuauaagacugacuagcccgaugggccucccaacgggcccuccuccccuccuugcaccgagauuaaucaaaggcucuuuucagagccaccaaaaaaaaaaaaaaaaaaaaaaaaaaaaaaaaaaaaaaaaaaaaaaaaaaaaaaaaaaaaaaaaaaaaaaaaaaaaaaaaaaaaaaaaaaaaaaaaaaaaa

SEQ ID NO: 24197 - RNA, 4035 nt, Artificial Sequence
  SARS-CoV-2/Wuhan/WIV05/2019__EPI_ISL_402128 spike protein mRNA gc (1-1273)(K986P_V987P_A222V_D614G)
aggagaaagcuuaccauguucguguuccugguccuccugccccuggugagcucccagugcgugaaccucaccacccgcacgcagcugccgcccgccuacaccaacagcuucacccggggcgucuacuaccccgacaagguguuccgcuccagcgugcugcacuccacccaggaccucuuccugcccuucuucagcaacgucacgugguuccacgccauccacguguccgggaccaacggcaccaagcgguucgacaacccggugcugcccuucaacgacggggucuacuucgcgagcaccgagaaguccaacaucauccgcggcuggaucuucgggacgacccucgacagcaagacccagucccugcugaucgugaacaacgccaccaacguggucaucaaggugugcgaguuccaguucugcaacgaccccuuccucggcguguacuaccacaagaacaacaagagcuggauggaguccgaguuccgggucuacagcuccgccaacaacugcacguucgaguacgugagccagcccuuccugauggaccuggagggcaagcaggggaacuucaagaaccuccgcgaguucguguucaagaacaucgacggcuacuucaagaucuacuccaagcacaccccgaucaaccugguccgggaccugccccagggguucagcgugcucgagccccugguggaccugcccaucggcaucaacaucacccgcuuccagacccuccuggcccugcaccgguccuaccucacgccgggggacagcagcuccggcuggaccgccggcgcggccgccuacuacgucggguaccugcagccccgcaccuuccugcucaaguacaacgagaacggcaccaucacggacgccguggacugcgcgcuggacccccugagcgagaccaagugcacccucaaguccuucaccguggagaaggggaucuaccagacgagcaacuuccggguccagcccaccgaguccaucgugcgcuucccgaacaucaccaaccugugccccuucggcgaggucuucaacgccacccgguucgccagcguguacgccuggaaccgcaagcggaucuccaacugcguggccgacuacagcguccuguacaacuccgcgagcuucuccacguucaagugcuacggcgugagccccaccaagcucaacgaccugugcuucaccaacguguacgccgacuccuucgucauccgcggggacgaggugcggcagaucgcccccggccagaccgggaagaucgccgacuacaacuacaagcugccggacgacuucacgggcugcgugaucgccuggaacagcaacaaccucgacuccaaggucgggggcaacuacaacuaccuguaccgccuguuccgcaagagcaaccucaagcccuucgagcgggacaucuccaccgagaucuaccaggcgggcagcacccccugcaacgggguggagggcuucaacugcuacuucccccugcaguccuacggguuccagccgaccaacggcgugggguaccagcccuaccgggucguggugcugagcuucgagcuccugcacgcccccgccacggucugcggccccaagaaguccaccaaccuggugaagaacaagugcgugaacuucaacuucaacggccucaccgggaccggcguccugaccgagagcaacaagaaguuccugccguuccagcaguucgggcgcgacaucgccgacacgaccgacgccgugcgcgacccccagacccuggagauccucgacaucacccccugcagcuucggcgggguguccgucaucacgccgggcaccaacaccagcaaccagguggcggugcuguaccagggcgucaacugcaccgaggugcccguggccauccacgccgaccagcugacgcccaccuggcgggucuacuccaccgggagcaacguguuccagacccgcgccggcugccucaucggggccgagcacgugaacaacuccuacgagugcgacauccccaucggcgcgggcaucugcgccagcuaccagacgcagaccaacuccccgcggcgcgcccggagcgucgccucccagagcaucaucgcguacaccaugucccugggggccgagaacagcguggccuacuccaacaacagcaucgccauccccaccaacuucacgaucuccgugaccaccgagauccugcccgucagcaugaccaagacgagcguggacugcaccauguacaucugcggcgacuccaccgagugcagcaaccuccugcugcaguacggguccuucugcacccagcucaaccgcgcccugacgggcaucgcgguggagcaggacaagaacacccaggaggucuucgcccaggugaagcagaucuacaagacgcccccgaucaaggacuucgggggcuucaacuucagccagauccugcccgaccccuccaagcccagcaagcgguccuucaucgaggaccuccuguucaacaaggugacccuggccgacgccggcuucaucaagcaguacggggacugccucggcgacaucgccgcgcgcgaccugaucugcgcccagaaguucaacgggcugaccguccucccgccccugcugaccgacgagaugaucgcccaguacaccagcgcccuccuggccggcaccaucacguccggguggaccuucggcgcgggcgccgcccugcagauccccuucgccaugcagauggcguaccgguucaacgggaucggcgugacccagaacgugcucuacgagaaccagaagcugaucgccaaccaguucaacagcgccaucgggaagauccaggacucccugagcuccaccgccagcgcccucggcaagcugcaggacgucgugaaccagaacgcgcaggcccugaacacgcucgugaagcagcuguccagcaacuucggggccaucuccagcguccugaacgacauccucucccgccuggacccgcccgaggccgaggugcagaucgaccggcugaucaccggccgccuccagagccugcagaccuacgugacccagcagcugauccgggccgcggagauccgcgccagcgccaaccucgccgccaccaagauguccgagugcguccugggccagagcaagcggguggacuucugcgggaagggcuaccaccugauguccuucccccagagcgcgccccacgggguggucuuccuccacgugacguacguccccgcccaggagaagaacuucaccaccgccccggccaucugccacgacggcaaggcgcacuucccccgcgaggggguguucguguccaacggcacccacugguucgucacgcagcggaacuucuacgagccccagaucaucaccaccgacaacaccuucgugagcggcaacugcgacguggucaucgggaucgugaacaacacgguguacgacccccugcagccggagcuggacuccuucaaggaggagcucgacaaguacuucaagaaccacaccagccccgacgucgaccugggcgacaucuccgggaucaacgccagcguggugaacauccagaaggagaucgaccgccugaacgaggucgccaagaaccucaacgagucccugaucgaccugcaggagcucggcaaguacgagcaguacaucaaguggcccugguacaucuggcugggcuucaucgccgggcugaucgccaucgugauggugaccaucaugcucugcugcaugaccagcugcugcuccugccugaagggcugcugcagcugcggguccugcugcaaguucgacgaggacgacagcgagccgguccugaagggcgugaagcuccacuacacgugaggacuaguuauaagacugacuagcccgaugggccucccaacgggcccuccuccccuccuugcaccgagauuaaucaaaggcucuuuucagagccaccaaaaaaaaaaaaaaaaaaaaaaaaaaaaaaaaaaaaaaaaaaaaaaaaaaaaaaaaaaaaaaaaaaaaaaaaaaaaaaaaaaaaaaaaaaaaaaaaaaaaa

SEQ ID NO: 24198 - RNA, 4035 nt, Artificial Sequence
  SARS-CoV-2/Wuhan/WIV05/2019__EPI_ISL_402128 spike protein mRNA gc (1-1273)(K986P_V987P_N439K_D614G)
aggagaaagcuuaccauguucguguuccugguccuccugccccuggugagcucccagugcgugaaccucaccacccgcacgcagcugccgcccgccuacaccaacagcuucacccggggcgucuacuaccccgacaagguguuccgcuccagcgugcugcacuccacccaggaccucuuccugcccuucuucagcaacgucacgugguuccacgccauccacguguccgggaccaacggcaccaagcgguucgacaacccggugcugcccuucaacgacggggucuacuucgcgagcaccgagaaguccaacaucauccgcggcuggaucuucgggacgacccucgacagcaagacccagucccugcugaucgugaacaacgccaccaacguggucaucaaggugugcgaguuccaguucugcaacgaccccuuccucggcguguacuaccacaagaacaacaagagcuggauggaguccgaguuccgggucuacagcuccgccaacaacugcacguucgaguacgugagccagcccuuccugauggaccuggagggcaagcaggggaacuucaagaaccuccgcgaguucguguucaagaacaucgacggcuacuucaagaucuacuccaagcacaccccgaucaaccugguccgggaccugccccagggguucagcgcccucgagccccugguggaccugcccaucggcaucaacaucacccgcuuccagacccuccuggcccugcaccgguccuaccucacgccgggggacagcagcuccggcuggaccgcgggcgccgccgccuacuacgugggguaccugcagccccgcaccuuccugcucaaguacaacgagaacggcaccaucacggacgcggucgacugcgcccuggacccccugagcgagaccaagugcacccucaaguccuucaccguggagaaggggaucuaccagacgagcaacuuccgggugcagcccaccgaguccaucguccgcuucccgaacaucaccaaccugugccccuucggcgagguguucaacgccacccgguucgccagcgucuacgccuggaaccgcaagcggaucuccaacugcguggcggacuacagcgugcuguacaacuccgccagcuucuccacguucaagugcuacggcgucagccccaccaagcucaacgaccugugcuucaccaacguguacgccgacuccuucgugauccgcggggacgagguccggcagaucgcccccggccagaccgggaagaucgccgacuacaacuacaagcugccggacgacuucacgggcugcgugaucgcguggaacagcaagaaccucgacuccaaggucgggggcaacuacaacuaccuguaccgccuguuccgcaagagcaaccucaagcccuucgagcgggacaucuccaccgagaucuaccaggccggcagcacccccugcaacgggguggagggcuucaacugcuacuucccccugcaguccuacggguuccagccgaccaacggcgugggguaccagcccuaccggguggucgugcugagcuucgagcuccugcacgcccccgccacggugugcggccccaagaaguccaccaaccuggucaagaacaagugcgugaacuucaacuucaacggccucaccgggaccggcgugcugaccgagagcaacaagaaguuccugccguuccagcaguucgggcgcgacaucgccgacacgaccgacgcgguccgcgacccccagacccuggagauccucgacaucacccccugcagcuucggcgggguguccgugaucacgccgggcaccaacaccagcaaccaggucgccgugcuguaccagggcgugaacugcaccgagguccccguggccauccacgccgaccagcugacgcccaccuggcggguguacuccaccgggagcaacgucuuccagacccgcgccggcugccucaucggggcggagcacgugaacaacuccuacgagugcgacauccccaucggcgccggcaucugcgccagcuaccagacgcagaccaacuccccgcggcgcgcccggagcguggcgucccagagcaucaucgccuacaccaugucccugggggccgagaacagcgucgccuacuccaacaacagcaucgccauccccaccaacuucacgaucuccgugaccaccgagauccugcccgugagcaugaccaagacgagcgucgacugcaccauguacaucugcggcgacuccaccgagugcagcaaccuccugcugcaguacggguccuucugcacccagcucaaccgcgcgcugacgggcaucgccguggagcaggacaagaacacccaggagguguucgcccaggucaagcagaucuacaagacgcccccgaucaaggacuucgggggcuucaacuucagccagauccugcccgaccccuccaagcccagcaagcgguccuucaucgaggaccuccuguucaacaaggugacccuggccgacgccggcuucaucaagcaguacggggacugccucggcgacaucgcggcccgcgaccugaucugcgcccagaaguucaacgggcugaccgugcucccgccccugcugaccgacgagaugaucgcccaguacaccagcgcccuccuggcgggcaccaucacguccggguggaccuucggcgccggcgccgcccugcagauccccuucgcgaugcagauggccuaccgguucaacgggaucggcgucacccagaacgugcucuacgagaaccagaagcugaucgccaaccaguucaacagcgccaucgggaagauccaggacucccugagcuccaccgccagcgcgcucggcaagcugcaggacguggucaaccagaacgcccaggcccugaacacgcucgugaagcagcuguccagcaacuucggggccaucuccagcgugcugaacgacauccucucccgccuggacccgcccgaggccgagguccagaucgaccggcugaucaccggccgccuccagagccugcagaccuacgugacccagcagcugauccgggcggccgagauccgcgccagcgccaaccucgccgcgaccaagauguccgagugcgugcugggccagagcaagcgggucgacuucugcgggaagggcuaccaccugauguccuucccccagagcgcgccccacggggugguguuccuccacgucacguacgugcccgcccaggagaagaacuucaccaccgccccggccaucugccacgacggcaaggcccacuucccccgcgagggggucuucguguccaacggcacccacugguucgugacgcagcggaacuucuacgagccccagaucaucaccaccgacaacaccuucgucagcggcaacugcgacguggugaucgggaucgucaacaacacgguguacgacccccugcagccggagcuggacuccuucaaggaggagcucgacaaguacuucaagaaccacaccagccccgacguggaccugggcgacaucuccgggaucaacgccagcgucgugaacauccagaaggagaucgaccgccugaacgagguggccaagaaccucaacgagucccugaucgaccugcaggagcucggcaaguacgagcaguacaucaaguggcccugguacaucuggcugggcuucaucgccgggcugaucgcgaucgucauggugaccaucaugcucugcugcaugaccagcugcugcuccugccugaagggcugcugcagcugcggguccugcugcaaguucgacgaggacgacagcgagccggugcugaagggcgucaagcuccacuacacgugaggacuaguuauaagacugacuagcccgaugggccucccaacgggcccuccuccccuccuugcaccgagauuaaucaaaggcucuuuucagagccaccaaaaaaaaaaaaaaaaaaaaaaaaaaaaaaaaaaaaaaaaaaaaaaaaaaaaaaaaaaaaaaaaaaaaaaaaaaaaaaaaaaaaaaaaaaaaaaaaaaaaa

SEQ ID NO: 24199 - RNA, 4035 nt, Artificial Sequence
  SARS-CoV-2/Wuhan/WIV05/2019__EPI_ISL_402128 spike protein mRNA gc (1-1273)(K986P_V987P_S477N_D614G)
aggagaaagcuuaccauguucguguuccugguccuccugccccuggugagcucccagugcgugaaccucaccacccgcacgcagcugccgcccgccuacaccaacagcuucacccggggcgucuacuaccccgacaagguguuccgcuccagcgugcugcacuccacccaggaccucuuccugcccuucuucagcaacgucacgugguuccacgccauccacguguccgggaccaacggcaccaagcgguucgacaacccggugcugcccuucaacgacggggucuacuucgcgagcaccgagaaguccaacaucauccgcggcuggaucuucgggacgacccucgacagcaagacccagucccugcugaucgugaacaacgccaccaacguggucaucaaggugugcgaguuccaguucugcaacgaccccuuccucggcguguacuaccacaagaacaacaagagcuggauggaguccgaguuccgggucuacagcuccgccaacaacugcacguucgaguacgugagccagcccuuccugauggaccuggagggcaagcaggggaacuucaagaaccuccgcgaguucguguucaagaacaucgacggcuacuucaagaucuacuccaagcacaccccgaucaaccugguccgggaccugccccagggguucagcgcccucgagccccugguggaccugcccaucggcaucaacaucacccgcuuccagacccuccuggcccugcaccgguccuaccucacgccgggggacagcagcuccggcuggaccgcgggcgccgccgccuacuacgugggguaccugcagccccgcaccuuccugcucaaguacaacgagaacggcaccaucacggacgcggucgacugcgcccuggacccccugagcgagaccaagugcacccucaaguccuucaccguggagaaggggaucuaccagacgagcaacuuccgggugcagcccaccgaguccaucguccgcuucccgaacaucaccaaccugugccccuucggcgagguguucaacgccacccgguucgccagcgucuacgccuggaaccgcaagcggaucuccaacugcguggcggacuacagcgugcuguacaacuccgccagcuucuccacguucaagugcuacggcgucagccccaccaagcucaacgaccugugcuucaccaacguguacgccgacuccuucgugauccgcggggacgagguccggcagaucgcccccggccagaccgggaagaucgccgacuacaacuacaagcugccggacgacuucacgggcugcgugaucgcguggaacagcaacaaccucgacuccaaggucgggggcaacuacaacuaccuguaccgccuguuccgcaagagcaaccucaagcccuucgagcgggacaucuccaccgagaucuaccaggccggcaacacccccugcaacgggguggagggcuucaacugcuacuucccccugcagagcuacggguuccagccgaccaacggcgugggguaccagcccuaccggguggucgugcuguccuucgagcuccugcacgcccccgccacggugugcggccccaagaaguccaccaaccuggucaagaacaagugcgugaacuucaacuucaacggccucaccgggaccggcgugcugaccgagagcaacaagaaguuccugccguuccagcaguucgggcgcgacaucgccgacacgaccgacgcgguccgcgacccccagacccuggagauccucgacaucacccccugcagcuucggcggggugagcgugaucacgccgggcaccaacaccuccaaccaggucgccgugcuguaccagggcgugaacugcaccgagguccccguggccauccacgccgaccagcugacgcccaccuggcggguguacagcaccggguccaacgucuuccagacccgcgccggcugccucaucggggcggagcacgugaacaacagcuacgagugcgacauccccaucggcgccggcaucugcgccuccuaccagacgcagaccaacagcccgcggcgcgcccgguccguggcgagccaguccaucaucgccuacaccaugagccugggggccgagaacuccgucgccuacagcaacaacuccaucgccauccccaccaacuucacgaucagcgugaccaccgagauccugcccguguccaugaccaagacgagcgucgacugcaccauguacaucugcggcgacagcaccgagugcuccaaccuccugcugcaguacgggagcuucugcacccagcucaaccgcgcgcugacgggcaucgccguggagcaggacaagaacacccaggagguguucgcccaggucaagcagaucuacaagacgcccccgaucaaggacuucgggggcuucaacuucucccagauccugcccgaccccagcaagcccuccaagcggagcuucaucgaggaccuccuguucaacaaggugacccuggccgacgccggcuucaucaagcaguacggggacugccucggcgacaucgcggcccgcgaccugaucugcgcccagaaguucaacgggcugaccgugcucccgccccugcugaccgacgagaugaucgcccaguacaccuccgcccuccuggcgggcaccaucacgagcggguggaccuucggcgccggcgccgcccugcagauccccuucgcgaugcagauggccuaccgguucaacgggaucggcgucacccagaacgugcucuacgagaaccagaagcugaucgccaaccaguucaacuccgccaucgggaagauccaggacagccuguccagcaccgccuccgcgcucggcaagcugcaggacguggucaaccagaacgcccaggcccugaacacgcucgugaagcagcugagcuccaacuucggggccaucagcuccgugcugaacgacauccucagccgccuggacccgcccgaggccgagguccagaucgaccggcugaucaccggccgccuccagucccugcagaccuacgugacccagcagcugauccgggcggccgagauccgcgccagcgccaaccucgccgcgaccaagaugagcgagugcgugcugggccaguccaagcgggucgacuucugcgggaagggcuaccaccugaugagcuucccccaguccgcgccccacggggugguguuccuccacgucacguacgugcccgcccaggagaagaacuucaccaccgccccggccaucugccacgacggcaaggcccacuucccccgcgagggggucuucgugagcaacggcacccacugguucgugacgcagcggaacuucuacgagccccagaucaucaccaccgacaacaccuucgucuccggcaacugcgacguggugaucgggaucgucaacaacacgguguacgacccccugcagccggagcuggacagcuucaaggaggagcucgacaaguacuucaagaaccacaccucccccgacguggaccugggcgacaucagcgggaucaacgccuccgucgugaacauccagaaggagaucgaccgccugaacgagguggccaagaaccucaacgagagccugaucgaccugcaggagcucggcaaguacgagcaguacaucaaguggcccugguacaucuggcugggcuucaucgccgggcugaucgcgaucgucauggugaccaucaugcucugcugcaugaccuccugcugcagcugccugaagggcugcugcuccugcgggagcugcugcaaguucgacgaggacgacuccgagccggugcugaagggcgucaagcuccacuacacgugaggacuaguuauaagacugacuagcccgaugggccucccaacgggcccuccuccccuccuugcaccgagauuaaucaaaggcucuuuucagagccaccaaaaaaaaaaaaaaaaaaaaaaaaaaaaaaaaaaaaaaaaaaaaaaaaaaaaaaaaaaaaaaaaaaaaaaaaaaaaaaaaaaaaaaaaaaaaaaaaaaaaa

SEQ ID NO: 24200 - RNA, 4035 nt, Artificial Sequence
  SARS-CoV-2/Wuhan/WIV05/2019__EPI_ISL_402128 spike protein mRNA gc (1-1273)(K986P_V987P_N501Y_D614G)
aggagaaagcuuaccauguucguguuccugguccuccugccccuggugagcucccagugcgugaaccucaccacccgcacgcagcugccgcccgccuacaccaacagcuucacccggggcgucuacuaccccgacaagguguuccgcuccagcgugcugcacuccacccaggaccucuuccugcccuucuucagcaacgucacgugguuccacgccauccacguguccgggaccaacggcaccaagcgguucgacaacccggugcugcccuucaacgacggggucuacuucgcgagcaccgagaaguccaacaucauccgcggcuggaucuucgggacgacccucgacagcaagacccagucccugcugaucgugaacaacgccaccaacguggucaucaaggugugcgaguuccaguucugcaacgaccccuuccucggcguguacuaccacaagaacaacaagagcuggauggaguccgaguuccgggucuacagcuccgccaacaacugcacguucgaguacgugagccagcccuuccugauggaccuggagggcaagcaggggaacuucaagaaccuccgcgaguucguguucaagaacaucgacggcuacuucaagaucuacuccaagcacaccccgaucaaccugguccgggaccugccccagggguucagcgcccucgagccccugguggaccugcccaucggcaucaacaucacccgcuuccagacccuccuggcccugcaccgguccuaccucacgccgggggacagcagcuccggcuggaccgcgggcgccgccgccuacuacgugggguaccugcagccccgcaccuuccugcucaaguacaacgagaacggcaccaucacggacgcggucgacugcgcccuggacccccugagcgagaccaagugcacccucaaguccuucaccguggagaaggggaucuaccagacgagcaacuuccgggugcagcccaccgaguccaucguccgcuucccgaacaucaccaaccugugccccuucggcgagguguucaacgccacccgguucgccagcgucuacgccuggaaccgcaagcggaucuccaacugcguggcggacuacagcgugcuguacaacuccgccagcuucuccacguucaagugcuacggcgucagccccaccaagcucaacgaccugugcuucaccaacguguacgccgacuccuucgugauccgcggggacgagguccggcagaucgcccccggccagaccgggaagaucgccgacuacaacuacaagcugccggacgacuucacgggcugcgugaucgcguggaacagcaacaaccucgacuccaaggucgggggcaacuacaacuaccuguaccgccuguuccgcaagagcaaccucaagcccuucgagcgggacaucuccaccgagaucuaccaggccggcagcacccccugcaacgggguggagggcuucaacugcuacuucccccugcaguccuacggguuccagccgaccuacggcgugggguaccagcccuaccggguggucgugcugagcuucgagcuccugcacgcccccgccacggugugcggccccaagaaguccaccaaccuggucaagaacaagugcgugaacuucaacuucaacggccucaccgggaccggcgugcugaccgagagcaacaagaaguuccugccguuccagcaguucgggcgcgacaucgccgacacgaccgacgcgguccgcgacccccagacccuggagauccucgacaucacccccugcagcuucggcgggguguccgugaucacgccgggcaccaacaccagcaaccaggucgccgugcuguaccagggcgugaacugcaccgagguccccguggccauccacgccgaccagcugacgcccaccuggcggguguacuccaccgggagcaacgucuuccagacccgcgccggcugccucaucggggcggagcacgugaacaacuccuacgagugcgacauccccaucggcgccggcaucugcgccagcuaccagacgcagaccaacuccccgcggcgcgcccggagcguggcgucccagagcaucaucgccuacaccaugucccugggggccgagaacagcgucgccuacuccaacaacagcaucgccauccccaccaacuucacgaucuccgugaccaccgagauccugcccgugagcaugaccaagacgagcgucgacugcaccauguacaucugcggcgacuccaccgagugcagcaaccuccugcugcaguacggguccuucugcacccagcucaaccgcgcgcugacgggcaucgccguggagcaggacaagaacacccaggagguguucgcccaggucaagcagaucuacaagacgcccccgaucaaggacuucgggggcuucaacuucagccagauccugcccgaccccuccaagcccagcaagcgguccuucaucgaggaccuccuguucaacaaggugacccuggccgacgccggcuucaucaagcaguacggggacugccucggcgacaucgcggcccgcgaccugaucugcgcccagaaguucaacgggcugaccgugcucccgccccugcugaccgacgagaugaucgcccaguacaccagcgcccuccuggcgggcaccaucacguccggguggaccuucggcgccggcgccgcccugcagauccccuucgcgaugcagauggccuaccgguucaacgggaucggcgucacccagaacgugcucuacgagaaccagaagcugaucgccaaccaguucaacagcgccaucgggaagauccaggacucccugagcuccaccgccagcgcgcucggcaagcugcaggacguggucaaccagaacgcccaggcccugaacacgcucgugaagcagcuguccagcaacuucggggccaucuccagcgugcugaacgacauccucucccgccuggacccgcccgaggccgagguccagaucgaccggcugaucaccggccgccuccagagccugcagaccuacgugacccagcagcugauccgggcggccgagauccgcgccagcgccaaccucgccgcgaccaagauguccgagugcgugcugggccagagcaagcgggucgacuucugcgggaagggcuaccaccugauguccuucccccagagcgcgccccacggggugguguuccuccacgucacguacgugcccgcccaggagaagaacuucaccaccgccccggccaucugccacgacggcaaggcccacuucccccgcgagggggucuucguguccaacggcacccacugguucgugacgcagcggaacuucuacgagccccagaucaucaccaccgacaacaccuucgucagcggcaacugcgacguggugaucgggaucgucaacaacacgguguacgacccccugcagccggagcuggacuccuucaaggaggagcucgacaaguacuucaagaaccacaccagccccgacguggaccugggcgacaucuccgggaucaacgccagcgucgugaacauccagaaggagaucgaccgccugaacgagguggccaagaaccucaacgagucccugaucgaccugcaggagcucggcaaguacgagcaguacaucaaguggcccugguacaucuggcugggcuucaucgccgggcugaucgcgaucgucauggugaccaucaugcucugcugcaugaccagcugcugcuccugccugaagggcugcugcagcugcggguccugcugcaaguucgacgaggacgacagcgagccggugcugaagggcgucaagcuccacuacacgugaggacuaguuauaagacugacuagcccgaugggccucccaacgggcccuccuccccuccuugcaccgagauuaaucaaaggcucuuuucagagccaccaaaaaaaaaaaaaaaaaaaaaaaaaaaaaaaaaaaaaaaaaaaaaaaaaaaaaaaaaaaaaaaaaaaaaaaaaaaaaaaaaaaaaaaaaaaaaaaaaaaaa

SEQ ID NO: 24201 - RNA, 4029 nt, Artificial Sequence
  SARS-CoV-2/Wuhan/WIV05/2019__EPI_ISL_402128 spike protein mRNA gc (1-1273)(K986P_V987P_H69del_V70del_D614G)
aggagaaagcuuaccauguucguguuccugguccuccugccccuggugagcucccagugcgugaaccucaccacccgcacgcagcugccgcccgccuacaccaacagcuucacccggggcgucuacuaccccgacaagguguuccgcuccagcgugcugcacuccacccaggaccucuuccugcccuucuucagcaacgucacgugguuccacgccaucuccgggaccaacggcaccaagcgguucgacaacccggugcugcccuucaacgacgggguguacuucgcgagcaccgagaaguccaacaucauccgcggcuggaucuucgggacgacccucgacagcaagacccagucccugcugaucgucaacaacgccaccaacguggugaucaaggucugcgaguuccaguucugcaacgaccccuuccucggcguguacuaccacaagaacaacaagagcuggauggaguccgaguuccggguguacagcuccgccaacaacugcacguucgaguacgucagccagcccuuccugauggaccuggagggcaagcaggggaacuucaagaaccuccgcgaguucguguucaagaacaucgacggcuacuucaagaucuacuccaagcacaccccgaucaaccuggugcgggaccugccccagggguucagcgcccucgagccccuggucgaccugcccaucggcaucaacaucacccgcuuccagacccuccuggcccugcaccgguccuaccucacgccgggggacagcagcuccggcuggaccgcgggcgccgccgccuacuacgugggguaccugcagccccgcaccuuccugcucaaguacaacgagaacggcaccaucacggacgcgguggacugcgcccuggacccccugagcgagaccaagugcacccucaaguccuucaccgucgagaaggggaucuaccagacgagcaacuuccgggugcagcccaccgaguccaucgugcgcuucccgaacaucaccaaccugugccccuucggcgaggucuucaacgccacccgguucgccagcguguacgccuggaaccgcaagcggaucuccaacugcgucgcggacuacagcgugcuguacaacuccgccagcuucuccacguucaagugcuacggcgugagccccaccaagcucaacgaccugugcuucaccaacgucuacgccgacuccuucgugauccgcggggacgaggugcggcagaucgcccccggccagaccgggaagaucgccgacuacaacuacaagcugccggacgacuucacgggcugcgucaucgcguggaacagcaacaaccucgacuccaaggucgggggcaacuacaacuaccuguaccgccuguuccgcaagagcaaccucaagcccuucgagcgggacaucuccaccgagaucuaccaggccggcagcacccccugcaacgggguggagggcuucaacugcuacuucccccugcaguccuacggguuccagccgaccaacggcgugggguaccagcccuaccggguggugguccugagcuucgagcuccugcacgcccccgccacggugugcggccccaagaaguccaccaaccuggugaagaacaagugcgucaacuucaacuucaacggccucaccgggaccggcgugcugaccgagagcaacaagaaguuccugccguuccagcaguucgggcgcgacaucgccgacacgaccgacgcggugcgcgacccccagacccuggagauccucgacaucacccccugcagcuucggcggggucuccgugaucacgccgggcaccaacaccagcaaccagguggccguccuguaccagggcgugaacugcaccgaggugcccgucgccauccacgccgaccagcugacgcccaccuggcggguguacuccaccgggagcaacguguuccagacccgcgccggcugccucaucggggcggagcacgucaacaacuccuacgagugcgacauccccaucggcgccggcaucugcgccagcuaccagacgcagaccaacuccccgcggcgcgcccggagcguggcgucccagagcaucaucgccuacaccaugucccugggggccgagaacagcguggccuacuccaacaacagcaucgccauccccaccaacuucacgaucuccgucaccaccgagauccugcccgugagcaugaccaagacgagcguggacugcaccauguacaucugcggcgacuccaccgagugcagcaaccuccugcugcaguacggguccuucugcacccagcucaaccgcgcgcugacgggcaucgccgucgagcaggacaagaacacccaggagguguucgcccaggugaagcagaucuacaagacgcccccgaucaaggacuucgggggcuucaacuucagccagauccugcccgaccccuccaagcccagcaagcgguccuucaucgaggaccuccuguucaacaaggucacccuggccgacgccggcuucaucaagcaguacggggacugccucggcgacaucgcggcccgcgaccugaucugcgcccagaaguucaacgggcugaccgugcucccgccccugcugaccgacgagaugaucgcccaguacaccagcgcccuccuggcgggcaccaucacguccggguggaccuucggcgccggcgccgcccugcagauccccuucgcgaugcagauggccuaccgguucaacgggaucggcgugacccagaacguccucuacgagaaccagaagcugaucgccaaccaguucaacagcgccaucgggaagauccaggacucccugagcuccaccgccagcgcgcucggcaagcugcaggacguggugaaccagaacgcccaggcccugaacacgcucgucaagcagcuguccagcaacuucggggccaucuccagcgugcugaacgacauccucucccgccuggacccgcccgaggccgaggugcagaucgaccggcugaucaccggccgccuccagagccugcagaccuacgucacccagcagcugauccgggcggccgagauccgcgccagcgccaaccucgccgcgaccaagauguccgagugcgugcugggccagagcaagcggguggacuucugcgggaagggcuaccaccugauguccuucccccagagcgcgccccacggggucguguuccuccacgugacguacguccccgcccaggagaagaacuucaccaccgccccggccaucugccacgacggcaaggcccacuucccccgcgaggggguguucgucuccaacggcacccacugguucgugacgcagcggaacuucuacgagccccagaucaucaccaccgacaacaccuucgugagcggcaacugcgacgucgugaucgggaucgugaacaacacggucuacgacccccugcagccggagcuggacuccuucaaggaggagcucgacaaguacuucaagaaccacaccagccccgacguggaccugggcgacaucuccgggaucaacgccagcguggucaacauccagaaggagaucgaccgccugaacgagguggccaagaaccucaacgagucccugaucgaccugcaggagcucggcaaguacgagcaguacaucaaguggcccugguacaucuggcugggcuucaucgccgggcugaucgcgaucgugauggucaccaucaugcucugcugcaugaccagcugcugcuccugccugaagggcugcugcagcugcggguccugcugcaaguucgacgaggacgacagcgagccggugcugaagggcgugaagcuccacuacacgugaggacuaguuauaagacugacuagcccgaugggccucccaacgggcccuccuccccuccuugcaccgagauuaaucaaaggcucuuuucagagccaccaaaaaaaaaaaaaaaaaaaaaaaaaaaaaaaaaaaaaaaaaaaaaaaaaaaaaaaaaaaaaaaaaaaaaaaaaaaaaaaaaaaaaaaaaaaaaaaaaaaaa

SEQ ID NO: 24202 - RNA, 4035 nt, Artificial Sequence
  SARS-CoV-2/Wuhan/WIV05/2019__EPI_ISL_402128 spike protein mRNA gc (1-1273)(K986P_V987P_Y453F_D614G)
aggagaaagcuuaccauguucguguuccugguccuccugccccuggugagcucccagugcgugaaccucaccacccgcacgcagcugccgcccgccuacaccaacagcuucacccggggcgucuacuaccccgacaagguguuccgcuccagcgugcugcacuccacccaggaccucuuccugcccuucuucagcaacgucacgugguuccacgccauccacguguccgggaccaacggcaccaagcgguucgacaacccggugcugcccuucaacgacggggucuacuucgcgagcaccgagaaguccaacaucauccgcggcuggaucuucgggacgacccucgacagcaagacccagucccugcugaucgugaacaacgccaccaacguggucaucaaggugugcgaguuccaguucugcaacgaccccuuccucggcguguacuaccacaagaacaacaagagcuggauggaguccgaguuccgggucuacagcuccgccaacaacugcacguucgaguacgugagccagcccuuccugauggaccuggagggcaagcaggggaacuucaagaaccuccgcgaguucguguucaagaacaucgacggcuacuucaagaucuacuccaagcacaccccgaucaaccugguccgggaccugccccagggguucagcgcccucgagccccugguggaccugcccaucggcaucaacaucacccgcuuccagacccuccuggcccugcaccgguccuaccucacgccgggggacagcagcuccggcuggaccgcgggcgccgccgccuacuacgugggguaccugcagccccgcaccuuccugcucaaguacaacgagaacggcaccaucacggacgcggucgacugcgcccuggacccccugagcgagaccaagugcacccucaaguccuucaccguggagaaggggaucuaccagacgagcaacuuccgggugcagcccaccgaguccaucguccgcuucccgaacaucaccaaccugugccccuucggcgagguguucaacgccacccgguucgccagcgucuacgccuggaaccgcaagcggaucuccaacugcguggcggacuacagcgugcuguacaacuccgccagcuucuccacguucaagugcuacggcgucagccccaccaagcucaacgaccugugcuucaccaacguguacgccgacuccuucgugauccgcggggacgagguccggcagaucgcccccggccagaccgggaagaucgccgacuacaacuacaagcugccggacgacuucacgggcugcgugaucgcguggaacagcaacaaccucgacuccaaggucgggggcaacuacaacuaccuguuccgccuguuccgcaagagcaaccucaagcccuucgagcgggacaucuccaccgagaucuaccaggccggcagcacccccugcaacgggguggagggcuucaacugcuacuucccccugcaguccuacggguuccagccgaccaacggcgugggguaccagcccuaccggguggucgugcugagcuucgagcuccugcacgcccccgccacggugugcggccccaagaaguccaccaaccuggucaagaacaagugcgugaacuucaacuucaacggccucaccgggaccggcgugcugaccgagagcaacaagaaguuccugccguuccagcaguucgggcgcgacaucgccgacacgaccgacgcgguccgcgacccccagacccuggagauccucgacaucacccccugcagcuucggcgggguguccgugaucacgccgggcaccaacaccagcaaccaggucgccgugcuguaccagggcgugaacugcaccgagguccccguggccauccacgccgaccagcugacgcccaccuggcggguguacuccaccgggagcaacgucuuccagacccgcgccggcugccucaucggggcggagcacgugaacaacuccuacgagugcgacauccccaucggcgccggcaucugcgccagcuaccagacgcagaccaacuccccgcggcgcgcccggagcguggcgucccagagcaucaucgccuacaccaugucccugggggccgagaacagcgucgccuacuccaacaacagcaucgccauccccaccaacuucacgaucuccgugaccaccgagauccugcccgugagcaugaccaagacgagcgucgacugcaccauguacaucugcggcgacuccaccgagugcagcaaccuccugcugcaguacggguccuucugcacccagcucaaccgcgcgcugacgggcaucgccguggagcaggacaagaacacccaggagguguucgcccaggucaagcagaucuacaagacgcccccgaucaaggacuucgggggcuucaacuucagccagauccugcccgaccccuccaagcccagcaagcgguccuucaucgaggaccuccuguucaacaaggugacccuggccgacgccggcuucaucaagcaguacggggacugccucggcgacaucgcggcccgcgaccugaucugcgcccagaaguucaacgggcugaccgugcucccgccccugcugaccgacgagaugaucgcccaguacaccagcgcccuccuggcgggcaccaucacguccggguggaccuucggcgccggcgccgcccugcagauccccuucgcgaugcagauggccuaccgguucaacgggaucggcgucacccagaacgugcucuacgagaaccagaagcugaucgccaaccaguucaacagcgccaucgggaagauccaggacucccugagcuccaccgccagcgcgcucggcaagcugcaggacguggucaaccagaacgcccaggcccugaacacgcucgugaagcagcuguccagcaacuucggggccaucuccagcgugcugaacgacauccucucccgccuggacccgcccgaggccgagguccagaucgaccggcugaucaccggccgccuccagagccugcagaccuacgugacccagcagcugauccgggcggccgagauccgcgccagcgccaaccucgccgcgaccaagauguccgagugcgugcugggccagagcaagcgggucgacuucugcgggaagggcuaccaccugauguccuucccccagagcgcgccccacggggugguguuccuccacgucacguacgugcccgcccaggagaagaacuucaccaccgccccggccaucugccacgacggcaaggcccacuucccccgcgagggggucuucguguccaacggcacccacugguucgugacgcagcggaacuucuacgagccccagaucaucaccaccgacaacaccuucgucagcggcaacugcgacguggugaucgggaucgucaacaacacgguguacgacccccugcagccggagcuggacuccuucaaggaggagcucgacaaguacuucaagaaccacaccagccccgacguggaccugggcgacaucuccgggaucaacgccagcgucgugaacauccagaaggagaucgaccgccugaacgagguggccaagaaccucaacgagucccugaucgaccugcaggagcucggcaaguacgagcaguacaucaaguggcccugguacaucuggcugggcuucaucgccgggcugaucgcgaucgucauggugaccaucaugcucugcugcaugaccagcugcugcuccugccugaagggcugcugcagcugcggguccugcugcaaguucgacgaggacgacagcgagccggugcugaagggcgucaagcuccacuacacgugaggacuaguuauaagacugacuagcccgaugggccucccaacgggcccuccuccccuccuugcaccgagauuaaucaaaggcucuuuucagagccaccaaaaaaaaaaaaaaaaaaaaaaaaaaaaaaaaaaaaaaaaaaaaaaaaaaaaaaaaaaaaaaaaaaaaaaaaaaaaaaaaaaaaaaaaaaaaaaaaaaaaa

SEQ ID NO: 24203 - RNA, 4035 nt, Artificial Sequence
  SARS-CoV-2/Wuhan/WIV05/2019__EPI_ISL_402128 spike protein mRNA gc (1-1273)(K986P_V987P_D614G_I692V)
aggagaaagcuuaccauguucguguuccugguccuccugccccuggugagcucccagugcgugaaccucaccacccgcacgcagcugccgcccgccuacaccaacagcuucacccggggcgucuacuaccccgacaagguguuccgcuccagcgugcugcacuccacccaggaccucuuccugcccuucuucagcaacgucacgugguuccacgccauccacguguccgggaccaacggcaccaagcgguucgacaacccggugcugcccuucaacgacggggucuacuucgcgagcaccgagaaguccaacaucauccgcggcuggaucuucgggacgacccucgacagcaagacccagucccugcugaucgugaacaacgccaccaacguggucaucaaggugugcgaguuccaguucugcaacgaccccuuccucggcguguacuaccacaagaacaacaagagcuggauggaguccgaguuccgggucuacagcuccgccaacaacugcacguucgaguacgugagccagcccuuccugauggaccuggagggcaagcaggggaacuucaagaaccuccgcgaguucguguucaagaacaucgacggcuacuucaagaucuacuccaagcacaccccgaucaaccugguccgggaccugccccagggguucagcgcccucgagccccugguggaccugcccaucggcaucaacaucacccgcuuccagacccuccuggcccugcaccgguccuaccucacgccgggggacagcagcuccggcuggaccgcgggcgccgccgccuacuacgugggguaccugcagccccgcaccuuccugcucaaguacaacgagaacggcaccaucacggacgcggucgacugcgcccuggacccccugagcgagaccaagugcacccucaaguccuucaccguggagaaggggaucuaccagacgagcaacuuccgggugcagcccaccgaguccaucguccgcuucccgaacaucaccaaccugugccccuucggcgagguguucaacgccacccgguucgccagcgucuacgccuggaaccgcaagcggaucuccaacugcguggcggacuacagcgugcuguacaacuccgccagcuucuccacguucaagugcuacggcgucagccccaccaagcucaacgaccugugcuucaccaacguguacgccgacuccuucgugauccgcggggacgagguccggcagaucgcccccggccagaccgggaagaucgccgacuacaacuacaagcugccggacgacuucacgggcugcgugaucgcguggaacagcaacaaccucgacuccaaggucgggggcaacuacaacuaccuguaccgccuguuccgcaagagcaaccucaagcccuucgagcgggacaucuccaccgagaucuaccaggccggcagcacccccugcaacgggguggagggcuucaacugcuacuucccccugcaguccuacggguuccagccgaccaacggcgugggguaccagcccuaccggguggucgugcugagcuucgagcuccugcacgcccccgccacggugugcggccccaagaaguccaccaaccuggucaagaacaagugcgugaacuucaacuucaacggccucaccgggaccggcgugcugaccgagagcaacaagaaguuccugccguuccagcaguucgggcgcgacaucgccgacacgaccgacgcgguccgcgacccccagacccuggagauccucgacaucacccccugcagcuucggcgggguguccgugaucacgccgggcaccaacaccagcaaccaggucgccgugcuguaccagggcgugaacugcaccgagguccccguggccauccacgccgaccagcugacgcccaccuggcggguguacuccaccgggagcaacgucuuccagacccgcgccggcugccucaucggggcggagcacgugaacaacuccuacgagugcgacauccccaucggcgccggcaucugcgccagcuaccagacgcagaccaacuccccgcggcgcgcccggagcguggcgucccagagcgucaucgccuacaccaugucccugggggccgagaacagcguggccuacuccaacaacagcaucgccauccccaccaacuucacgaucuccgugaccaccgagauccugcccgucagcaugaccaagacgagcguggacugcaccauguacaucugcggcgacuccaccgagugcagcaaccuccugcugcaguacggguccuucugcacccagcucaaccgcgcgcugacgggcaucgccguggagcaggacaagaacacccaggaggucuucgcccaggugaagcagaucuacaagacgcccccgaucaaggacuucgggggcuucaacuucagccagauccugcccgaccccuccaagcccagcaagcgguccuucaucgaggaccuccuguucaacaaggugacccuggccgacgccggcuucaucaagcaguacggggacugccucggcgacaucgcggcccgcgaccugaucugcgcccagaaguucaacgggcugaccguccucccgccccugcugaccgacgagaugaucgcccaguacaccagcgcccuccuggcgggcaccaucacguccggguggaccuucggcgccggcgccgcccugcagauccccuucgcgaugcagauggccuaccgguucaacgggaucggcgugacccagaacgugcucuacgagaaccagaagcugaucgccaaccaguucaacagcgccaucgggaagauccaggacucccugagcuccaccgccagcgcgcucggcaagcugcaggacgucgugaaccagaacgcccaggcccugaacacgcucgugaagcagcuguccagcaacuucggggccaucuccagcguccugaacgacauccucucccgccuggacccgcccgaggccgaggugcagaucgaccggcugaucaccggccgccuccagagccugcagaccuacgugacccagcagcugauccgggcggccgagauccgcgccagcgccaaccucgccgcgaccaagauguccgagugcguccugggccagagcaagcggguggacuucugcgggaagggcuaccaccugauguccuucccccagagcgcgccccacgggguggucuuccuccacgugacguacguccccgcccaggagaagaacuucaccaccgccccggccaucugccacgacggcaaggcccacuucccccgcgaggggguguucguguccaacggcacccacugguucgucacgcagcggaacuucuacgagccccagaucaucaccaccgacaacaccuucgugagcggcaacugcgacguggucaucgggaucgugaacaacacgguguacgacccccugcagccggagcuggacuccuucaaggaggagcucgacaaguacuucaagaaccacaccagccccgacgucgaccugggcgacaucuccgggaucaacgccagcguggugaacauccagaaggagaucgaccgccugaacgaggucgccaagaaccucaacgagucccugaucgaccugcaggagcucggcaaguacgagcaguacaucaaguggcccugguacaucuggcugggcuucaucgccgggcugaucgcgaucgugauggugaccaucaugcucugcugcaugaccagcugcugcuccugccugaagggcugcugcagcugcggguccugcugcaaguucgacgaggacgacagcgagccgguccugaagggcgugaagcuccacuacacgugaggacuaguuauaagacugacuagcccgaugggccucccaacgggcccuccuccccuccuugcaccgagauuaaucaaaggcucuuuucagagccaccaaaaaaaaaaaaaaaaaaaaaaaaaaaaaaaaaaaaaaaaaaaaaaaaaaaaaaaaaaaaaaaaaaaaaaaaaaaaaaaaaaaaaaaaaaaaaaaaaaaaa

SEQ ID NO: 24204 - RNA, 4035 nt, Artificial Sequence
  SARS-CoV-2/Wuhan/WIV05/2019__EPI_ISL_402128 spike protein mRNA gc (1-1273)(K986P_V987P_D614G_M1229I)
aggagaaagcuuaccauguucguguuccugguccuccugccccuggugagcucccagugcgugaaccucaccacccgcacgcagcugccgcccgccuacaccaacagcuucacccggggcgucuacuaccccgacaagguguuccgcuccagcgugcugcacuccacccaggaccucuuccugcccuucuucagcaacgucacgugguuccacgccauccacguguccgggaccaacggcaccaagcgguucgacaacccggugcugcccuucaacgacggggucuacuucgcgagcaccgagaaguccaacaucauccgcggcuggaucuucgggacgacccucgacagcaagacccagucccugcugaucgugaacaacgccaccaacguggucaucaaggugugcgaguuccaguucugcaacgaccccuuccucggcguguacuaccacaagaacaacaagagcuggauggaguccgaguuccgggucuacagcuccgccaacaacugcacguucgaguacgugagccagcccuuccugauggaccuggagggcaagcaggggaacuucaagaaccuccgcgaguucguguucaagaacaucgacggcuacuucaagaucuacuccaagcacaccccgaucaaccugguccgggaccugccccagggguucagcgcccucgagccccugguggaccugcccaucggcaucaacaucacccgcuuccagacccuccuggcccugcaccgguccuaccucacgccgggggacagcagcuccggcuggaccgcgggcgccgccgccuacuacgugggguaccugcagccccgcaccuuccugcucaaguacaacgagaacggcaccaucacggacgcggucgacugcgcccuggacccccugagcgagaccaagugcacccucaaguccuucaccguggagaaggggaucuaccagacgagcaacuuccgggugcagcccaccgaguccaucguccgcuucccgaacaucaccaaccugugccccuucggcgagguguucaacgccacccgguucgccagcgucuacgccuggaaccgcaagcggaucuccaacugcguggcggacuacagcgugcuguacaacuccgccagcuucuccacguucaagugcuacggcgucagccccaccaagcucaacgaccugugcuucaccaacguguacgccgacuccuucgugauccgcggggacgagguccggcagaucgcccccggccagaccgggaagaucgccgacuacaacuacaagcugccggacgacuucacgggcugcgugaucgcguggaacagcaacaaccucgacuccaaggucgggggcaacuacaacuaccuguaccgccuguuccgcaagagcaaccucaagcccuucgagcgggacaucuccaccgagaucuaccaggccggcagcacccccugcaacgggguggagggcuucaacugcuacuucccccugcaguccuacggguuccagccgaccaacggcgugggguaccagcccuaccggguggucgugcugagcuucgagcuccugcacgcccccgccacggugugcggccccaagaaguccaccaaccuggucaagaacaagugcgugaacuucaacuucaacggccucaccgggaccggcgugcugaccgagagcaacaagaaguuccugccguuccagcaguucgggcgcgacaucgccgacacgaccgacgcgguccgcgacccccagacccuggagauccucgacaucacccccugcagcuucggcgggguguccgugaucacgccgggcaccaacaccagcaaccaggucgccgugcuguaccagggcgugaacugcaccgagguccccguggccauccacgccgaccagcugacgcccaccuggcggguguacuccaccgggagcaacgucuuccagacccgcgccggcugccucaucggggcggagcacgugaacaacuccuacgagugcgacauccccaucggcgccggcaucugcgccagcuaccagacgcagaccaacuccccgcggcgcgcccggagcguggcgucccagagcaucaucgccuacaccaugucccugggggccgagaacagcgucgccuacuccaacaacagcaucgccauccccaccaacuucacgaucuccgugaccaccgagauccugcccgugagcaugaccaagacgagcgucgacugcaccauguacaucugcggcgacuccaccgagugcagcaaccuccugcugcaguacggguccuucugcacccagcucaaccgcgcgcugacgggcaucgccguggagcaggacaagaacacccaggagguguucgcccaggucaagcagaucuacaagacgcccccgaucaaggacuucgggggcuucaacuucagccagauccugcccgaccccuccaagcccagcaagcgguccuucaucgaggaccuccuguucaacaaggugacccuggccgacgccggcuucaucaagcaguacggggacugccucggcgacaucgcggcccgcgaccugaucugcgcccagaaguucaacgggcugaccgugcucccgccccugcugaccgacgagaugaucgcccaguacaccagcgcccuccuggcgggcaccaucacguccggguggaccuucggcgccggcgccgcccugcagauccccuucgcgaugcagauggccuaccgguucaacgggaucggcgucacccagaacgugcucuacgagaaccagaagcugaucgccaaccaguucaacagcgccaucgggaagauccaggacucccugagcuccaccgccagcgcgcucggcaagcugcaggacguggucaaccagaacgcccaggcccugaacacgcucgugaagcagcuguccagcaacuucggggccaucuccagcgugcugaacgacauccucucccgccuggacccgcccgaggccgagguccagaucgaccggcugaucaccggccgccuccagagccugcagaccuacgugacccagcagcugauccgggcggccgagauccgcgccagcgccaaccucgccgcgaccaagauguccgagugcgugcugggccagagcaagcgggucgacuucugcgggaagggcuaccaccugauguccuucccccagagcgcgccccacggggugguguuccuccacgucacguacgugcccgcccaggagaagaacuucaccaccgccccggccaucugccacgacggcaaggcccacuucccccgcgagggggucuucguguccaacggcacccacugguucgugacgcagcggaacuucuacgagccccagaucaucaccaccgacaacaccuucgucagcggcaacugcgacguggugaucgggaucgucaacaacacgguguacgacccccugcagccggagcuggacuccuucaaggaggagcucgacaaguacuucaagaaccacaccagccccgacguggaccugggcgacaucuccgggaucaacgccagcgucgugaacauccagaaggagaucgaccgccugaacgagguggccaagaaccucaacgagucccugaucgaccugcaggagcucggcaaguacgagcaguacaucaaguggcccugguacaucuggcugggcuucaucgccgggcugaucgcgaucgucaucgugaccaucaugcucugcugcaugaccagcugcugcuccugccugaagggcugcugcagcugcggguccugcugcaaguucgacgaggacgacagcgagccggugcugaagggcgucaagcuccacuacacgugaggacuaguuauaagacugacuagcccgaugggccucccaacgggcccuccuccccuccuugcaccgagauuaaucaaaggcucuuuucagagccaccaaaaaaaaaaaaaaaaaaaaaaaaaaaaaaaaaaaaaaaaaaaaaaaaaaaaaaaaaaaaaaaaaaaaaaaaaaaaaaaaaaaaaaaaaaaaaaaaaaaaa

SEQ ID NO: 24205 - RNA, 4029 nt, Artificial Sequence
  SARS-CoV-2/Wuhan/WIV05/2019__EPI_ISL_402128 spike protein mRNA gc (1-1273)(K986P_V987P_H69del_V70del_A222V_Y453F_S477N_D614G_I692V)
aggagaaagcuuaccauguucguguuccugguccuccugccccuggugagcucccagugcgugaaccucaccacccgcacgcagcugccgcccgccuacaccaacagcuucacccggggcgucuacuaccccgacaagguguuccgcuccagcgugcugcacuccacccaggaccucuuccugcccuucuucagcaacgucacgugguuccacgccaucuccgggaccaacggcaccaagcgguucgacaacccggugcugcccuucaacgacgggguguacuucgcgagcaccgagaaguccaacaucauccgcggcuggaucuucgggacgacccucgacagcaagacccagucccugcugaucgucaacaacgccaccaacguggugaucaaggucugcgaguuccaguucugcaacgaccccuuccucggcguguacuaccacaagaacaacaagagcuggauggaguccgaguuccggguguacagcuccgccaacaacugcacguucgaguacgucagccagcccuuccugauggaccuggagggcaagcaggggaacuucaagaaccuccgcgaguucguguucaagaacaucgacggcuacuucaagaucuacuccaagcacaccccgaucaaccuggugcgggaccugccccagggguucagcguccucgagccccugguggaccugcccaucggcaucaacaucacccgcuuccagacccuccuggcccugcaccgguccuaccucacgccgggggacagcagcuccggcuggaccgccggcgcggccgccuacuacgugggguaccugcagccccgcaccuuccugcucaaguacaacgagaacggcaccaucacggacgccgucgacugcgcgcuggacccccugagcgagaccaagugcacccucaaguccuucaccguggagaaggggaucuaccagacgagcaacuuccgggugcagcccaccgaguccaucguccgcuucccgaacaucaccaaccugugccccuucggcgagguguucaacgccacccgguucgccagcgucuacgccuggaaccgcaagcggaucuccaacugcguggccgacuacagcgugcuguacaacuccgcgagcuucuccacguucaagugcuacggcgucagccccaccaagcucaacgaccugugcuucaccaacguguacgccgacuccuucgugauccgcggggacgagguccggcagaucgcccccggccagaccgggaagaucgccgacuacaacuacaagcugccggacgacuucacgggcugcgugaucgccuggaacagcaacaaccucgacuccaaggucgggggcaacuacaacuaccuguuccgccuguuccgcaagagcaaccucaagcccuucgagcgggacaucuccaccgagaucuaccaggcgggcaacacccccugcaacgggguggagggcuucaacugcuacuucccccugcagagcuacggguuccagccgaccaacggcgugggguaccagcccuaccggguggucgugcuguccuucgagcuccugcacgcccccgccacggugugcggccccaagaaguccaccaaccuggucaagaacaagugcgugaacuucaacuucaacggccucaccgggaccggcgugcugaccgagagcaacaagaaguuccugccguuccagcaguucgggcgcgacaucgccgacacgaccgacgccguccgcgacccccagacccuggagauccucgacaucacccccugcagcuucggcggggugagcgugaucacgccgggcaccaacaccuccaaccaggucgcggugcuguaccagggcgugaacugcaccgagguccccguggccauccacgccgaccagcugacgcccaccuggcggguguacagcaccggguccaacgucuuccagacccgcgccggcugccucaucggggccgagcacgugaacaacagcuacgagugcgacauccccaucggcgcgggcaucugcgccuccuaccagacgcagaccaacagcccgcggcgcgcccgguccguggccagccaguccgucaucgcguacaccaugagccugggggccgagaacuccguggccuacagcaacaacuccaucgccauccccaccaacuucacgaucagcgugaccaccgagauccugcccgucuccaugaccaagacgagcguggacugcaccauguacaucugcggcgacagcaccgagugcuccaaccuccugcugcaguacgggagcuucugcacccagcucaaccgcgcccugacgggcaucgcgguggagcaggacaagaacacccaggaggucuucgcccaggugaagcagaucuacaagacgcccccgaucaaggacuucgggggcuucaacuucucccagauccugcccgaccccagcaagcccuccaagcggagcuucaucgaggaccuccuguucaacaaggugacccuggccgacgccggcuucaucaagcaguacggggacugccucggcgacaucgccgcgcgcgaccugaucugcgcccagaaguucaacgggcugaccguccucccgccccugcugaccgacgagaugaucgcccaguacaccuccgcccuccuggccggcaccaucacgagcggguggaccuucggcgcgggcgccgcccugcagauccccuucgccaugcagauggcguaccgguucaacgggaucggcgugacccagaacgugcucuacgagaaccagaagcugaucgccaaccaguucaacuccgccaucgggaagauccaggacagccuguccagcaccgccuccgcccucggcaagcugcaggacgucgugaaccagaacgcgcaggcccugaacacgcucgugaagcagcugagcuccaacuucggggccaucagcuccguccugaacgacauccucagccgccuggacccgcccgaggccgaggugcagaucgaccggcugaucaccggccgccuccagucccugcagaccuacgugacccagcagcugauccgggccgcggagauccgcgccagcgccaaccucgccgccaccaagaugagcgagugcguccugggccaguccaagcggguggacuucugcgggaagggcuaccaccugaugagcuucccccaguccgcgccccacgggguggucuuccuccacgugacguacguccccgcccaggagaagaacuucaccaccgccccggccaucugccacgacggcaaggcgcacuucccccgcgaggggguguucgugagcaacggcacccacugguucgucacgcagcggaacuucuacgagccccagaucaucaccaccgacaacaccuucguguccggcaacugcgacguggucaucgggaucgugaacaacacgguguacgacccccugcagccggagcuggacagcuucaaggaggagcucgacaaguacuucaagaaccacaccucccccgacgucgaccugggcgacaucagcgggaucaacgccuccguggugaacauccagaaggagaucgaccgccugaacgaggucgccaagaaccucaacgagagccugaucgaccugcaggagcucggcaaguacgagcaguacaucaaguggcccugguacaucuggcugggcuucaucgccgggcugaucgccaucgugauggugaccaucaugcucugcugcaugaccuccugcugcagcugccugaagggcugcugcuccugcgggagcugcugcaaguucgacgaggacgacuccgagccgguccugaagggcgugaagcuccacuacacgugaggacuaguuauaagacugacuagcccgaugggccucccaacgggcccuccuccccuccuugcaccgagauuaaucaaaggcucuuuucagagccaccaaaaaaaaaaaaaaaaaaaaaaaaaaaaaaaaaaaaaaaaaaaaaaaaaaaaaaaaaaaaaaaaaaaaaaaaaaaaaaaaaaaaaaaaaaaaaaaaaaaaa

SEQ ID NO: 24206 - RNA, 4029 nt, Artificial Sequence
  SARS-CoV-2/Wuhan/WIV05/2019__EPI_ISL_402128 spike protein mRNA gc (1-1273)(K986P_V987P_H69del_V70del_Y453F_D614G_I692V_M1229I)
aggagaaagcuuaccauguucguguuccugguccuccugccccuggugagcucccagugcgugaaccucaccacccgcacgcagcugccgcccgccuacaccaacagcuucacccggggcgucuacuaccccgacaagguguuccgcuccagcgugcugcacuccacccaggaccucuuccugcccuucuucagcaacgucacgugguuccacgccaucuccgggaccaacggcaccaagcgguucgacaacccggugcugcccuucaacgacgggguguacuucgcgagcaccgagaaguccaacaucauccgcggcuggaucuucgggacgacccucgacagcaagacccagucccugcugaucgucaacaacgccaccaacguggugaucaaggucugcgaguuccaguucugcaacgaccccuuccucggcguguacuaccacaagaacaacaagagcuggauggaguccgaguuccggguguacagcuccgccaacaacugcacguucgaguacgucagccagcccuuccugauggaccuggagggcaagcaggggaacuucaagaaccuccgcgaguucguguucaagaacaucgacggcuacuucaagaucuacuccaagcacaccccgaucaaccuggugcgggaccugccccagggguucagcgcccucgagccccuggucgaccugcccaucggcaucaacaucacccgcuuccagacccuccuggcccugcaccgguccuaccucacgccgggggacagcagcuccggcuggaccgcgggcgccgccgccuacuacgugggguaccugcagccccgcaccuuccugcucaaguacaacgagaacggcaccaucacggacgcgguggacugcgcccuggacccccugagcgagaccaagugcacccucaaguccuucaccgucgagaaggggaucuaccagacgagcaacuuccgggugcagcccaccgaguccaucgugcgcuucccgaacaucaccaaccugugccccuucggcgaggucuucaacgccacccgguucgccagcguguacgccuggaaccgcaagcggaucuccaacugcgucgcggacuacagcgugcuguacaacuccgccagcuucuccacguucaagugcuacggcgugagccccaccaagcucaacgaccugugcuucaccaacgucuacgccgacuccuucgugauccgcggggacgaggugcggcagaucgcccccggccagaccgggaagaucgccgacuacaacuacaagcugccggacgacuucacgggcugcgucaucgcguggaacagcaacaaccucgacuccaaggucgggggcaacuacaacuaccuguuccgccuguuccgcaagagcaaccucaagcccuucgagcgggacaucuccaccgagaucuaccaggccggcagcacccccugcaacgggguggagggcuucaacugcuacuucccccugcaguccuacggguuccagccgaccaacggcgugggguaccagcccuaccggguggugguccugagcuucgagcuccugcacgcccccgccacggugugcggccccaagaaguccaccaaccuggugaagaacaagugcgucaacuucaacuucaacggccucaccgggaccggcgugcugaccgagagcaacaagaaguuccugccguuccagcaguucgggcgcgacaucgccgacacgaccgacgcggugcgcgacccccagacccuggagauccucgacaucacccccugcagcuucggcggggucuccgugaucacgccgggcaccaacaccagcaaccagguggccguccuguaccagggcgugaacugcaccgaggugcccgucgccauccacgccgaccagcugacgcccaccuggcggguguacuccaccgggagcaacguguuccagacccgcgccggcugccucaucggggcggagcacgucaacaacuccuacgagugcgacauccccaucggcgccggcaucugcgccagcuaccagacgcagaccaacuccccgcggcgcgcccggagcguggcgucccagagcgugaucgccuacaccaugucccugggggccgagaacagcgucgccuacuccaacaacagcaucgccauccccaccaacuucacgaucuccgugaccaccgagauccugcccgugagcaugaccaagacgagcgucgacugcaccauguacaucugcggcgacuccaccgagugcagcaaccuccugcugcaguacggguccuucugcacccagcucaaccgcgcgcugacgggcaucgccguggagcaggacaagaacacccaggagguguucgcccaggucaagcagaucuacaagacgcccccgaucaaggacuucgggggcuucaacuucagccagauccugcccgaccccuccaagcccagcaagcgguccuucaucgaggaccuccuguucaacaaggugacccuggccgacgccggcuucaucaagcaguacggggacugccucggcgacaucgcggcccgcgaccugaucugcgcccagaaguucaacgggcugaccgugcucccgccccugcugaccgacgagaugaucgcccaguacaccagcgcccuccuggcgggcaccaucacguccggguggaccuucggcgccggcgccgcccugcagauccccuucgcgaugcagauggccuaccgguucaacgggaucggcgucacccagaacgugcucuacgagaaccagaagcugaucgccaaccaguucaacagcgccaucgggaagauccaggacucccugagcuccaccgccagcgcgcucggcaagcugcaggacguggucaaccagaacgcccaggcccugaacacgcucgugaagcagcuguccagcaacuucggggccaucuccagcgugcugaacgacauccucucccgccuggacccgcccgaggccgagguccagaucgaccggcugaucaccggccgccuccagagccugcagaccuacgugacccagcagcugauccgggcggccgagauccgcgccagcgccaaccucgccgcgaccaagauguccgagugcgugcugggccagagcaagcgggucgacuucugcgggaagggcuaccaccugauguccuucccccagagcgcgccccacggggugguguuccuccacgucacguacgugcccgcccaggagaagaacuucaccaccgccccggccaucugccacgacggcaaggcccacuucccccgcgagggggucuucguguccaacggcacccacugguucgugacgcagcggaacuucuacgagccccagaucaucaccaccgacaacaccuucgucagcggcaacugcgacguggugaucgggaucgucaacaacacgguguacgacccccugcagccggagcuggacuccuucaaggaggagcucgacaaguacuucaagaaccacaccagccccgacguggaccugggcgacaucuccgggaucaacgccagcgucgugaacauccagaaggagaucgaccgccugaacgagguggccaagaaccucaacgagucccugaucgaccugcaggagcucggcaaguacgagcaguacaucaaguggcccugguacaucuggcugggcuucaucgccgggcugaucgcgaucgucaucgugaccaucaugcucugcugcaugaccagcugcugcuccugccugaagggcugcugcagcugcggguccugcugcaaguucgacgaggacgacagcgagccggugcugaagggcgucaagcuccacuacacgugaggacuaguuauaagacugacuagcccgaugggccucccaacgggcccuccuccccuccuugcaccgagauuaaucaaaggcucuuuucagagccaccaaaaaaaaaaaaaaaaaaaaaaaaaaaaaaaaaaaaaaaaaaaaaaaaaaaaaaaaaaaaaaaaaaaaaaaaaaaaaaaaaaaaaaaaaaaaaaaaaaaaa

SEQ ID NO: 24207 - RNA, 4026 nt, Artificial Sequence
  SARS-CoV-2/Wuhan/WIV05/2019__EPI_ISL_402128 spike protein mRNA gc (1-1273)(K986P_V987P_K986P_V987P_H69del_V70del_Y144del_N501Y_A570 D_D614G_P681H_T716I_S982A_D1118H)
aggagaaagcuuaccauguucguguuccugguccuccugccccuggugagcucccagugcgugaaccucaccacccgcacgcagcugccgcccgccuacaccaacagcuucacccggggcgucuacuaccccgacaagguguuccgcuccagcgugcugcacuccacccaggaccucuuccugcccuucuucagcaacgucacgugguuccacgccaucuccgggaccaacggcaccaagcgguucgacaacccggugcugcccuucaacgacgggguguacuucgcgagcaccgagaaguccaacaucauccgcggcuggaucuucgggacgacccucgacagcaagacccagucccugcugaucgucaacaacgccaccaacguggugaucaaggucugcgaguuccaguucugcaacgaccccuuccucggcguguaccacaagaacaacaagagcuggauggaguccgaguuccggguguacagcuccgccaacaacugcacguucgaguacgucagccagcccuuccugauggaccuggagggcaagcaggggaacuucaagaaccuccgcgaguucguguucaagaacaucgacggcuacuucaagaucuacuccaagcacaccccgaucaaccuggugcgggaccugccccagggguucagcgcccucgagccccuggucgaccugcccaucggcaucaacaucacccgcuuccagacccuccuggcccugcaccgguccuaccucacgccgggggacagcagcuccggcuggaccgcgggcgccgccgccuacuacgugggguaccugcagccccgcaccuuccugcucaaguacaacgagaacggcaccaucacggacgcgguggacugcgcccuggacccccugagcgagaccaagugcacccucaaguccuucaccgucgagaaggggaucuaccagacgagcaacuuccgggugcagcccaccgaguccaucgugcgcuucccgaacaucaccaaccugugccccuucggcgaggucuucaacgccacccgguucgccagcguguacgccuggaaccgcaagcggaucuccaacugcgucgcggacuacagcgugcuguacaacuccgccagcuucuccacguucaagugcuacggcgugagccccaccaagcucaacgaccugugcuucaccaacgucuacgccgacuccuucgugauccgcggggacgaggugcggcagaucgcccccggccagaccgggaagaucgccgacuacaacuacaagcugccggacgacuucacgggcugcgucaucgcguggaacagcaacaaccucgacuccaaggucgggggcaacuacaacuaccuguaccgccuguuccgcaagagcaaccucaagcccuucgagcgggacaucuccaccgagaucuaccaggccggcagcacccccugcaacgggguggagggcuucaacugcuacuucccccugcaguccuacggguuccagccgaccuacggcgugggguaccagcccuaccggguggugguccugagcuucgagcuccugcacgcccccgccacggugugcggccccaagaaguccaccaaccuggugaagaacaagugcgucaacuucaacuucaacggccucaccgggaccggcgugcugaccgagagcaacaagaaguuccugccguuccagcaguucgggcgcgacaucgacgacacgaccgacgccgugcgcgacccccagacccuggagauccucgacaucacccccugcagcuucggcggggucuccgugaucacgccgggcaccaacaccagcaaccagguggcgguccuguaccagggcgugaacugcaccgaggugcccgucgccauccacgccgaccagcugacgcccaccuggcggguguacuccaccgggagcaacguguuccagacccgcgccggcugccucaucggggccgagcacgucaacaacuccuacgagugcgacauccccaucggcgcgggcaucugcgccagcuaccagacgcagaccaacucccaccggcgcgcccggagcguggccucccagagcaucaucgcguacaccaugucccugggggccgagaacagcguggccuacuccaacaacagcaucgccaucccgaucaacuucaccaucuccgucacgaccgagauccugcccgugagcaugaccaagaccagcguggacugcacgauguacaucugcggcgacuccaccgagugcagcaaccuccugcugcaguacggguccuucugcacccagcucaaccgcgcccugaccggcaucgcggucgagcaggacaagaacacgcaggagguguucgcccaggugaagcagaucuacaagaccccgcccaucaaggacuucgggggcuucaacuucagccagauccugcccgaccccuccaagcccagcaagcgguccuucaucgaggaccuccuguucaacaaggucacccuggccgacgccggcuucaucaagcaguacggggacugccucggcgacaucgccgcgcgcgaccugaucugcgcccagaaguucaacgggcugaccgugcugcccccgcuccugacggacgagaugaucgcccaguacaccagcgcccuccuggccggcaccaucaccuccggguggacguucggcgcgggcgccgcccugcagauccccuucgccaugcagauggcguaccgguucaacgggaucggcgugacccagaacguccucuacgagaaccagaagcugaucgccaaccaguucaacagcgccaucgggaagauccaggacucccugagcuccaccgccagcgcccucggcaagcugcaggacguggugaaccagaacgcgcaggcccugaacacccucgucaagcagcuguccagcaacuucggggccaucuccagcgugcugaacgacauccucgcccgccuggacccgcccgaggccgaggugcagaucgaccggcugaucacgggccgccuccagucccugcagaccuacgucacccagcagcugauccgggcggccgagauccgcgccagcgccaaccucgccgcgaccaagaugagcgagugcgugcugggccaguccaagcggguggacuucugcgggaagggcuaccaccugaugagcuucccccaguccgcgccccacggggucguguuccuccacgugaccuacguccccgcccaggagaagaacuucacgaccgcccccgccaucugccacgacggcaaggcccacuucccgcgcgaggggguguucgucagcaacggcacccacugguucgugacccagcggaacuucuacgagccccagaucaucacgacccacaacaccuucguguccggcaacugcgacgucgugaucgggaucgugaacaacaccgucuacgacccccugcagcccgagcuggacagcuucaaggaggagcucgacaaguacuucaagaaccacacguccccggacguggaccugggcgacaucagcgggaucaacgccuccguggucaacauccagaaggagaucgaccgccugaacgagguggccaagaaccucaacgagagccugaucgaccugcaggagcucggcaaguacgagcaguacaucaaguggcccugguacaucuggcugggcuucaucgccgggcugaucgcgaucgugauggucaccaucaugcucugcugcaugaccuccugcugcagcugccugaagggcugcugcuccugcgggagcugcugcaaguucgacgaggacgacuccgagcccgugcugaagggcgugaagcuccacuacaccugaggacuaguuauaagacugacuagcccgaugggccucccaacgggcccuccuccccuccuugcaccgagauuaaucaaaggcucuuuucagagccaccaaaaaaaaaaaaaaaaaaaaaaaaaaaaaaaaaaaaaaaaaaaaaaaaaaaaaaaaaaaaaaaaaaaaaaaaaaaaaaaaaaaaaaaaaaaaaaaaaaaaa

SEQ ID NO: 24208 - RNA, 4035 nt, Artificial Sequence
  SARS-CoV-2/Wuhan/WIV05/2019__EPI_ISL_402128 spike protein mRNA gc (1-1273)(K986P_V987P_K986P_V987P_K417N_E484K_N501Y_D614G)
aggagaaagcuuaccauguucguguuccugguccuccugccccuggugagcucccagugcgugaaccucaccacccgcacgcagcugccgcccgccuacaccaacagcuucacccggggcgucuacuaccccgacaagguguuccgcuccagcgugcugcacuccacccaggaccucuuccugcccuucuucagcaacgucacgugguuccacgccauccacguguccgggaccaacggcaccaagcgguucgacaacccggugcugcccuucaacgacggggucuacuucgcgagcaccgagaaguccaacaucauccgcggcuggaucuucgggacgacccucgacagcaagacccagucccugcugaucgugaacaacgccaccaacguggucaucaaggugugcgaguuccaguucugcaacgaccccuuccucggcguguacuaccacaagaacaacaagagcuggauggaguccgaguuccgggucuacagcuccgccaacaacugcacguucgaguacgugagccagcccuuccugauggaccuggagggcaagcaggggaacuucaagaaccuccgcgaguucguguucaagaacaucgacggcuacuucaagaucuacuccaagcacaccccgaucaaccugguccgggaccugccccagggguucagcgcccucgagccccugguggaccugcccaucggcaucaacaucacccgcuuccagacccuccuggcccugcaccgguccuaccucacgccgggggacagcagcuccggcuggaccgcgggcgccgccgccuacuacgugggguaccugcagccccgcaccuuccugcucaaguacaacgagaacggcaccaucacggacgcggucgacugcgcccuggacccccugagcgagaccaagugcacccucaaguccuucaccguggagaaggggaucuaccagacgagcaacuuccgggugcagcccaccgaguccaucguccgcuucccgaacaucaccaaccugugccccuucggcgagguguucaacgccacccgguucgccagcgucuacgccuggaaccgcaagcggaucuccaacugcguggcggacuacagcgugcuguacaacuccgccagcuucuccacguucaagugcuacggcgucagccccaccaagcucaacgaccugugcuucaccaacguguacgccgacuccuucgugauccgcggggacgagguccggcagaucgcccccggccagaccgggaacaucgccgacuacaacuacaagcugccggacgacuucacgggcugcgugaucgcguggaacagcaacaaccucgacuccaaggucgggggcaacuacaacuaccuguaccgccuguuccgcaagagcaaccucaagcccuucgagcgggacaucuccaccgagaucuaccaggccggcagcacccccugcaacggggugaagggcuucaacugcuacuucccccugcaguccuacggguuccagccgaccuacggcgugggguaccagcccuaccggguggucgugcugagcuucgagcuccugcacgcccccgccacggugugcggccccaagaaguccaccaaccuggucaagaacaagugcgugaacuucaacuucaacggccucaccgggaccggcgugcugaccgagagcaacaagaaguuccugccguuccagcaguucgggcgcgacaucgccgacacgaccgacgcgguccgcgacccccagacccuggagauccucgacaucacccccugcagcuucggcgggguguccgugaucacgccgggcaccaacaccagcaaccaggucgccgugcuguaccagggcgugaacugcaccgagguccccguggccauccacgccgaccagcugacgcccaccuggcggguguacuccaccgggagcaacgucuuccagacccgcgccggcugccucaucggggcggagcacgugaacaacuccuacgagugcgacauccccaucggcgccggcaucugcgccagcuaccagacgcagaccaacuccccgcggcgcgcccggagcguggcgucccagagcaucaucgccuacaccaugucccugggggccgagaacagcgucgccuacuccaacaacagcaucgccauccccaccaacuucacgaucuccgugaccaccgagauccugcccgugagcaugaccaagacgagcgucgacugcaccauguacaucugcggcgacuccaccgagugcagcaaccuccugcugcaguacggguccuucugcacccagcucaaccgcgcgcugacgggcaucgccguggagcaggacaagaacacccaggagguguucgcccaggucaagcagaucuacaagacgcccccgaucaaggacuucgggggcuucaacuucagccagauccugcccgaccccuccaagcccagcaagcgguccuucaucgaggaccuccuguucaacaaggugacccuggccgacgccggcuucaucaagcaguacggggacugccucggcgacaucgcggcccgcgaccugaucugcgcccagaaguucaacgggcugaccgugcucccgccccugcugaccgacgagaugaucgcccaguacaccagcgcccuccuggcgggcaccaucacguccggguggaccuucggcgccggcgccgcccugcagauccccuucgcgaugcagauggccuaccgguucaacgggaucggcgucacccagaacgugcucuacgagaaccagaagcugaucgccaaccaguucaacagcgccaucgggaagauccaggacucccugagcuccaccgccagcgcgcucggcaagcugcaggacguggucaaccagaacgcccaggcccugaacacgcucgugaagcagcuguccagcaacuucggggccaucuccagcgugcugaacgacauccucucccgccuggacccgcccgaggccgagguccagaucgaccggcugaucaccggccgccuccagagccugcagaccuacgugacccagcagcugauccgggcggccgagauccgcgccagcgccaaccucgccgcgaccaagauguccgagugcgugcugggccagagcaagcgggucgacuucugcgggaagggcuaccaccugauguccuucccccagagcgcgccccacggggugguguuccuccacgucacguacgugcccgcccaggagaagaacuucaccaccgccccggccaucugccacgacggcaaggcccacuucccccgcgagggggucuucguguccaacggcacccacugguucgugacgcagcggaacuucuacgagccccagaucaucaccaccgacaacaccuucgucagcggcaacugcgacguggugaucgggaucgucaacaacacgguguacgacccccugcagccggagcuggacuccuucaaggaggagcucgacaaguacuucaagaaccacaccagccccgacguggaccugggcgacaucuccgggaucaacgccagcgucgugaacauccagaaggagaucgaccgccugaacgagguggccaagaaccucaacgagucccugaucgaccugcaggagcucggcaaguacgagcaguacaucaaguggcccugguacaucuggcugggcuucaucgccgggcugaucgcgaucgucauggugaccaucaugcucugcugcaugaccagcugcugcuccugccugaagggcugcugcagcugcggguccugcugcaaguucgacgaggacgacagcgagccggugcugaagggcgucaagcuccacuacacgugaggacuaguuauaagacugacuagcccgaugggccucccaacgggcccuccuccccuccuugcaccgagauuaaucaaaggcucuuuucagagccaccaaaaaaaaaaaaaaaaaaaaaaaaaaaaaaaaaaaaaaaaaaaaaaaaaaaaaaaaaaaaaaaaaaaaaaaaaaaaaaaaaaaaaaaaaaaaaaaaaaaaa

SEQ ID NO: 24209 - RNA, 4026 nt, Artificial Sequence
  SARS-CoV-2/Wuhan/WIV05/2019__EPI_ISL_402128 spike protein mRNA gc (1-1273)(K986P_V987P_K986P_V987P_L18F_D80A_D215G_L242del_A243del_ L244del_R246I_K417N_E484K_N501Y_D614G_A701V)
aggagaaagcuuaccauguucguguuccugguccuccugccccuggugagcucccagugcgugaacuucaccacccgcacgcagcucccgcccgccuacaccaacagcuucacccggggcgucuacuaccccgacaagguguuccgcuccagcgugcugcacuccacccaggaccuguuccuccccuucuucagcaacgucacgugguuccacgccauccacguguccgggaccaacggcaccaagcgguucgcgaacccggugcugcccuucaacgacggggucuacuucgccagcaccgagaaguccaacaucauccgcggcuggaucuucgggacgacccuggacagcaagacccagucccuccugaucgugaacaacgccaccaacguggucaucaaggugugcgaguuccaguucugcaacgaccccuuccugggcguguacuaccacaagaacaacaagagcuggauggaguccgaguuccgggucuacagcuccgccaacaacugcacguucgaguacgugagccagcccuuccucauggaccuggagggcaagcaggggaacuucaagaaccugcgcgaguucguguucaagaacaucgacggcuacuucaagaucuacuccaagcacaccccgaucaaccucguccgggggcugccccagggcuucagcgcccuggagccccucguggaccugcccaucgggaucaacaucacccgcuuccagacccugcacaucuccuaccucacgccgggcgacagcagcuccggcuggaccgcgggggccgccgccuacuacgugggcuaccugcagccccggaccuuccugcucaaguacaacgagaacgggaccaucacggacgcggucgacugcgcccuggacccccugagcgagaccaagugcacccucaaguccuucaccguggagaagggcaucuaccagacgagcaacuuccgcgugcagcccaccgaguccaucguccgguucccgaacaucaccaaccugugccccuucggcgagguguucaacgccacccgcuucgccagcgucuacgccuggaaccggaagcgcaucuccaacugcguggcggacuacagcgugcuguacaacuccgccagcuucuccacguucaagugcuacggggucagccccaccaagcucaacgaccugugcuucaccaacguguacgccgacuccuucgugauccggggcgacgagguccgccagaucgcccccgggcagaccggcaacaucgccgacuacaacuacaagcugccggacgacuucacggggugcgugaucgcguggaacagcaacaaccucgacuccaaggugggcggcaacuacaacuaccuguaccggcuguuccgcaagagcaaccucaagcccuucgagcgggacaucuccaccgagaucuaccaggccgggagcacccccugcaacggcgucaagggguucaacugcuacuucccccugcaguccuacggcuuccagccgaccuacggggugggcuaccagcccuaccgcguggucgugcugagcuucgagcuccugcacgcccccgccacggugugcggccccaagaaguccaccaaccuggucaagaacaagugcgugaacuucaacuucaacgggcucaccggcaccggggugcugaccgagagcaacaagaaguuccugccguuccagcaguucggccgggacaucgccgacacgaccgacgcgguccgcgacccccagacccucgagauccuggacaucacccccugcagcuucgggggcguguccgugaucacgccgggcaccaacaccagcaaccaggucgccgugcuguaccagggggugaacugcaccgagguccccguggccauccacgccgaccagcugacgcccaccuggcgcguguacuccaccggcagcaacgucuuccagacccgggccgggugccucaucggcgcggagcacgugaacaacuccuacgagugcgacauccccaucggcgccgggaucugcgccagcuaccagacgcagaccaacuccccgcgccgggcccgcagcguggcgucccagagcaucaucgccuacaccaugucccugggcgucgagaacagcguggccuacuccaacaacagcaucgccauccccaccaacuucacgaucuccgugaccaccgagauccugcccgucagcaugaccaagacgagcguggacugcaccauguacaucugcggggacuccaccgagugcagcaaccuccugcugcaguacggcuccuucugcacccagcucaaccgggcccugacggggaucgcgguggagcaggacaagaacacccaggaggucuucgcccaggugaagcagaucuacaagacgcccccgaucaaggacuucggcggcuucaacuucagccagauccugcccgaccccuccaagcccagcaagcgcuccuucaucgaggaccuccuguucaacaaggugacccuggccgacgccggguucaucaagcaguacggcgacugccucggggacaucgccgcgcgggaccugaucugcgcccagaaguucaacggccugaccguccucccgccccugcugaccgacgagaugaucgcccaguacaccagcgcccuccuggccgggaccaucacguccggcuggaccuucggcgcgggggccgcccugcagauccccuucgccaugcagauggcguaccgcuucaacggcaucggggugacccagaacgugcucuacgagaaccagaagcugaucgccaaccaguucaacagcgccaucggcaagauccaggacucccugagcuccaccgccagcgcccucgggaagcugcaggacgucgugaaccagaacgcgcaggcccugaacacgcucgugaagcagcuguccagcaacuucggcgccaucuccagcguccugaacgacauccucucccggcuggacccgcccgaggccgaggugcagaucgaccgccugaucaccggccggcuccagagccugcagaccuacgugacccagcagcugauccgcgccgcggagauccgggccagcgccaaccucgccgccaccaagauguccgagugcguccuggggcagagcaagcgcguggacuucugcggcaagggguaccaccugauguccuucccccagagcgcgccccacggcguggucuuccuccacgugacguacguccccgcccaggagaagaacuucaccaccgccccggccaucugccacgacgggaaggcgcacuucccccgggagggcguguucguguccaacggcacccacugguucgucacgcagcgcaacuucuacgagccccagaucaucaccaccgacaacaccuucgugagcgggaacugcgacguggucaucggcaucgugaacaacacgguguacgacccccugcagccggagcuggacuccuucaaggaggagcucgacaaguacuucaagaaccacaccagccccgacgucgaccugggggacaucuccggcaucaacgccagcguggugaacauccagaaggagaucgaccggcugaacgaggucgccaagaaccucaacgagucccugaucgaccugcaggagcucggcaaguacgagcaguacaucaaguggcccugguacaucuggcugggguucaucgccggccugaucgccaucgugauggugaccaucaugcucugcugcaugaccagcugcugcuccugccugaaggggugcugcagcugcggcuccugcugcaaguucgacgaggacgacagcgagccgguccugaagggggugaagcuccacuacacgugaggacuaguuauaagacugacuagcccgaugggccucccaacgggcccuccuccccuccuugcaccgagauuaaucaaaggcucuuuucagagccaccaaaaaaaaaaaaaaaaaaaaaaaaaaaaaaaaaaaaaaaaaaaaaaaaaaaaaaaaaaaaaaaaaaaaaaaaaaaaaaaaaaaaaaaaaaaaaaaaaaaaa

SEQ ID NO: 24210 - RNA, 4035 nt, Artificial Sequence
  SARS-CoV-2/Wuhan/WIV05/2019__EPI_ISL_402128 spike protein mRNA gc (1-1273)(K986P_V987P_K986P_V987P_E484K_D614G)
aggagaaagcuuaccauguucguguuccugguccuccugccccuggugagcucccagugcgugaaccucaccacccgcacgcagcugccgcccgccuacaccaacagcuucacccggggcgucuacuaccccgacaagguguuccgcuccagcgugcugcacuccacccaggaccucuuccugcccuucuucagcaacgucacgugguuccacgccauccacguguccgggaccaacggcaccaagcgguucgacaacccggugcugcccuucaacgacggggucuacuucgcgagcaccgagaaguccaacaucauccgcggcuggaucuucgggacgacccucgacagcaagacccagucccugcugaucgugaacaacgccaccaacguggucaucaaggugugcgaguuccaguucugcaacgaccccuuccucggcguguacuaccacaagaacaacaagagcuggauggaguccgaguuccgggucuacagcuccgccaacaacugcacguucgaguacgugagccagcccuuccugauggaccuggagggcaagcaggggaacuucaagaaccuccgcgaguucguguucaagaacaucgacggcuacuucaagaucuacuccaagcacaccccgaucaaccugguccgggaccugccccagggguucagcgcccucgagccccugguggaccugcccaucggcaucaacaucacccgcuuccagacccuccuggcccugcaccgguccuaccucacgccgggggacagcagcuccggcuggaccgcgggcgccgccgccuacuacgugggguaccugcagccccgcaccuuccugcucaaguacaacgagaacggcaccaucacggacgcggucgacugcgcccuggacccccugagcgagaccaagugcacccucaaguccuucaccguggagaaggggaucuaccagacgagcaacuuccgggugcagcccaccgaguccaucguccgcuucccgaacaucaccaaccugugccccuucggcgagguguucaacgccacccgguucgccagcgucuacgccuggaaccgcaagcggaucuccaacugcguggcggacuacagcgugcuguacaacuccgccagcuucuccacguucaagugcuacggcgucagccccaccaagcucaacgaccugugcuucaccaacguguacgccgacuccuucgugauccgcggggacgagguccggcagaucgcccccggccagaccgggaagaucgccgacuacaacuacaagcugccggacgacuucacgggcugcgugaucgcguggaacagcaacaaccucgacuccaaggucgggggcaacuacaacuaccuguaccgccuguuccgcaagagcaaccucaagcccuucgagcgggacaucuccaccgagaucuaccaggccggcagcacccccugcaacggggugaagggcuucaacugcuacuucccccugcaguccuacggguuccagccgaccaacggcgugggguaccagcccuaccggguggucgugcugagcuucgagcuccugcacgcccccgccacggugugcggccccaagaaguccaccaaccuggucaagaacaagugcgugaacuucaacuucaacggccucaccgggaccggcgugcugaccgagagcaacaagaaguuccugccguuccagcaguucgggcgcgacaucgccgacacgaccgacgcgguccgcgacccccagacccuggagauccucgacaucacccccugcagcuucggcgggguguccgugaucacgccgggcaccaacaccagcaaccaggucgccgugcuguaccagggcgugaacugcaccgagguccccguggccauccacgccgaccagcugacgcccaccuggcggguguacuccaccgggagcaacgucuuccagacccgcgccggcugccucaucggggcggagcacgugaacaacuccuacgagugcgacauccccaucggcgccggcaucugcgccagcuaccagacgcagaccaacuccccgcggcgcgcccggagcguggcgucccagagcaucaucgccuacaccaugucccugggggccgagaacagcgucgccuacuccaacaacagcaucgccauccccaccaacuucacgaucuccgugaccaccgagauccugcccgugagcaugaccaagacgagcgucgacugcaccauguacaucugcggcgacuccaccgagugcagcaaccuccugcugcaguacggguccuucugcacccagcucaaccgcgcgcugacgggcaucgccguggagcaggacaagaacacccaggagguguucgcccaggucaagcagaucuacaagacgcccccgaucaaggacuucgggggcuucaacuucagccagauccugcccgaccccuccaagcccagcaagcgguccuucaucgaggaccuccuguucaacaaggugacccuggccgacgccggcuucaucaagcaguacggggacugccucggcgacaucgcggcccgcgaccugaucugcgcccagaaguucaacgggcugaccgugcucccgccccugcugaccgacgagaugaucgcccaguacaccagcgcccuccuggcgggcaccaucacguccggguggaccuucggcgccggcgccgcccugcagauccccuucgcgaugcagauggccuaccgguucaacgggaucggcgucacccagaacgugcucuacgagaaccagaagcugaucgccaaccaguucaacagcgccaucgggaagauccaggacucccugagcuccaccgccagcgcgcucggcaagcugcaggacguggucaaccagaacgcccaggcccugaacacgcucgugaagcagcuguccagcaacuucggggccaucuccagcgugcugaacgacauccucucccgccuggacccgcccgaggccgagguccagaucgaccggcugaucaccggccgccuccagagccugcagaccuacgugacccagcagcugauccgggcggccgagauccgcgccagcgccaaccucgccgcgaccaagauguccgagugcgugcugggccagagcaagcgggucgacuucugcgggaagggcuaccaccugauguccuucccccagagcgcgccccacggggugguguuccuccacgucacguacgugcccgcccaggagaagaacuucaccaccgccccggccaucugccacgacggcaaggcccacuucccccgcgagggggucuucguguccaacggcacccacugguucgugacgcagcggaacuucuacgagccccagaucaucaccaccgacaacaccuucgucagcggcaacugcgacguggugaucgggaucgucaacaacacgguguacgacccccugcagccggagcuggacuccuucaaggaggagcucgacaaguacuucaagaaccacaccagccccgacguggaccugggcgacaucuccgggaucaacgccagcgucgugaacauccagaaggagaucgaccgccugaacgagguggccaagaaccucaacgagucccugaucgaccugcaggagcucggcaaguacgagcaguacaucaaguggcccugguacaucuggcugggcuucaucgccgggcugaucgcgaucgucauggugaccaucaugcucugcugcaugaccagcugcugcuccugccugaagggcugcugcagcugcggguccugcugcaaguucgacgaggacgacagcgagccggugcugaagggcgucaagcuccacuacacgugaggacuaguuauaagacugacuagcccgaugggccucccaacgggcccuccuccccuccuugcaccgagauuaaucaaaggcucuuuucagagccaccaaaaaaaaaaaaaaaaaaaaaaaaaaaaaaaaaaaaaaaaaaaaaaaaaaaaaaaaaaaaaaaaaaaaaaaaaaaaaaaaaaaaaaaaaaaaaaaaaaaaa

SEQ ID NO: 24211 - RNA, 4035 nt, Artificial Sequence
  SARS-CoV-2/Wuhan/WIV05/2019__EPI_ISL_402128 spike protein mRNA gc (1-1273)(K986P_V987P_K986P_V987P_L18F_T20N_P26S_D138Y_R190S_K417T _E484K_N501Y_D614G_H655Y_T1027I)
aggagaaagcuuaccauguucguguuccugguccuccugccccuggugagcucccagugcgugaacuucaccaaccgcacccagcucccgagcgccuacacgaacuccuucacccggggcgucuacuaccccgacaagguguuccgcagcuccgugcugcacagcacccaggaccuguuccuccccuucuucuccaacgucaccugguuccacgccauccacgugagcgggacgaacggcaccaagcgguucgacaaccccgugcugccguucaacgacggggucuacuucgcguccaccgagaaguccaacaucauccgcggcuggaucuucgggaccacgcuggacuccaagacccagagccuccugaucgugaacaacgccaccaacguggucaucaaggugugcgaguuccaguucugcaacuaccccuuccugggcguguacuaccacaagaacaacaaguccuggauggagagcgaguuccgggucuacuccagcgccaacaacugcaccuucgaguacgugucccagcccuuccucauggaccuggagggcaagcaggggaacuucaagaaccugagcgaguucguguucaagaacaucgacggcuacuucaagaucuacuccaagcacacgcccaucaaccucguccgcgaccugccgcagggguucagcgcccuggagccccucguggaccugcccaucggcaucaacaucacccgguuccagacccugcucgcccugcaccgcagcuaccugacccccggggacuccagcuccggcuggacggcgggcgccgccgccuacuacgugggguaccuccagccgcggaccuuccugcugaaguacaacgagaacggcaccaucaccgacgcggucgacugcgcccucgacccccugagcgagacgaagugcacccugaaguccuucaccguggagaaggggaucuaccagaccagcaacuuccgcgugcagcccacggaguccaucguccgguuccccaacaucaccaaccucugcccguucggcgagguguucaacgccacccgcuucgccagcgucuacgccuggaaccggaagcgcaucuccaacugcguggcggacuacagcgugcuguacaacuccgccagcuucuccaccuucaagugcuacggcgucagccccacgaagcugaacgaccucugcuucaccaacguguacgccgacuccuucgugauccgcggggacgagguccggcagaucgcccccggccagaccgggaccaucgccgacuacaacuacaagcugcccgacgacuucacgggcugcgugaucgcguggaacagcaacaaccuggacuccaaggucgggggcaacuacaacuaccucuaccggcuguuccgcaagagcaaccugaagccguucgagcgggacaucuccaccgagaucuaccaggccggcagcacccccugcaacggggugaagggcuucaacugcuacuucccccuccagagcuacggguuccagcccaccuacggcgugggguaccagccguaccgcguggucgugcuguccuucgagcugcuccacgcccccgccacggugugcggccccaagaaguccaccaaccuggucaagaacaagugcgugaacuucaacuucaacggccugaccgggaccggcgugcucaccgagagcaacaagaaguuccugcccuuccagcaguucgggcgggacaucgccgacacgaccgacgcgguccgcgacccgcagacccuggagauccuggacaucacccccugcagcuucggcgggguguccgugaucacgcccggcaccaacaccagcaaccaggucgccgugcucuaccagggcgugaacugcaccgaggucccgguggccauccacgccgaccagcugacgcccaccuggcgcguguacuccaccgggagcaacgucuuccagacccgggccggcugccugaucggggcggaguacgugaacaacuccuacgagugcgacauccccaucggcgccggcaucugcgccagcuaccagacgcagaccaacagcccccgccgggcccgcagcguggcgucccagagcaucaucgccuacaccaugucccucggggccgagaacagcgucgccuacuccaacaacagcaucgccaucccgaccaacuucacgaucagcgugaccaccgagauccugcccguguccaugaccaagacgagcgucgacugcaccauguacaucugcggcgacuccaccgagugcagcaaccugcuccugcaguacggguccuucugcacccagcugaaccgggcgcucacgggcaucgccguggagcaggacaagaacacccaggagguguucgcccaggucaagcagaucuacaagaccccgcccaucaaggacuucgggggcuucaacuucagccagauccugcccgaccccuccaagcccagcaagcgcuccuucaucgaggaccuccuguucaacaaggugacccuggccgacgccggcuucaucaagcaguacggggacugccugggcgacaucgcggcccgggaccucaucugcgcccagaaguucaacgggcugacggugcugcccccgcuccugaccgacgagaugaucgcccaguacaccagcgcccugcucgcgggcaccaucacguccggguggaccuucggcgccggcgccgcccugcagauccccuucgcgaugcagauggccuaccgcuucaacgggaucggcgucacccagaacgugcuguacgagaaccagaagcucaucgccaaccaguucaacagcgccaucgggaagauccaggacucccugagcuccaccgccagcgcgcugggcaagcuccaggacguggucaaccagaacgcccaggcccugaacacgcuggugaagcagcucuccagcaacuucggggccaucuccagcgugcugaacgacauccugagccggcucgacccgcccgaggccgagguccagaucgaccgccugaucaccggccggcugcagucccuccagaccuacgugacccagcagcugauccgcgcggccgagauccgggccagcgccaaccuggccgcgaucaagauguccgagugcgugcucggccagagcaagcgcgucgacuucugcgggaagggcuaccaccugauguccuucccccagagcgcgccccacggggugguguuccugcacgucaccuacgugcccgcccaggagaagaacuucacgaccgcccccgccaucugccacgacggcaaggcccacuucccgcgggagggggucuucguguccaacggcacccacugguucgugacccagcgcaacuucuacgagccccagaucaucacgaccgacaacaccuucgucagcggcaacugcgacguggugaucgggaucgucaacaacaccguguacgacccccuccagcccgagcuggacuccuucaaggaggagcuggacaaguacuucaagaaccacacgagcccggacguggaccucggcgacaucuccgggaucaacgccagcgucgugaacauccagaaggagaucgaccggcugaacgagguggccaagaaccugaacgagucccucaucgaccugcaggagcugggcaaguacgagcaguacaucaaguggcccugguacaucuggcucggcuucaucgccgggcugaucgcgaucgucauggugaccaucaugcugugcugcaugaccagcugcugcuccugccucaagggcugcugcagcugcggguccugcugcaaguucgacgaggacgacagcgagcccgugcugaagggcgucaagcugcacuacaccugaggacuaguuauaagacugacuagcccgaugggccucccaacgggcccuccuccccuccuugcaccgagauuaaucaaaggcucuuuucagagccaccaaaaaaaaaaaaaaaaaaaaaaaaaaaaaaaaaaaaaaaaaaaaaaaaaaaaaaaaaaaaaaaaaaaaaaaaaaaaaaaaaaaaaaaaaaaaaaaaaaaaa

SEQ ID NO: 24212 - RNA, 4035 nt, Artificial Sequence
  SARS-CoV-2/Wuhan/WIV05/2019__EPI_ISL_402128 spike protein mRNA gc (1-1273)(K986P_V987P_K986P_V987P_S13I_W152C_L452R_D614G)
aggagaaagcuuaccauguucguguuccugguccuccugccccuggugagcauccagugcgugaaccucaccacccgcacgcagcugccgcccgccuacaccaacuccuucacccggggcgucuacuaccccgacaagguguuccgcagcuccgugcugcacagcacccaggaccucuuccugcccuucuucuccaacgucacgugguuccacgccauccacgugagcgggaccaacggcaccaagcgguucgacaacccggugcugcccuucaacgacggggucuacuucgcguccaccgagaaguccaacaucauccgcggcuggaucuucgggacgacccucgacagcaagacccagagccugcugaucgugaacaacgccaccaacguggucaucaaggugugcgaguuccaguucugcaacgaccccuuccucggcguguacuaccacaagaacaacaaguccugcauggagagcgaguuccgggucuacuccagcgccaacaacugcacguucgaguacgugucccagcccuuccugauggaccuggagggcaagcaggggaacuucaagaaccuccgcgaguucguguucaagaacaucgacggcuacuucaagaucuacagcaagcacaccccgaucaaccugguccgggaccugccccagggguucuccgcccucgagccccugguggaccugcccaucggcaucaacaucacccgcuuccagacccuccuggcccugcaccggagcuaccucacgccgggggacuccagcagcggcuggaccgcgggcgccgccgccuacuacgugggguaccugcagccccgcaccuuccugcucaaguacaacgagaacggcaccaucacggacgcggucgacugcgcccuggacccccuguccgagaccaagugcacccucaagagcuucaccguggagaaggggaucuaccagacguccaacuuccgggugcagcccaccgagagcaucguccgcuucccgaacaucaccaaccugugccccuucggcgagguguucaacgccacccgguucgccuccgucuacgccuggaaccgcaagcggaucagcaacugcguggcggacuacuccgugcuguacaacagcgccuccuucagcacguucaagugcuacggcgucucccccaccaagcucaacgaccugugcuucaccaacguguacgccgacagcuucgugauccgcggggacgagguccggcagaucgcccccggccagaccgggaagaucgccgacuacaacuacaagcugccggacgacuucacgggcugcgugaucgcguggaacuccaacaaccucgacagcaaggucgggggcaacuacaacuaccgcuaccggcuguuccgcaaguccaaccugaagcccuucgagcgggacaucagcaccgagaucuaccaggccggcuccacccccugcaacgggguggagggcuucaacugcuacuucccccuccagagcuacggguuccagccgaccaacggcgugggguaccagcccuaccgcguggucgugcuguccuucgagcugcuccacgcccccgccacggugugcggccccaagaaguccaccaaccuggucaagaacaagugcgugaacuucaacuucaacggccugaccgggaccggcgugcucaccgagagcaacaagaaguuccugccguuccagcaguucgggcgcgacaucgccgacacgaccgacgcgguccgggacccccagacccuggagauccuggacaucacccccugcagcuucggcggggugagcgugaucacgccgggcaccaacaccuccaaccaggucgccgugcucuaccagggcgugaacugcaccgagguccccguggccauccacgccgaccagcugacgcccaccuggcgcguguacagcaccggguccaacgucuuccagacccgggccggcugccugaucggggcggagcacgugaacaacagcuacgagugcgacauccccaucggcgccggcaucugcgccuccuaccagacgcagaccaacagcccgcgccgggcccgcuccguggcgagccaguccaucaucgccuacaccaugagccucggggccgagaacuccgucgccuacagcaacaacuccaucgccauccccaccaacuucacgaucagcgugaccaccgagauccugcccguguccaugaccaagacgagcgucgacugcaccauguacaucugcggcgacagcaccgagugcuccaaccugcuccugcaguacgggagcuucugcacccagcugaaccgggcgcucacgggcaucgccguggagcaggacaagaacacccaggagguguucgcccaggucaagcagaucuacaagacgcccccgaucaaggacuucgggggcuucaacuucucccagauccugcccgaccccagcaagcccuccaagcgcagcuucaucgaggaccuccuguucaacaaggugacccuggccgacgccggcuucaucaagcaguacggggacugccugggcgacaucgcggcccgggaccucaucugcgcccagaaguucaacgggcugaccgugcugccgccccuccugaccgacgagaugaucgcccaguacaccuccgcccugcucgcgggcaccaucacgagcggguggaccuucggcgccggcgccgcccugcagauccccuucgcgaugcagauggccuaccgcuucaacgggaucggcgucacccagaacgugcuguacgagaaccagaagcucaucgccaaccaguucaacuccgccaucgggaagauccaggacagccuguccagcaccgccuccgcgcugggcaagcuccaggacguggucaaccagaacgcccaggcccugaacacgcuggugaagcagcucagcuccaacuucggggccaucagcuccgugcugaacgacauccugagccggcucgacccgcccgaggccgagguccagaucgaccgccugaucaccggccggcugcagucccuccagaccuacgugacccagcagcugauccgcgcggccgagauccgggccagcgccaaccuggccgcgaccaagaugagcgagugcgugcucggccaguccaagcgcgucgacuucugcgggaagggcuaccaccugaugagcuucccccaguccgcgccccacggggugguguuccugcacgucacguacgugcccgcccaggagaagaacuucaccaccgccccggccaucugccacgacggcaaggcccacuucccccgggagggggucuucgugagcaacggcacccacugguucgugacgcagcgcaacuucuacgagccccagaucaucaccaccgacaacaccuucgucuccggcaacugcgacguggugaucgggaucgucaacaacacgguguacgacccccuccagccggagcuggacagcuucaaggaggagcuggacaaguacuucaagaaccacaccucccccgacguggaccucggcgacaucagcgggaucaacgccuccgucgugaacauccagaaggagaucgaccggcugaacgagguggccaagaaccugaacgagagccucaucgaccugcaggagcugggcaaguacgagcaguacaucaaguggcccugguacaucuggcucggcuucaucgccgggcugaucgcgaucgucauggugaccaucaugcugugcugcaugaccuccugcugcagcugccucaagggcugcugcuccugcgggagcugcugcaaguucgacgaggacgacuccgagccggugcugaagggcgucaagcugcacuacacgugaggacuaguuauaagacugacuagcccgaugggccucccaacgggcccuccuccccuccuugcaccgagauuaaucaaaggcucuuuucagagccaccaaaaaaaaaaaaaaaaaaaaaaaaaaaaaaaaaaaaaaaaaaaaaaaaaaaaaaaaaaaaaaaaaaaaaaaaaaaaaaaaaaaaaaaaaaaaaaaaaaaaa

SEQ ID NO: 24213 - RNA, 4035 nt, Artificial Sequence
  SARS-CoV-2/Wuhan/WIV05/2019__EPI_ISL_402128 spike protein mRNA gc (1-1273)(K986P_V987P)
aggagaaagcuuaccauguucguguuccuggugcugcugccccuggugagcagccagugcgugaaccugaccacccggacccagcugccaccagccuacaccaacagcuucacccggggcgucuacuaccccgacaagguguuccggagcagcguccugcacagcacccaggaccuguuccugcccuucuucagcaacgugaccugguuccacgccauccacgugagcggcaccaacggcaccaagcgguucgacaaccccgugcugcccuucaacgacggcguguacuucgccagcaccgagaagagcaacaucauccggggcuggaucuucggcaccacccuggacagcaagacccagagccugcugaucgugaauaacgccaccaacguggugaucaaggugugcgaguuccaguucugcaacgaccccuuccugggcguguacuaccacaagaacaacaagagcuggauggagagcgaguuccggguguacagcagcgccaacaacugcaccuucgaguacgugagccagcccuuccugauggaccuggagggcaagcagggcaacuucaagaaccugcgggaguucguguucaagaacaucgacggcuacuucaagaucuacagcaagcacaccccaaucaaccuggugcgggaucugccccagggcuucucagcccuggagccccugguggaccugcccaucggcaucaacaucacccgguuccagacccugcuggcccugcaccggagcuaccugaccccaggcgacagcagcagcggguggacagcaggcgcggcugcuuacuacgugggcuaccugcagccccggaccuuccugcugaaguacaacgagaacggcaccaucaccgacgccguggacugcgcccuggacccucugagcgagaccaagugcacccugaagagcuucaccguggagaagggcaucuaccagaccagcaacuuccgggugcagcccaccgagagcaucgugcgguuccccaacaucaccaaccugugccccuucggcgagguguucaacgccacccgguucgccagcguguacgccuggaaccggaagcggaucagcaacugcguggccgacuacagcgugcuguacaacagcgccagcuucagcaccuucaagugcuacggcgugagccccaccaagcugaacgaccugugcuucaccaacguguacgccgacagcuucgugauccguggcgacgaggugcggcagaucgcacccggccagacaggcaagaucgccgacuacaacuacaagcugcccgacgacuucaccggcugcgugaucgccuggaacagcaacaaccucgacagcaaggugggcggcaacuacaacuaccuguaccggcuguuccggaagagcaaccugaagcccuucgagcgggacaucagcaccgagaucuaccaagccggcuccaccccuugcaacggcguggagggcuucaacugcuacuucccucugcagagcuacggcuuccagcccaccaacggcgugggcuaccagcccuaccgggugguggugcugagcuucgagcugcugcacgccccagccaccguguguggccccaagaagagcaccaaccuggugaagaacaagugcgugaacuucaacuucaacggccuuaccggcaccggcgugcugaccgagagcaacaagaaauuccugcccuuucagcaguucggccgggacaucgccgacaccaccgacgcugugcgggauccccagacccuggagauccuggacaucaccccuugcagcuucggcggcgugagcgugaucaccccaggcaccaacaccagcaaccagguggccgugcuguaccaggacgugaacugcaccgaggugcccguggccauccacgccgaccagcugacacccaccuggcgggucuacagcaccggcagcaacguguuccagacccgggccgguugccugaucggcgccgagcacgugaacaacagcuacgagugcgacauccccaucggcgccggcaucugugccagcuaccagacccagaccaauucaccccggagggcaaggagcguggccagccagagcaucaucgccuacaccaugagccugggcgccgagaacagcguggccuacagcaacaacagcaucgccauccccaccaacuucaccaucagcgugaccaccgagauucugcccgugagcaugaccaagaccagcguggacugcaccauguacaucugcggcgacagcaccgagugcagcaaccugcugcugcaguacggcagcuucugcacccagcugaaccgggcccugaccggcaucgccguggagcaggacaagaacacccaggagguguucgcccaggugaagcagaucuacaagaccccucccaucaaggacuucggcggcuucaacuucagccagauccugcccgaccccagcaagcccagcaagcggagcuucaucgaggaccugcuguucaacaaggugacccuagccgacgccggcuucaucaagcaguacggcgacugccucggcgacauagccgcccgggaccugaucugcgcccagaaguucaacggccugaccgugcugccuccccugcugaccgacgagaugaucgcccaguacaccagcgcccuguuagccggaaccaucaccagcggcuggacuuucggcgcuggagccgcucugcagauccccuucgccaugcagauggccuaccgguucaacggcaucggcgugacccagaacgugcuguacgagaaccagaagcugaucgccaaccaguucaacagcgccaucggcaagauccaggacagccugagcagcaccgcuagcgcccugggcaagcugcaggacguggugaaccagaacgcccaggcccugaacacccuggugaagcagcugagcagcaacuucggcgccaucagcagcgugcugaacgacauccugagccggcuggacccucccgaggccgaggugcagaucgaccggcugaucacuggccggcugcagagccugcagaccuacgugacccagcagcugauccgggccgccgagauucgggccagcgccaaccuggccgccaccaagaugagcgagugcgugcugggccagagcaagcggguggacuucugcggcaagggcuaccaccugaugagcuuuccccagagcgcaccccacggagugguguuccugcacgugaccuacgugcccgcccaggagaagaacuucaccaccgccccagccaucugccacgacggcaaggcccacuuuccccgggagggcguguucgugagcaacggcacccacugguucgugacccagcggaacuucuacgagccccagaucaucaccaccgacaacaccuucgugagcggcaacugcgacguggugaucggcaucgugaacaacaccguguacgauccccugcagcccgagcuggacagcuucaaggaggagcuggacaaguacuucaagaaucacaccagccccgacguggaccugggcgacaucagcggcaucaacgccagcguggugaacauccagaaggagaucgaucggcugaacgagguggccaagaaccugaacgagagccugaucgaccugcaggagcugggcaaguacgagcaguacaucaaguggcccugguacaucuggcugggcuucaucgccggccugaucgccaucgugauggugaccaucaugcugugcugcaugaccagcugcugcagcugccugaagggcuguugcagcugcggcagcugcugcaaguucgacgaggacgacagcgagcccgugcugaagggcgugaagcugcacuacaccugaggacuaguuauaagacugacuagcccgaugggccucccaacgggcccuccuccccuccuugcaccgagauuaaucaaaggcucuuuucagagccaccaaaaaaaaaaaaaaaaaaaaaaaaaaaaaaaaaaaaaaaaaaaaaaaaaaaaaaaaaaaaaaaaaaaaaaaaaaaaaaaaaaaaaaaaaaaaaaaaaaaaa

SEQ ID NO: 24214 - RNA, 4035 nt, Artificial Sequence
  SARS-CoV-2/Wuhan/WIV05/2019__EPI_ISL_402128 spike protein mRNA gc (1-1273)(K986P_V987P_ D614G)
aggagaaagcuuaccauguucguguuccuggugcugcugccccuggugagcagccagugcgugaaccugaccacccggacccagcugccaccagccuacaccaacagcuucacccggggcgucuacuaccccgacaagguguuccggagcagcguccugcacagcacccaggaccuguuccugcccuucuucagcaacgugaccugguuccacgccauccacgugagcggcaccaacggcaccaagcgguucgacaaccccgugcugcccuucaacgacggcguguacuucgccagcaccgagaagagcaacaucauccggggcuggaucuucggcaccacccuggacagcaagacccagagccugcugaucgugaauaacgccaccaacguggugaucaaggugugcgaguuccaguucugcaacgaccccuuccugggcguguacuaccacaagaacaacaagagcuggauggagagcgaguuccggguguacagcagcgccaacaacugcaccuucgaguacgugagccagcccuuccugauggaccuggagggcaagcagggcaacuucaagaaccugcgggaguucguguucaagaacaucgacggcuacuucaagaucuacagcaagcacaccccaaucaaccuggugcgggaucugccccagggcuucucagcccuggagccccugguggaccugcccaucggcaucaacaucacccgguuccagacccugcuggcccugcaccggagcuaccugaccccaggcgacagcagcagcggguggacagcaggcgcggcugcuuacuacgugggcuaccugcagccccggaccuuccugcugaaguacaacgagaacggcaccaucaccgacgccguggacugcgcccuggacccucugagcgagaccaagugcacccugaagagcuucaccguggagaagggcaucuaccagaccagcaacuuccgggugcagcccaccgagagcaucgugcgguuccccaacaucaccaaccugugccccuucggcgagguguucaacgccacccgguucgccagcguguacgccuggaaccggaagcggaucagcaacugcguggccgacuacagcgugcuguacaacagcgccagcuucagcaccuucaagugcuacggcgugagccccaccaagcugaacgaccugugcuucaccaacguguacgccgacagcuucgugauccguggcgacgaggugcggcagaucgcacccggccagacaggcaagaucgccgacuacaacuacaagcugcccgacgacuucaccggcugcgugaucgccuggaacagcaacaaccucgacagcaaggugggcggcaacuacaacuaccuguaccggcuguuccggaagagcaaccugaagcccuucgagcgggacaucagcaccgagaucuaccaagccggcuccaccccuugcaacggcguggagggcuucaacugcuacuucccucugcagagcuacggcuuccagcccaccaacggcgugggcuaccagcccuaccgggugguggugcugagcuucgagcugcugcacgccccagccaccguguguggccccaagaagagcaccaaccuggugaagaacaagugcgugaacuucaacuucaacggccuuaccggcaccggcgugcugaccgagagcaacaagaaauuccugcccuuucagcaguucggccgggacaucgccgacaccaccgacgcugugcgggauccccagacccuggagauccuggacaucaccccuugcagcuucggcggcgugagcgugaucaccccaggcaccaacaccagcaaccagguggccgugcuguaccagggcgugaacugcaccgaggugcccguggccauccacgccgaccagcugacacccaccuggcgggucuacagcaccggcagcaacguguuccagacccgggccgguugccugaucggcgccgagcacgugaacaacagcuacgagugcgacauccccaucggcgccggcaucugugccagcuaccagacccagaccaauucaccccggagggcaaggagcguggccagccagagcaucaucgccuacaccaugagccugggcgccgagaacagcguggccuacagcaacaacagcaucgccauccccaccaacuucaccaucagcgugaccaccgagauucugcccgugagcaugaccaagaccagcguggacugcaccauguacaucugcggcgacagcaccgagugcagcaaccugcugcugcaguacggcagcuucugcacccagcugaaccgggcccugaccggcaucgccguggagcaggacaagaacacccaggagguguucgcccaggugaagcagaucuacaagaccccucccaucaaggacuucggcggcuucaacuucagccagauccugcccgaccccagcaagcccagcaagcggagcuucaucgaggaccugcuguucaacaaggugacccuagccgacgccggcuucaucaagcaguacggcgacugccucggcgacauagccgcccgggaccugaucugcgcccagaaguucaacggccugaccgugcugccuccccugcugaccgacgagaugaucgcccaguacaccagcgcccuguuagccggaaccaucaccagcggcuggacuuucggcgcuggagccgcucugcagauccccuucgccaugcagauggccuaccgguucaacggcaucggcgugacccagaacgugcuguacgagaaccagaagcugaucgccaaccaguucaacagcgccaucggcaagauccaggacagccugagcagcaccgcuagcgcccugggcaagcugcaggacguggugaaccagaacgcccaggcccugaacacccuggugaagcagcugagcagcaacuucggcgccaucagcagcgugcugaacgacauccugagccggcuggacccucccgaggccgaggugcagaucgaccggcugaucacuggccggcugcagagccugcagaccuacgugacccagcagcugauccgggccgccgagauucgggccagcgccaaccuggccgccaccaagaugagcgagugcgugcugggccagagcaagcggguggacuucugcggcaagggcuaccaccugaugagcuuuccccagagcgcaccccacggagugguguuccugcacgugaccuacgugcccgcccaggagaagaacuucaccaccgccccagccaucugccacgacggcaaggcccacuuuccccgggagggcguguucgugagcaacggcacccacugguucgugacccagcggaacuucuacgagccccagaucaucaccaccgacaacaccuucgugagcggcaacugcgacguggugaucggcaucgugaacaacaccguguacgauccccugcagcccgagcuggacagcuucaaggaggagcuggacaaguacuucaagaaucacaccagccccgacguggaccugggcgacaucagcggcaucaacgccagcguggugaacauccagaaggagaucgaucggcugaacgagguggccaagaaccugaacgagagccugaucgaccugcaggagcugggcaaguacgagcaguacaucaaguggcccugguacaucuggcugggcuucaucgccggccugaucgccaucgugauggugaccaucaugcugugcugcaugaccagcugcugcagcugccugaagggcuguugcagcugcggcagcugcugcaaguucgacgaggacgacagcgagcccgugcugaagggcgugaagcugcacuacaccugaggacuaguuauaagacugacuagcccgaugggccucccaacgggcccuccuccccuccuugcaccgagauuaaucaaaggcucuuuucagagccaccaaaaaaaaaaaaaaaaaaaaaaaaaaaaaaaaaaaaaaaaaaaaaaaaaaaaaaaaaaaaaaaaaaaaaaaaaaaaaaaaaaaaaaaaaaaaaaaaaaaaa

SEQ ID NO: 24215 - RNA, 4035 nt, Artificial Sequence
  SARS-CoV-2/Wuhan/WIV05/2019__EPI_ISL_402128 spike protein mRNA gc (1-1273)(K986P_V987P_A222V_D614G)
aggagaaagcuuaccauguucguguuccuggugcugcugccccuggugagcagccagugcgugaaccugaccacccggacccagcugccaccagccuacaccaacagcuucacccggggcgucuacuaccccgacaagguguuccggagcagcguccugcacagcacccaggaccuguuccugcccuucuucagcaacgugaccugguuccacgccauccacgugagcggcaccaacggcaccaagcgguucgacaaccccgugcugcccuucaacgacggcguguacuucgccagcaccgagaagagcaacaucauccggggcuggaucuucggcaccacccuggacagcaagacccagagccugcugaucgugaauaacgccaccaacguggugaucaaggugugcgaguuccaguucugcaacgaccccuuccugggcguguacuaccacaagaacaacaagagcuggauggagagcgaguuccggguguacagcagcgccaacaacugcaccuucgaguacgugagccagcccuuccugauggaccuggagggcaagcagggcaacuucaagaaccugcgggaguucguguucaagaacaucgacggcuacuucaagaucuacagcaagcacaccccaaucaaccuggugcgggaucugccccagggcuucucagugcuggagccccugguggaccugcccaucggcaucaacaucacccgguuccagacccugcuggcccugcaccggagcuaccugaccccaggcgacagcagcagcggguggacagcaggcgcggcugcuuacuacgugggcuaccugcagccccggaccuuccugcugaaguacaacgagaacggcaccaucaccgacgccguggacugcgcccuggacccucugagcgagaccaagugcacccugaagagcuucaccguggagaagggcaucuaccagaccagcaacuuccgggugcagcccaccgagagcaucgugcgguuccccaacaucaccaaccugugccccuucggcgagguguucaacgccacccgguucgccagcguguacgccuggaaccggaagcggaucagcaacugcguggccgacuacagcgugcuguacaacagcgccagcuucagcaccuucaagugcuacggcgugagccccaccaagcugaacgaccugugcuucaccaacguguacgccgacagcuucgugauccguggcgacgaggugcggcagaucgcacccggccagacaggcaagaucgccgacuacaacuacaagcugcccgacgacuucaccggcugcgugaucgccuggaacagcaacaaccucgacagcaaggugggcggcaacuacaacuaccuguaccggcuguuccggaagagcaaccugaagcccuucgagcgggacaucagcaccgagaucuaccaagccggcuccaccccuugcaacggcguggagggcuucaacugcuacuucccucugcagagcuacggcuuccagcccaccaacggcgugggcuaccagcccuaccgggugguggugcugagcuucgagcugcugcacgccccagccaccguguguggccccaagaagagcaccaaccuggugaagaacaagugcgugaacuucaacuucaacggccuuaccggcaccggcgugcugaccgagagcaacaagaaauuccugcccuuucagcaguucggccgggacaucgccgacaccaccgacgcugugcgggauccccagacccuggagauccuggacaucaccccuugcagcuucggcggcgugagcgugaucaccccaggcaccaacaccagcaaccagguggccgugcuguaccagggcgugaacugcaccgaggugcccguggccauccacgccgaccagcugacacccaccuggcgggucuacagcaccggcagcaacguguuccagacccgggccgguugccugaucggcgccgagcacgugaacaacagcuacgagugcgacauccccaucggcgccggcaucugugccagcuaccagacccagaccaauucaccccggagggcaaggagcguggccagccagagcaucaucgccuacaccaugagccugggcgccgagaacagcguggccuacagcaacaacagcaucgccauccccaccaacuucaccaucagcgugaccaccgagauucugcccgugagcaugaccaagaccagcguggacugcaccauguacaucugcggcgacagcaccgagugcagcaaccugcugcugcaguacggcagcuucugcacccagcugaaccgggcccugaccggcaucgccguggagcaggacaagaacacccaggagguguucgcccaggugaagcagaucuacaagaccccucccaucaaggacuucggcggcuucaacuucagccagauccugcccgaccccagcaagcccagcaagcggagcuucaucgaggaccugcuguucaacaaggugacccuagccgacgccggcuucaucaagcaguacggcgacugccucggcgacauagccgcccgggaccugaucugcgcccagaaguucaacggccugaccgugcugccuccccugcugaccgacgagaugaucgcccaguacaccagcgcccuguuagccggaaccaucaccagcggcuggacuuucggcgcuggagccgcucugcagauccccuucgccaugcagauggccuaccgguucaacggcaucggcgugacccagaacgugcuguacgagaaccagaagcugaucgccaaccaguucaacagcgccaucggcaagauccaggacagccugagcagcaccgcuagcgcccugggcaagcugcaggacguggugaaccagaacgcccaggcccugaacacccuggugaagcagcugagcagcaacuucggcgccaucagcagcgugcugaacgacauccugagccggcuggacccucccgaggccgaggugcagaucgaccggcugaucacuggccggcugcagagccugcagaccuacgugacccagcagcugauccgggccgccgagauucgggccagcgccaaccuggccgccaccaagaugagcgagugcgugcugggccagagcaagcggguggacuucugcggcaagggcuaccaccugaugagcuuuccccagagcgcaccccacggagugguguuccugcacgugaccuacgugcccgcccaggagaagaacuucaccaccgccccagccaucugccacgacggcaaggcccacuuuccccgggagggcguguucgugagcaacggcacccacugguucgugacccagcggaacuucuacgagccccagaucaucaccaccgacaacaccuucgugagcggcaacugcgacguggugaucggcaucgugaacaacaccguguacgauccccugcagcccgagcuggacagcuucaaggaggagcuggacaaguacuucaagaaucacaccagccccgacguggaccugggcgacaucagcggcaucaacgccagcguggugaacauccagaaggagaucgaucggcugaacgagguggccaagaaccugaacgagagccugaucgaccugcaggagcugggcaaguacgagcaguacaucaaguggcccugguacaucuggcugggcuucaucgccggccugaucgccaucgugauggugaccaucaugcugugcugcaugaccagcugcugcagcugccugaagggcuguugcagcugcggcagcugcugcaaguucgacgaggacgacagcgagcccgugcugaagggcgugaagcugcacuacaccugaggacuaguuauaagacugacuagcccgaugggccucccaacgggcccuccuccccuccuugcaccgagauuaaucaaaggcucuuuucagagccaccaaaaaaaaaaaaaaaaaaaaaaaaaaaaaaaaaaaaaaaaaaaaaaaaaaaaaaaaaaaaaaaaaaaaaaaaaaaaaaaaaaaaaaaaaaaaaaaaaaaaa

SEQ ID NO: 24216 - RNA, 4035 nt, Artificial Sequence
  SARS-CoV-2/Wuhan/WIV05/2019__EPI_ISL_402128 spike protein mRNA gc (1-1273)(K986P_V987P_N439K_D614G)
aggagaaagcuuaccauguucguguuccuggugcugcugccccuggugagcagccagugcgugaaccugaccacccggacccagcugccaccagccuacaccaacagcuucacccggggcgucuacuaccccgacaagguguuccggagcagcguccugcacagcacccaggaccuguuccugcccuucuucagcaacgugaccugguuccacgccauccacgugagcggcaccaacggcaccaagcgguucgacaaccccgugcugcccuucaacgacggcguguacuucgccagcaccgagaagagcaacaucauccggggcuggaucuucggcaccacccuggacagcaagacccagagccugcugaucgugaauaacgccaccaacguggugaucaaggugugcgaguuccaguucugcaacgaccccuuccugggcguguacuaccacaagaacaacaagagcuggauggagagcgaguuccggguguacagcagcgccaacaacugcaccuucgaguacgugagccagcccuuccugauggaccuggagggcaagcagggcaacuucaagaaccugcgggaguucguguucaagaacaucgacggcuacuucaagaucuacagcaagcacaccccaaucaaccuggugcgggaucugccccagggcuucucagcccuggagccccugguggaccugcccaucggcaucaacaucacccgguuccagacccugcuggcccugcaccggagcuaccugaccccaggcgacagcagcagcggguggacagcaggcgcggcugcuuacuacgugggcuaccugcagccccggaccuuccugcugaaguacaacgagaacggcaccaucaccgacgccguggacugcgcccuggacccucugagcgagaccaagugcacccugaagagcuucaccguggagaagggcaucuaccagaccagcaacuuccgggugcagcccaccgagagcaucgugcgguuccccaacaucaccaaccugugccccuucggcgagguguucaacgccacccgguucgccagcguguacgccuggaaccggaagcggaucagcaacugcguggccgacuacagcgugcuguacaacagcgccagcuucagcaccuucaagugcuacggcgugagccccaccaagcugaacgaccugugcuucaccaacguguacgccgacagcuucgugauccguggcgacgaggugcggcagaucgcacccggccagacaggcaagaucgccgacuacaacuacaagcugcccgacgacuucaccggcugcgugaucgccuggaacagcaagaaccucgacagcaaggugggcggcaacuacaacuaccuguaccggcuguuccggaagagcaaccugaagcccuucgagcgggacaucagcaccgagaucuaccaagccggcuccaccccuugcaacggcguggagggcuucaacugcuacuucccucugcagagcuacggcuuccagcccaccaacggcgugggcuaccagcccuaccgggugguggugcugagcuucgagcugcugcacgccccagccaccguguguggccccaagaagagcaccaaccuggugaagaacaagugcgugaacuucaacuucaacggccuuaccggcaccggcgugcugaccgagagcaacaagaaauuccugcccuuucagcaguucggccgggacaucgccgacaccaccgacgcugugcgggauccccagacccuggagauccuggacaucaccccuugcagcuucggcggcgugagcgugaucaccccaggcaccaacaccagcaaccagguggccgugcuguaccagggcgugaacugcaccgaggugcccguggccauccacgccgaccagcugacacccaccuggcgggucuacagcaccggcagcaacguguuccagacccgggccgguugccugaucggcgccgagcacgugaacaacagcuacgagugcgacauccccaucggcgccggcaucugugccagcuaccagacccagaccaauucaccccggagggcaaggagcguggccagccagagcaucaucgccuacaccaugagccugggcgccgagaacagcguggccuacagcaacaacagcaucgccauccccaccaacuucaccaucagcgugaccaccgagauucugcccgugagcaugaccaagaccagcguggacugcaccauguacaucugcggcgacagcaccgagugcagcaaccugcugcugcaguacggcagcuucugcacccagcugaaccgggcccugaccggcaucgccguggagcaggacaagaacacccaggagguguucgcccaggugaagcagaucuacaagaccccucccaucaaggacuucggcggcuucaacuucagccagauccugcccgaccccagcaagcccagcaagcggagcuucaucgaggaccugcuguucaacaaggugacccuagccgacgccggcuucaucaagcaguacggcgacugccucggcgacauagccgcccgggaccugaucugcgcccagaaguucaacggccugaccgugcugccuccccugcugaccgacgagaugaucgcccaguacaccagcgcccuguuagccggaaccaucaccagcggcuggacuuucggcgcuggagccgcucugcagauccccuucgccaugcagauggccuaccgguucaacggcaucggcgugacccagaacgugcuguacgagaaccagaagcugaucgccaaccaguucaacagcgccaucggcaagauccaggacagccugagcagcaccgcuagcgcccugggcaagcugcaggacguggugaaccagaacgcccaggcccugaacacccuggugaagcagcugagcagcaacuucggcgccaucagcagcgugcugaacgacauccugagccggcuggacccucccgaggccgaggugcagaucgaccggcugaucacuggccggcugcagagccugcagaccuacgugacccagcagcugauccgggccgccgagauucgggccagcgccaaccuggccgccaccaagaugagcgagugcgugcugggccagagcaagcggguggacuucugcggcaagggcuaccaccugaugagcuuuccccagagcgcaccccacggagugguguuccugcacgugaccuacgugcccgcccaggagaagaacuucaccaccgccccagccaucugccacgacggcaaggcccacuuuccccgggagggcguguucgugagcaacggcacccacugguucgugacccagcggaacuucuacgagccccagaucaucaccaccgacaacaccuucgugagcggcaacugcgacguggugaucggcaucgugaacaacaccguguacgauccccugcagcccgagcuggacagcuucaaggaggagcuggacaaguacuucaagaaucacaccagccccgacguggaccugggcgacaucagcggcaucaacgccagcguggugaacauccagaaggagaucgaucggcugaacgagguggccaagaaccugaacgagagccugaucgaccugcaggagcugggcaaguacgagcaguacaucaaguggcccugguacaucuggcugggcuucaucgccggccugaucgccaucgugauggugaccaucaugcugugcugcaugaccagcugcugcagcugccugaagggcuguugcagcugcggcagcugcugcaaguucgacgaggacgacagcgagcccgugcugaagggcgugaagcugcacuacaccugaggacuaguuauaagacugacuagcccgaugggccucccaacgggcccuccuccccuccuugcaccgagauuaaucaaaggcucuuuucagagccaccaaaaaaaaaaaaaaaaaaaaaaaaaaaaaaaaaaaaaaaaaaaaaaaaaaaaaaaaaaaaaaaaaaaaaaaaaaaaaaaaaaaaaaaaaaaaaaaaaaaaa

SEQ ID NO: 24217 - RNA, 4035 nt, Artificial Sequence
  SARS-CoV-2/Wuhan/WIV05/2019__EPI_ISL_402128 spike protein mRNA gc (1-1273)(K986P_V987P_S477N_D614G)
aggagaaagcuuaccauguucguguuccuggugcugcugccccuggugagcagccagugcgugaaccugaccacccggacccagcugccaccagccuacaccaacagcuucacccggggcgucuacuaccccgacaagguguuccggagcagcguccugcacagcacccaggaccuguuccugcccuucuucagcaacgugaccugguuccacgccauccacgugagcggcaccaacggcaccaagcgguucgacaaccccgugcugcccuucaacgacggcguguacuucgccagcaccgagaagagcaacaucauccggggcuggaucuucggcaccacccuggacagcaagacccagagccugcugaucgugaauaacgccaccaacguggugaucaaggugugcgaguuccaguucugcaacgaccccuuccugggcguguacuaccacaagaacaacaagagcuggauggagagcgaguuccggguguacagcagcgccaacaacugcaccuucgaguacgugagccagcccuuccugauggaccuggagggcaagcagggcaacuucaagaaccugcgggaguucguguucaagaacaucgacggcuacuucaagaucuacagcaagcacaccccaaucaaccuggugcgggaucugccccagggcuucucagcccuggagccccugguggaccugcccaucggcaucaacaucacccgguuccagacccugcuggcccugcaccggagcuaccugaccccaggcgacagcagcagcggguggacagcaggcgcggcugcuuacuacgugggcuaccugcagccccggaccuuccugcugaaguacaacgagaacggcaccaucaccgacgccguggacugcgcccuggacccucugagcgagaccaagugcacccugaagagcuucaccguggagaagggcaucuaccagaccagcaacuuccgggugcagcccaccgagagcaucgugcgguuccccaacaucaccaaccugugccccuucggcgagguguucaacgccacccgguucgccagcguguacgccuggaaccggaagcggaucagcaacugcguggccgacuacagcgugcuguacaacagcgccagcuucagcaccuucaagugcuacggcgugagccccaccaagcugaacgaccugugcuucaccaacguguacgccgacagcuucgugauccguggcgacgaggugcggcagaucgcacccggccagacaggcaagaucgccgacuacaacuacaagcugcccgacgacuucaccggcugcgugaucgccuggaacagcaacaaccucgacagcaaggugggcggcaacuacaacuaccuguaccggcuguuccggaagagcaaccugaagcccuucgagcgggacaucagcaccgagaucuaccaagccggcaacaccccuugcaacggcguggagggcuucaacugcuacuucccucugcagagcuacggcuuccagcccaccaacggcgugggcuaccagcccuaccgggugguggugcugagcuucgagcugcugcacgccccagccaccguguguggccccaagaagagcaccaaccuggugaagaacaagugcgugaacuucaacuucaacggccuuaccggcaccggcgugcugaccgagagcaacaagaaauuccugcccuuucagcaguucggccgggacaucgccgacaccaccgacgcugugcgggauccccagacccuggagauccuggacaucaccccuugcagcuucggcggcgugagcgugaucaccccaggcaccaacaccagcaaccagguggccgugcuguaccagggcgugaacugcaccgaggugcccguggccauccacgccgaccagcugacacccaccuggcgggucuacagcaccggcagcaacguguuccagacccgggccgguugccugaucggcgccgagcacgugaacaacagcuacgagugcgacauccccaucggcgccggcaucugugccagcuaccagacccagaccaauucaccccggagggcaaggagcguggccagccagagcaucaucgccuacaccaugagccugggcgccgagaacagcguggccuacagcaacaacagcaucgccauccccaccaacuucaccaucagcgugaccaccgagauucugcccgugagcaugaccaagaccagcguggacugcaccauguacaucugcggcgacagcaccgagugcagcaaccugcugcugcaguacggcagcuucugcacccagcugaaccgggcccugaccggcaucgccguggagcaggacaagaacacccaggagguguucgcccaggugaagcagaucuacaagaccccucccaucaaggacuucggcggcuucaacuucagccagauccugcccgaccccagcaagcccagcaagcggagcuucaucgaggaccugcuguucaacaaggugacccuagccgacgccggcuucaucaagcaguacggcgacugccucggcgacauagccgcccgggaccugaucugcgcccagaaguucaacggccugaccgugcugccuccccugcugaccgacgagaugaucgcccaguacaccagcgcccuguuagccggaaccaucaccagcggcuggacuuucggcgcuggagccgcucugcagauccccuucgccaugcagauggccuaccgguucaacggcaucggcgugacccagaacgugcuguacgagaaccagaagcugaucgccaaccaguucaacagcgccaucggcaagauccaggacagccugagcagcaccgcuagcgcccugggcaagcugcaggacguggugaaccagaacgcccaggcccugaacacccuggugaagcagcugagcagcaacuucggcgccaucagcagcgugcugaacgacauccugagccggcuggacccucccgaggccgaggugcagaucgaccggcugaucacuggccggcugcagagccugcagaccuacgugacccagcagcugauccgggccgccgagauucgggccagcgccaaccuggccgccaccaagaugagcgagugcgugcugggccagagcaagcggguggacuucugcggcaagggcuaccaccugaugagcuuuccccagagcgcaccccacggagugguguuccugcacgugaccuacgugcccgcccaggagaagaacuucaccaccgccccagccaucugccacgacggcaaggcccacuuuccccgggagggcguguucgugagcaacggcacccacugguucgugacccagcggaacuucuacgagccccagaucaucaccaccgacaacaccuucgugagcggcaacugcgacguggugaucggcaucgugaacaacaccguguacgauccccugcagcccgagcuggacagcuucaaggaggagcuggacaaguacuucaagaaucacaccagccccgacguggaccugggcgacaucagcggcaucaacgccagcguggugaacauccagaaggagaucgaucggcugaacgagguggccaagaaccugaacgagagccugaucgaccugcaggagcugggcaaguacgagcaguacaucaaguggcccugguacaucuggcugggcuucaucgccggccugaucgccaucgugauggugaccaucaugcugugcugcaugaccagcugcugcagcugccugaagggcuguugcagcugcggcagcugcugcaaguucgacgaggacgacagcgagcccgugcugaagggcgugaagcugcacuacaccugaggacuaguuauaagacugacuagcccgaugggccucccaacgggcccuccuccccuccuugcaccgagauuaaucaaaggcucuuuucagagccaccaaaaaaaaaaaaaaaaaaaaaaaaaaaaaaaaaaaaaaaaaaaaaaaaaaaaaaaaaaaaaaaaaaaaaaaaaaaaaaaaaaaaaaaaaaaaaaaaaaaaa

SEQ ID NO: 24218 - RNA, 4035 nt, Artificial Sequence
  SARS-CoV-2/Wuhan/WIV05/2019__EPI_ISL_402128 spike protein mRNA gc (1-1273)(K986P_V987P_N501Y_D614G)
aggagaaagcuuaccauguucguguuccuggugcugcugccccuggugagcagccagugcgugaaccugaccacccggacccagcugccaccagccuacaccaacagcuucacccggggcgucuacuaccccgacaagguguuccggagcagcguccugcacagcacccaggaccuguuccugcccuucuucagcaacgugaccugguuccacgccauccacgugagcggcaccaacggcaccaagcgguucgacaaccccgugcugcccuucaacgacggcguguacuucgccagcaccgagaagagcaacaucauccggggcuggaucuucggcaccacccuggacagcaagacccagagccugcugaucgugaauaacgccaccaacguggugaucaaggugugcgaguuccaguucugcaacgaccccuuccugggcguguacuaccacaagaacaacaagagcuggauggagagcgaguuccggguguacagcagcgccaacaacugcaccuucgaguacgugagccagcccuuccugauggaccuggagggcaagcagggcaacuucaagaaccugcgggaguucguguucaagaacaucgacggcuacuucaagaucuacagcaagcacaccccaaucaaccuggugcgggaucugccccagggcuucucagcccuggagccccugguggaccugcccaucggcaucaacaucacccgguuccagacccugcuggcccugcaccggagcuaccugaccccaggcgacagcagcagcggguggacagcaggcgcggcugcuuacuacgugggcuaccugcagccccggaccuuccugcugaaguacaacgagaacggcaccaucaccgacgccguggacugcgcccuggacccucugagcgagaccaagugcacccugaagagcuucaccguggagaagggcaucuaccagaccagcaacuuccgggugcagcccaccgagagcaucgugcgguuccccaacaucaccaaccugugccccuucggcgagguguucaacgccacccgguucgccagcguguacgccuggaaccggaagcggaucagcaacugcguggccgacuacagcgugcuguacaacagcgccagcuucagcaccuucaagugcuacggcgugagccccaccaagcugaacgaccugugcuucaccaacguguacgccgacagcuucgugauccguggcgacgaggugcggcagaucgcacccggccagacaggcaagaucgccgacuacaacuacaagcugcccgacgacuucaccggcugcgugaucgccuggaacagcaacaaccucgacagcaaggugggcggcaacuacaacuaccuguaccggcuguuccggaagagcaaccugaagcccuucgagcgggacaucagcaccgagaucuaccaagccggcuccaccccuugcaacggcguggagggcuucaacugcuacuucccucugcagagcuacggcuuccagcccaccuacggcgugggcuaccagcccuaccgggugguggugcugagcuucgagcugcugcacgccccagccaccguguguggccccaagaagagcaccaaccuggugaagaacaagugcgugaacuucaacuucaacggccuuaccggcaccggcgugcugaccgagagcaacaagaaauuccugcccuuucagcaguucggccgggacaucgccgacaccaccgacgcugugcgggauccccagacccuggagauccuggacaucaccccuugcagcuucggcggcgugagcgugaucaccccaggcaccaacaccagcaaccagguggccgugcuguaccagggcgugaacugcaccgaggugcccguggccauccacgccgaccagcugacacccaccuggcgggucuacagcaccggcagcaacguguuccagacccgggccgguugccugaucggcgccgagcacgugaacaacagcuacgagugcgacauccccaucggcgccggcaucugugccagcuaccagacccagaccaauucaccccggagggcaaggagcguggccagccagagcaucaucgccuacaccaugagccugggcgccgagaacagcguggccuacagcaacaacagcaucgccauccccaccaacuucaccaucagcgugaccaccgagauucugcccgugagcaugaccaagaccagcguggacugcaccauguacaucugcggcgacagcaccgagugcagcaaccugcugcugcaguacggcagcuucugcacccagcugaaccgggcccugaccggcaucgccguggagcaggacaagaacacccaggagguguucgcccaggugaagcagaucuacaagaccccucccaucaaggacuucggcggcuucaacuucagccagauccugcccgaccccagcaagcccagcaagcggagcuucaucgaggaccugcuguucaacaaggugacccuagccgacgccggcuucaucaagcaguacggcgacugccucggcgacauagccgcccgggaccugaucugcgcccagaaguucaacggccugaccgugcugccuccccugcugaccgacgagaugaucgcccaguacaccagcgcccuguuagccggaaccaucaccagcggcuggacuuucggcgcuggagccgcucugcagauccccuucgccaugcagauggccuaccgguucaacggcaucggcgugacccagaacgugcuguacgagaaccagaagcugaucgccaaccaguucaacagcgccaucggcaagauccaggacagccugagcagcaccgcuagcgcccugggcaagcugcaggacguggugaaccagaacgcccaggcccugaacacccuggugaagcagcugagcagcaacuucggcgccaucagcagcgugcugaacgacauccugagccggcuggacccucccgaggccgaggugcagaucgaccggcugaucacuggccggcugcagagccugcagaccuacgugacccagcagcugauccgggccgccgagauucgggccagcgccaaccuggccgccaccaagaugagcgagugcgugcugggccagagcaagcggguggacuucugcggcaagggcuaccaccugaugagcuuuccccagagcgcaccccacggagugguguuccugcacgugaccuacgugcccgcccaggagaagaacuucaccaccgccccagccaucugccacgacggcaaggcccacuuuccccgggagggcguguucgugagcaacggcacccacugguucgugacccagcggaacuucuacgagccccagaucaucaccaccgacaacaccuucgugagcggcaacugcgacguggugaucggcaucgugaacaacaccguguacgauccccugcagcccgagcuggacagcuucaaggaggagcuggacaaguacuucaagaaucacaccagccccgacguggaccugggcgacaucagcggcaucaacgccagcguggugaacauccagaaggagaucgaucggcugaacgagguggccaagaaccugaacgagagccugaucgaccugcaggagcugggcaaguacgagcaguacaucaaguggcccugguacaucuggcugggcuucaucgccggccugaucgccaucgugauggugaccaucaugcugugcugcaugaccagcugcugcagcugccugaagggcuguugcagcugcggcagcugcugcaaguucgacgaggacgacagcgagcccgugcugaagggcgugaagcugcacuacaccugaggacuaguuauaagacugacuagcccgaugggccucccaacgggcccuccuccccuccuugcaccgagauuaaucaaaggcucuuuucagagccaccaaaaaaaaaaaaaaaaaaaaaaaaaaaaaaaaaaaaaaaaaaaaaaaaaaaaaaaaaaaaaaaaaaaaaaaaaaaaaaaaaaaaaaaaaaaaaaaaaaaaa

SEQ ID NO: 24219 - RNA, 4029 nt, Artificial Sequence
  SARS-CoV-2/Wuhan/WIV05/2019__EPI_ISL_402128 spike protein mRNA gc (1-1273)(K986P_V987P_H69del_V70del_D614G)
aggagaaagcuuaccauguucguguuccuggugcugcugccccuggugagcagccagugcgugaaccugaccacccggacccagcugccaccagccuacaccaacagcuucacccggggcgucuacuaccccgacaagguguuccggagcagcguccugcacagcacccaggaccuguuccugcccuucuucagcaacgugaccugguuccacgccaucagcggcaccaacggcaccaagcgguucgacaaccccgugcugcccuucaacgacggcguguacuucgccagcaccgagaagagcaacaucauccggggcuggaucuucggcaccacccuggacagcaagacccagagccugcugaucgugaauaacgccaccaacguggugaucaaggugugcgaguuccaguucugcaacgaccccuuccugggcguguacuaccacaagaacaacaagagcuggauggagagcgaguuccggguguacagcagcgccaacaacugcaccuucgaguacgugagccagcccuuccugauggaccuggagggcaagcagggcaacuucaagaaccugcgggaguucguguucaagaacaucgacggcuacuucaagaucuacagcaagcacaccccaaucaaccuggugcgggaucugccccagggcuucucagcccuggagccccugguggaccugcccaucggcaucaacaucacccgguuccagacccugcuggcccugcaccggagcuaccugaccccaggcgacagcagcagcggguggacagcaggcgcggcugcuuacuacgugggcuaccugcagccccggaccuuccugcugaaguacaacgagaacggcaccaucaccgacgccguggacugcgcccuggacccucugagcgagaccaagugcacccugaagagcuucaccguggagaagggcaucuaccagaccagcaacuuccgggugcagcccaccgagagcaucgugcgguuccccaacaucaccaaccugugccccuucggcgagguguucaacgccacccgguucgccagcguguacgccuggaaccggaagcggaucagcaacugcguggccgacuacagcgugcuguacaacagcgccagcuucagcaccuucaagugcuacggcgugagccccaccaagcugaacgaccugugcuucaccaacguguacgccgacagcuucgugauccguggcgacgaggugcggcagaucgcacccggccagacaggcaagaucgccgacuacaacuacaagcugcccgacgacuucaccggcugcgugaucgccuggaacagcaacaaccucgacagcaaggugggcggcaacuacaacuaccuguaccggcuguuccggaagagcaaccugaagcccuucgagcgggacaucagcaccgagaucuaccaagccggcuccaccccuugcaacggcguggagggcuucaacugcuacuucccucugcagagcuacggcuuccagcccaccaacggcgugggcuaccagcccuaccgggugguggugcugagcuucgagcugcugcacgccccagccaccguguguggccccaagaagagcaccaaccuggugaagaacaagugcgugaacuucaacuucaacggccuuaccggcaccggcgugcugaccgagagcaacaagaaauuccugcccuuucagcaguucggccgggacaucgccgacaccaccgacgcugugcgggauccccagacccuggagauccuggacaucaccccuugcagcuucggcggcgugagcgugaucaccccaggcaccaacaccagcaaccagguggccgugcuguaccagggcgugaacugcaccgaggugcccguggccauccacgccgaccagcugacacccaccuggcgggucuacagcaccggcagcaacguguuccagacccgggccgguugccugaucggcgccgagcacgugaacaacagcuacgagugcgacauccccaucggcgccggcaucugugccagcuaccagacccagaccaauucaccccggagggcaaggagcguggccagccagagcaucaucgccuacaccaugagccugggcgccgagaacagcguggccuacagcaacaacagcaucgccauccccaccaacuucaccaucagcgugaccaccgagauucugcccgugagcaugaccaagaccagcguggacugcaccauguacaucugcggcgacagcaccgagugcagcaaccugcugcugcaguacggcagcuucugcacccagcugaaccgggcccugaccggcaucgccguggagcaggacaagaacacccaggagguguucgcccaggugaagcagaucuacaagaccccucccaucaaggacuucggcggcuucaacuucagccagauccugcccgaccccagcaagcccagcaagcggagcuucaucgaggaccugcuguucaacaaggugacccuagccgacgccggcuucaucaagcaguacggcgacugccucggcgacauagccgcccgggaccugaucugcgcccagaaguucaacggccugaccgugcugccuccccugcugaccgacgagaugaucgcccaguacaccagcgcccuguuagccggaaccaucaccagcggcuggacuuucggcgcuggagccgcucugcagauccccuucgccaugcagauggccuaccgguucaacggcaucggcgugacccagaacgugcuguacgagaaccagaagcugaucgccaaccaguucaacagcgccaucggcaagauccaggacagccugagcagcaccgcuagcgcccugggcaagcugcaggacguggugaaccagaacgcccaggcccugaacacccuggugaagcagcugagcagcaacuucggcgccaucagcagcgugcugaacgacauccugagccggcuggacccucccgaggccgaggugcagaucgaccggcugaucacuggccggcugcagagccugcagaccuacgugacccagcagcugauccgggccgccgagauucgggccagcgccaaccuggccgccaccaagaugagcgagugcgugcugggccagagcaagcggguggacuucugcggcaagggcuaccaccugaugagcuuuccccagagcgcaccccacggagugguguuccugcacgugaccuacgugcccgcccaggagaagaacuucaccaccgccccagccaucugccacgacggcaaggcccacuuuccccgggagggcguguucgugagcaacggcacccacugguucgugacccagcggaacuucuacgagccccagaucaucaccaccgacaacaccuucgugagcggcaacugcgacguggugaucggcaucgugaacaacaccguguacgauccccugcagcccgagcuggacagcuucaaggaggagcuggacaaguacuucaagaaucacaccagccccgacguggaccugggcgacaucagcggcaucaacgccagcguggugaacauccagaaggagaucgaucggcugaacgagguggccaagaaccugaacgagagccugaucgaccugcaggagcugggcaaguacgagcaguacaucaaguggcccugguacaucuggcugggcuucaucgccggccugaucgccaucgugauggugaccaucaugcugugcugcaugaccagcugcugcagcugccugaagggcuguugcagcugcggcagcugcugcaaguucgacgaggacgacagcgagcccgugcugaagggcgugaagcugcacuacaccugaggacuaguuauaagacugacuagcccgaugggccucccaacgggcccuccuccccuccuugcaccgagauuaaucaaaggcucuuuucagagccaccaaaaaaaaaaaaaaaaaaaaaaaaaaaaaaaaaaaaaaaaaaaaaaaaaaaaaaaaaaaaaaaaaaaaaaaaaaaaaaaaaaaaaaaaaaaaaaaaaaaaa

SEQ ID NO: 24220 - RNA, 4035 nt, Artificial Sequence
  SARS-CoV-2/Wuhan/WIV05/2019__EPI_ISL_402128 spike protein mRNA gc (1-1273)(K986P_V987P_Y453F_D614G)
aggagaaagcuuaccauguucguguuccuggugcugcugccccuggugagcagccagugcgugaaccugaccacccggacccagcugccaccagccuacaccaacagcuucacccggggcgucuacuaccccgacaagguguuccggagcagcguccugcacagcacccaggaccuguuccugcccuucuucagcaacgugaccugguuccacgccauccacgugagcggcaccaacggcaccaagcgguucgacaaccccgugcugcccuucaacgacggcguguacuucgccagcaccgagaagagcaacaucauccggggcuggaucuucggcaccacccuggacagcaagacccagagccugcugaucgugaauaacgccaccaacguggugaucaaggugugcgaguuccaguucugcaacgaccccuuccugggcguguacuaccacaagaacaacaagagcuggauggagagcgaguuccggguguacagcagcgccaacaacugcaccuucgaguacgugagccagcccuuccugauggaccuggagggcaagcagggcaacuucaagaaccugcgggaguucguguucaagaacaucgacggcuacuucaagaucuacagcaagcacaccccaaucaaccuggugcgggaucugccccagggcuucucagcccuggagccccugguggaccugcccaucggcaucaacaucacccgguuccagacccugcuggcccugcaccggagcuaccugaccccaggcgacagcagcagcggguggacagcaggcgcggcugcuuacuacgugggcuaccugcagccccggaccuuccugcugaaguacaacgagaacggcaccaucaccgacgccguggacugcgcccuggacccucugagcgagaccaagugcacccugaagagcuucaccguggagaagggcaucuaccagaccagcaacuuccgggugcagcccaccgagagcaucgugcgguuccccaacaucaccaaccugugccccuucggcgagguguucaacgccacccgguucgccagcguguacgccuggaaccggaagcggaucagcaacugcguggccgacuacagcgugcuguacaacagcgccagcuucagcaccuucaagugcuacggcgugagccccaccaagcugaacgaccugugcuucaccaacguguacgccgacagcuucgugauccguggcgacgaggugcggcagaucgcacccggccagacaggcaagaucgccgacuacaacuacaagcugcccgacgacuucaccggcugcgugaucgccuggaacagcaacaaccucgacagcaaggugggcggcaacuacaacuaccuguuccggcuguuccggaagagcaaccugaagcccuucgagcgggacaucagcaccgagaucuaccaagccggcuccaccccuugcaacggcguggagggcuucaacugcuacuucccucugcagagcuacggcuuccagcccaccaacggcgugggcuaccagcccuaccgggugguggugcugagcuucgagcugcugcacgccccagccaccguguguggccccaagaagagcaccaaccuggugaagaacaagugcgugaacuucaacuucaacggccuuaccggcaccggcgugcugaccgagagcaacaagaaauuccugcccuuucagcaguucggccgggacaucgccgacaccaccgacgcugugcgggauccccagacccuggagauccuggacaucaccccuugcagcuucggcggcgugagcgugaucaccccaggcaccaacaccagcaaccagguggccgugcuguaccagggcgugaacugcaccgaggugcccguggccauccacgccgaccagcugacacccaccuggcgggucuacagcaccggcagcaacguguuccagacccgggccgguugccugaucggcgccgagcacgugaacaacagcuacgagugcgacauccccaucggcgccggcaucugugccagcuaccagacccagaccaauucaccccggagggcaaggagcguggccagccagagcaucaucgccuacaccaugagccugggcgccgagaacagcguggccuacagcaacaacagcaucgccauccccaccaacuucaccaucagcgugaccaccgagauucugcccgugagcaugaccaagaccagcguggacugcaccauguacaucugcggcgacagcaccgagugcagcaaccugcugcugcaguacggcagcuucugcacccagcugaaccgggcccugaccggcaucgccguggagcaggacaagaacacccaggagguguucgcccaggugaagcagaucuacaagaccccucccaucaaggacuucggcggcuucaacuucagccagauccugcccgaccccagcaagcccagcaagcggagcuucaucgaggaccugcuguucaacaaggugacccuagccgacgccggcuucaucaagcaguacggcgacugccucggcgacauagccgcccgggaccugaucugcgcccagaaguucaacggccugaccgugcugccuccccugcugaccgacgagaugaucgcccaguacaccagcgcccuguuagccggaaccaucaccagcggcuggacuuucggcgcuggagccgcucugcagauccccuucgccaugcagauggccuaccgguucaacggcaucggcgugacccagaacgugcuguacgagaaccagaagcugaucgccaaccaguucaacagcgccaucggcaagauccaggacagccugagcagcaccgcuagcgcccugggcaagcugcaggacguggugaaccagaacgcccaggcccugaacacccuggugaagcagcugagcagcaacuucggcgccaucagcagcgugcugaacgacauccugagccggcuggacccucccgaggccgaggugcagaucgaccggcugaucacuggccggcugcagagccugcagaccuacgugacccagcagcugauccgggccgccgagauucgggccagcgccaaccuggccgccaccaagaugagcgagugcgugcugggccagagcaagcggguggacuucugcggcaagggcuaccaccugaugagcuuuccccagagcgcaccccacggagugguguuccugcacgugaccuacgugcccgcccaggagaagaacuucaccaccgccccagccaucugccacgacggcaaggcccacuuuccccgggagggcguguucgugagcaacggcacccacugguucgugacccagcggaacuucuacgagccccagaucaucaccaccgacaacaccuucgugagcggcaacugcgacguggugaucggcaucgugaacaacaccguguacgauccccugcagcccgagcuggacagcuucaaggaggagcuggacaaguacuucaagaaucacaccagccccgacguggaccugggcgacaucagcggcaucaacgccagcguggugaacauccagaaggagaucgaucggcugaacgagguggccaagaaccugaacgagagccugaucgaccugcaggagcugggcaaguacgagcaguacaucaaguggcccugguacaucuggcugggcuucaucgccggccugaucgccaucgugauggugaccaucaugcugugcugcaugaccagcugcugcagcugccugaagggcuguugcagcugcggcagcugcugcaaguucgacgaggacgacagcgagcccgugcugaagggcgugaagcugcacuacaccugaggacuaguuauaagacugacuagcccgaugggccucccaacgggcccuccuccccuccuugcaccgagauuaaucaaaggcucuuuucagagccaccaaaaaaaaaaaaaaaaaaaaaaaaaaaaaaaaaaaaaaaaaaaaaaaaaaaaaaaaaaaaaaaaaaaaaaaaaaaaaaaaaaaaaaaaaaaaaaaaaaaaa

SEQ ID NO: 24221 - RNA, 4035 nt, Artificial Sequence
  SARS-CoV-2/Wuhan/WIV05/2019__EPI_ISL_402128 spike protein mRNA gc (1-1273)(K986P_V987P_D614G_I692V)
aggagaaagcuuaccauguucguguuccuggugcugcugccccuggugagcagccagugcgugaaccugaccacccggacccagcugccaccagccuacaccaacagcuucacccggggcgucuacuaccccgacaagguguuccggagcagcguccugcacagcacccaggaccuguuccugcccuucuucagcaacgugaccugguuccacgccauccacgugagcggcaccaacggcaccaagcgguucgacaaccccgugcugcccuucaacgacggcguguacuucgccagcaccgagaagagcaacaucauccggggcuggaucuucggcaccacccuggacagcaagacccagagccugcugaucgugaauaacgccaccaacguggugaucaaggugugcgaguuccaguucugcaacgaccccuuccugggcguguacuaccacaagaacaacaagagcuggauggagagcgaguuccggguguacagcagcgccaacaacugcaccuucgaguacgugagccagcccuuccugauggaccuggagggcaagcagggcaacuucaagaaccugcgggaguucguguucaagaacaucgacggcuacuucaagaucuacagcaagcacaccccaaucaaccuggugcgggaucugccccagggcuucucagcccuggagccccugguggaccugcccaucggcaucaacaucacccgguuccagacccugcuggcccugcaccggagcuaccugaccccaggcgacagcagcagcggguggacagcaggcgcggcugcuuacuacgugggcuaccugcagccccggaccuuccugcugaaguacaacgagaacggcaccaucaccgacgccguggacugcgcccuggacccucugagcgagaccaagugcacccugaagagcuucaccguggagaagggcaucuaccagaccagcaacuuccgggugcagcccaccgagagcaucgugcgguuccccaacaucaccaaccugugccccuucggcgagguguucaacgccacccgguucgccagcguguacgccuggaaccggaagcggaucagcaacugcguggccgacuacagcgugcuguacaacagcgccagcuucagcaccuucaagugcuacggcgugagccccaccaagcugaacgaccugugcuucaccaacguguacgccgacagcuucgugauccguggcgacgaggugcggcagaucgcacccggccagacaggcaagaucgccgacuacaacuacaagcugcccgacgacuucaccggcugcgugaucgccuggaacagcaacaaccucgacagcaaggugggcggcaacuacaacuaccuguaccggcuguuccggaagagcaaccugaagcccuucgagcgggacaucagcaccgagaucuaccaagccggcuccaccccuugcaacggcguggagggcuucaacugcuacuucccucugcagagcuacggcuuccagcccaccaacggcgugggcuaccagcccuaccgggugguggugcugagcuucgagcugcugcacgccccagccaccguguguggccccaagaagagcaccaaccuggugaagaacaagugcgugaacuucaacuucaacggccuuaccggcaccggcgugcugaccgagagcaacaagaaauuccugcccuuucagcaguucggccgggacaucgccgacaccaccgacgcugugcgggauccccagacccuggagauccuggacaucaccccuugcagcuucggcggcgugagcgugaucaccccaggcaccaacaccagcaaccagguggccgugcuguaccagggcgugaacugcaccgaggugcccguggccauccacgccgaccagcugacacccaccuggcgggucuacagcaccggcagcaacguguuccagacccgggccgguugccugaucggcgccgagcacgugaacaacagcuacgagugcgacauccccaucggcgccggcaucugugccagcuaccagacccagaccaauucaccccggagggcaaggagcguggccagccagagcgugaucgccuacaccaugagccugggcgccgagaacagcguggccuacagcaacaacagcaucgccauccccaccaacuucaccaucagcgugaccaccgagauucugcccgugagcaugaccaagaccagcguggacugcaccauguacaucugcggcgacagcaccgagugcagcaaccugcugcugcaguacggcagcuucugcacccagcugaaccgggcccugaccggcaucgccguggagcaggacaagaacacccaggagguguucgcccaggugaagcagaucuacaagaccccucccaucaaggacuucggcggcuucaacuucagccagauccugcccgaccccagcaagcccagcaagcggagcuucaucgaggaccugcuguucaacaaggugacccuagccgacgccggcuucaucaagcaguacggcgacugccucggcgacauagccgcccgggaccugaucugcgcccagaaguucaacggccugaccgugcugccuccccugcugaccgacgagaugaucgcccaguacaccagcgcccuguuagccggaaccaucaccagcggcuggacuuucggcgcuggagccgcucugcagauccccuucgccaugcagauggccuaccgguucaacggcaucggcgugacccagaacgugcuguacgagaaccagaagcugaucgccaaccaguucaacagcgccaucggcaagauccaggacagccugagcagcaccgcuagcgcccugggcaagcugcaggacguggugaaccagaacgcccaggcccugaacacccuggugaagcagcugagcagcaacuucggcgccaucagcagcgugcugaacgacauccugagccggcuggacccucccgaggccgaggugcagaucgaccggcugaucacuggccggcugcagagccugcagaccuacgugacccagcagcugauccgggccgccgagauucgggccagcgccaaccuggccgccaccaagaugagcgagugcgugcugggccagagcaagcggguggacuucugcggcaagggcuaccaccugaugagcuuuccccagagcgcaccccacggagugguguuccugcacgugaccuacgugcccgcccaggagaagaacuucaccaccgccccagccaucugccacgacggcaaggcccacuuuccccgggagggcguguucgugagcaacggcacccacugguucgugacccagcggaacuucuacgagccccagaucaucaccaccgacaacaccuucgugagcggcaacugcgacguggugaucggcaucgugaacaacaccguguacgauccccugcagcccgagcuggacagcuucaaggaggagcuggacaaguacuucaagaaucacaccagccccgacguggaccugggcgacaucagcggcaucaacgccagcguggugaacauccagaaggagaucgaucggcugaacgagguggccaagaaccugaacgagagccugaucgaccugcaggagcugggcaaguacgagcaguacaucaaguggcccugguacaucuggcugggcuucaucgccggccugaucgccaucgugauggugaccaucaugcugugcugcaugaccagcugcugcagcugccugaagggcuguugcagcugcggcagcugcugcaaguucgacgaggacgacagcgagcccgugcugaagggcgugaagcugcacuacaccugaggacuaguuauaagacugacuagcccgaugggccucccaacgggcccuccuccccuccuugcaccgagauuaaucaaaggcucuuuucagagccaccaaaaaaaaaaaaaaaaaaaaaaaaaaaaaaaaaaaaaaaaaaaaaaaaaaaaaaaaaaaaaaaaaaaaaaaaaaaaaaaaaaaaaaaaaaaaaaaaaaaaa

SEQ ID NO: 24222 - RNA, 4035 nt, Artificial Sequence
  SARS-CoV-2/Wuhan/WIV05/2019__EPI_ISL_402128 spike protein mRNA gc (1-1273)(K986P_V987P_D614G_M1229I)
aggagaaagcuuaccauguucguguuccuggugcugcugccccuggugagcagccagugcgugaaccugaccacccggacccagcugccaccagccuacaccaacagcuucacccggggcgucuacuaccccgacaagguguuccggagcagcguccugcacagcacccaggaccuguuccugcccuucuucagcaacgugaccugguuccacgccauccacgugagcggcaccaacggcaccaagcgguucgacaaccccgugcugcccuucaacgacggcguguacuucgccagcaccgagaagagcaacaucauccggggcuggaucuucggcaccacccuggacagcaagacccagagccugcugaucgugaauaacgccaccaacguggugaucaaggugugcgaguuccaguucugcaacgaccccuuccugggcguguacuaccacaagaacaacaagagcuggauggagagcgaguuccggguguacagcagcgccaacaacugcaccuucgaguacgugagccagcccuuccugauggaccuggagggcaagcagggcaacuucaagaaccugcgggaguucguguucaagaacaucgacggcuacuucaagaucuacagcaagcacaccccaaucaaccuggugcgggaucugccccagggcuucucagcccuggagccccugguggaccugcccaucggcaucaacaucacccgguuccagacccugcuggcccugcaccggagcuaccugaccccaggcgacagcagcagcggguggacagcaggcgcggcugcuuacuacgugggcuaccugcagccccggaccuuccugcugaaguacaacgagaacggcaccaucaccgacgccguggacugcgcccuggacccucugagcgagaccaagugcacccugaagagcuucaccguggagaagggcaucuaccagaccagcaacuuccgggugcagcccaccgagagcaucgugcgguuccccaacaucaccaaccugugccccuucggcgagguguucaacgccacccgguucgccagcguguacgccuggaaccggaagcggaucagcaacugcguggccgacuacagcgugcuguacaacagcgccagcuucagcaccuucaagugcuacggcgugagccccaccaagcugaacgaccugugcuucaccaacguguacgccgacagcuucgugauccguggcgacgaggugcggcagaucgcacccggccagacaggcaagaucgccgacuacaacuacaagcugcccgacgacuucaccggcugcgugaucgccuggaacagcaacaaccucgacagcaaggugggcggcaacuacaacuaccuguaccggcuguuccggaagagcaaccugaagcccuucgagcgggacaucagcaccgagaucuaccaagccggcuccaccccuugcaacggcguggagggcuucaacugcuacuucccucugcagagcuacggcuuccagcccaccaacggcgugggcuaccagcccuaccgggugguggugcugagcuucgagcugcugcacgccccagccaccguguguggccccaagaagagcaccaaccuggugaagaacaagugcgugaacuucaacuucaacggccuuaccggcaccggcgugcugaccgagagcaacaagaaauuccugcccuuucagcaguucggccgggacaucgccgacaccaccgacgcugugcgggauccccagacccuggagauccuggacaucaccccuugcagcuucggcggcgugagcgugaucaccccaggcaccaacaccagcaaccagguggccgugcuguaccagggcgugaacugcaccgaggugcccguggccauccacgccgaccagcugacacccaccuggcgggucuacagcaccggcagcaacguguuccagacccgggccgguugccugaucggcgccgagcacgugaacaacagcuacgagugcgacauccccaucggcgccggcaucugugccagcuaccagacccagaccaauucaccccggagggcaaggagcguggccagccagagcaucaucgccuacaccaugagccugggcgccgagaacagcguggccuacagcaacaacagcaucgccauccccaccaacuucaccaucagcgugaccaccgagauucugcccgugagcaugaccaagaccagcguggacugcaccauguacaucugcggcgacagcaccgagugcagcaaccugcugcugcaguacggcagcuucugcacccagcugaaccgggcccugaccggcaucgccguggagcaggacaagaacacccaggagguguucgcccaggugaagcagaucuacaagaccccucccaucaaggacuucggcggcuucaacuucagccagauccugcccgaccccagcaagcccagcaagcggagcuucaucgaggaccugcuguucaacaaggugacccuagccgacgccggcuucaucaagcaguacggcgacugccucggcgacauagccgcccgggaccugaucugcgcccagaaguucaacggccugaccgugcugccuccccugcugaccgacgagaugaucgcccaguacaccagcgcccuguuagccggaaccaucaccagcggcuggacuuucggcgcuggagccgcucugcagauccccuucgccaugcagauggccuaccgguucaacggcaucggcgugacccagaacgugcuguacgagaaccagaagcugaucgccaaccaguucaacagcgccaucggcaagauccaggacagccugagcagcaccgcuagcgcccugggcaagcugcaggacguggugaaccagaacgcccaggcccugaacacccuggugaagcagcugagcagcaacuucggcgccaucagcagcgugcugaacgacauccugagccggcuggacccucccgaggccgaggugcagaucgaccggcugaucacuggccggcugcagagccugcagaccuacgugacccagcagcugauccgggccgccgagauucgggccagcgccaaccuggccgccaccaagaugagcgagugcgugcugggccagagcaagcggguggacuucugcggcaagggcuaccaccugaugagcuuuccccagagcgcaccccacggagugguguuccugcacgugaccuacgugcccgcccaggagaagaacuucaccaccgccccagccaucugccacgacggcaaggcccacuuuccccgggagggcguguucgugagcaacggcacccacugguucgugacccagcggaacuucuacgagccccagaucaucaccaccgacaacaccuucgugagcggcaacugcgacguggugaucggcaucgugaacaacaccguguacgauccccugcagcccgagcuggacagcuucaaggaggagcuggacaaguacuucaagaaucacaccagccccgacguggaccugggcgacaucagcggcaucaacgccagcguggugaacauccagaaggagaucgaucggcugaacgagguggccaagaaccugaacgagagccugaucgaccugcaggagcugggcaaguacgagcaguacaucaaguggcccugguacaucuggcugggcuucaucgccggccugaucgccaucgugaucgugaccaucaugcugugcugcaugaccagcugcugcagcugccugaagggcuguugcagcugcggcagcugcugcaaguucgacgaggacgacagcgagcccgugcugaagggcgugaagcugcacuacaccugaggacuaguuauaagacugacuagcccgaugggccucccaacgggcccuccuccccuccuugcaccgagauuaaucaaaggcucuuuucagagccaccaaaaaaaaaaaaaaaaaaaaaaaaaaaaaaaaaaaaaaaaaaaaaaaaaaaaaaaaaaaaaaaaaaaaaaaaaaaaaaaaaaaaaaaaaaaaaaaaaaaaa

SEQ ID NO: 24223 - RNA, 4029 nt, Artificial Sequence
  SARS-CoV-2/Wuhan/WIV05/2019__EPI_ISL_402128 spike protein mRNA gc (1-1273)(K986P_V987P_H69del_V70del_A222V_Y453F_S477N_D614G_I692V)
aggagaaagcuuaccauguucguguuccuggugcugcugccccuggugagcagccagugcgugaaccugaccacccggacccagcugccaccagccuacaccaacagcuucacccggggcgucuacuaccccgacaagguguuccggagcagcguccugcacagcacccaggaccuguuccugcccuucuucagcaacgugaccugguuccacgccaucagcggcaccaacggcaccaagcgguucgacaaccccgugcugcccuucaacgacggcguguacuucgccagcaccgagaagagcaacaucauccggggcuggaucuucggcaccacccuggacagcaagacccagagccugcugaucgugaauaacgccaccaacguggugaucaaggugugcgaguuccaguucugcaacgaccccuuccugggcguguacuaccacaagaacaacaagagcuggauggagagcgaguuccggguguacagcagcgccaacaacugcaccuucgaguacgugagccagcccuuccugauggaccuggagggcaagcagggcaacuucaagaaccugcgggaguucguguucaagaacaucgacggcuacuucaagaucuacagcaagcacaccccaaucaaccuggugcgggaucugccccagggcuucucagugcuggagccccugguggaccugcccaucggcaucaacaucacccgguuccagacccugcuggcccugcaccggagcuaccugaccccaggcgacagcagcagcggguggacagcaggcgcggcugcuuacuacgugggcuaccugcagccccggaccuuccugcugaaguacaacgagaacggcaccaucaccgacgccguggacugcgcccuggacccucugagcgagaccaagugcacccugaagagcuucaccguggagaagggcaucuaccagaccagcaacuuccgggugcagcccaccgagagcaucgugcgguuccccaacaucaccaaccugugccccuucggcgagguguucaacgccacccgguucgccagcguguacgccuggaaccggaagcggaucagcaacugcguggccgacuacagcgugcuguacaacagcgccagcuucagcaccuucaagugcuacggcgugagccccaccaagcugaacgaccugugcuucaccaacguguacgccgacagcuucgugauccguggcgacgaggugcggcagaucgcacccggccagacaggcaagaucgccgacuacaacuacaagcugcccgacgacuucaccggcugcgugaucgccuggaacagcaacaaccucgacagcaaggugggcggcaacuacaacuaccuguuccggcuguuccggaagagcaaccugaagcccuucgagcgggacaucagcaccgagaucuaccaagccggcaacaccccuugcaacggcguggagggcuucaacugcuacuucccucugcagagcuacggcuuccagcccaccaacggcgugggcuaccagcccuaccgggugguggugcugagcuucgagcugcugcacgccccagccaccguguguggccccaagaagagcaccaaccuggugaagaacaagugcgugaacuucaacuucaacggccuuaccggcaccggcgugcugaccgagagcaacaagaaauuccugcccuuucagcaguucggccgggacaucgccgacaccaccgacgcugugcgggauccccagacccuggagauccuggacaucaccccuugcagcuucggcggcgugagcgugaucaccccaggcaccaacaccagcaaccagguggccgugcuguaccagggcgugaacugcaccgaggugcccguggccauccacgccgaccagcugacacccaccuggcgggucuacagcaccggcagcaacguguuccagacccgggccgguugccugaucggcgccgagcacgugaacaacagcuacgagugcgacauccccaucggcgccggcaucugugccagcuaccagacccagaccaauucaccccggagggcaaggagcguggccagccagagcgugaucgccuacaccaugagccugggcgccgagaacagcguggccuacagcaacaacagcaucgccauccccaccaacuucaccaucagcgugaccaccgagauucugcccgugagcaugaccaagaccagcguggacugcaccauguacaucugcggcgacagcaccgagugcagcaaccugcugcugcaguacggcagcuucugcacccagcugaaccgggcccugaccggcaucgccguggagcaggacaagaacacccaggagguguucgcccaggugaagcagaucuacaagaccccucccaucaaggacuucggcggcuucaacuucagccagauccugcccgaccccagcaagcccagcaagcggagcuucaucgaggaccugcuguucaacaaggugacccuagccgacgccggcuucaucaagcaguacggcgacugccucggcgacauagccgcccgggaccugaucugcgcccagaaguucaacggccugaccgugcugccuccccugcugaccgacgagaugaucgcccaguacaccagcgcccuguuagccggaaccaucaccagcggcuggacuuucggcgcuggagccgcucugcagauccccuucgccaugcagauggccuaccgguucaacggcaucggcgugacccagaacgugcuguacgagaaccagaagcugaucgccaaccaguucaacagcgccaucggcaagauccaggacagccugagcagcaccgcuagcgcccugggcaagcugcaggacguggugaaccagaacgcccaggcccugaacacccuggugaagcagcugagcagcaacuucggcgccaucagcagcgugcugaacgacauccugagccggcuggacccucccgaggccgaggugcagaucgaccggcugaucacuggccggcugcagagccugcagaccuacgugacccagcagcugauccgggccgccgagauucgggccagcgccaaccuggccgccaccaagaugagcgagugcgugcugggccagagcaagcggguggacuucugcggcaagggcuaccaccugaugagcuuuccccagagcgcaccccacggagugguguuccugcacgugaccuacgugcccgcccaggagaagaacuucaccaccgccccagccaucugccacgacggcaaggcccacuuuccccgggagggcguguucgugagcaacggcacccacugguucgugacccagcggaacuucuacgagccccagaucaucaccaccgacaacaccuucgugagcggcaacugcgacguggugaucggcaucgugaacaacaccguguacgauccccugcagcccgagcuggacagcuucaaggaggagcuggacaaguacuucaagaaucacaccagccccgacguggaccugggcgacaucagcggcaucaacgccagcguggugaacauccagaaggagaucgaucggcugaacgagguggccaagaaccugaacgagagccugaucgaccugcaggagcugggcaaguacgagcaguacaucaaguggcccugguacaucuggcugggcuucaucgccggccugaucgccaucgugauggugaccaucaugcugugcugcaugaccagcugcugcagcugccugaagggcuguugcagcugcggcagcugcugcaaguucgacgaggacgacagcgagcccgugcugaagggcgugaagcugcacuacaccugaggacuaguuauaagacugacuagcccgaugggccucccaacgggcccuccuccccuccuugcaccgagauuaaucaaaggcucuuuucagagccaccaaaaaaaaaaaaaaaaaaaaaaaaaaaaaaaaaaaaaaaaaaaaaaaaaaaaaaaaaaaaaaaaaaaaaaaaaaaaaaaaaaaaaaaaaaaaaaaaaaaaa

SEQ ID NO: 24224 - RNA, 4029 nt, Artificial Sequence
  SARS-CoV-2/Wuhan/WIV05/2019__EPI_ISL_402128 spike protein mRNA gc (1-1273)(K986P_V987P_H69del_V70del_Y453F_D614G_I692V_M1229I)
aggagaaagcuuaccauguucguguuccuggugcugcugccccuggugagcagccagugcgugaaccugaccacccggacccagcugccaccagccuacaccaacagcuucacccggggcgucuacuaccccgacaagguguuccggagcagcguccugcacagcacccaggaccuguuccugcccuucuucagcaacgugaccugguuccacgccaucagcggcaccaacggcaccaagcgguucgacaaccccgugcugcccuucaacgacggcguguacuucgccagcaccgagaagagcaacaucauccggggcuggaucuucggcaccacccuggacagcaagacccagagccugcugaucgugaauaacgccaccaacguggugaucaaggugugcgaguuccaguucugcaacgaccccuuccugggcguguacuaccacaagaacaacaagagcuggauggagagcgaguuccggguguacagcagcgccaacaacugcaccuucgaguacgugagccagcccuuccugauggaccuggagggcaagcagggcaacuucaagaaccugcgggaguucguguucaagaacaucgacggcuacuucaagaucuacagcaagcacaccccaaucaaccuggugcgggaucugccccagggcuucucagcccuggagccccugguggaccugcccaucggcaucaacaucacccgguuccagacccugcuggcccugcaccggagcuaccugaccccaggcgacagcagcagcggguggacagcaggcgcggcugcuuacuacgugggcuaccugcagccccggaccuuccugcugaaguacaacgagaacggcaccaucaccgacgccguggacugcgcccuggacccucugagcgagaccaagugcacccugaagagcuucaccguggagaagggcaucuaccagaccagcaacuuccgggugcagcccaccgagagcaucgugcgguuccccaacaucaccaaccugugccccuucggcgagguguucaacgccacccgguucgccagcguguacgccuggaaccggaagcggaucagcaacugcguggccgacuacagcgugcuguacaacagcgccagcuucagcaccuucaagugcuacggcgugagccccaccaagcugaacgaccugugcuucaccaacguguacgccgacagcuucgugauccguggcgacgaggugcggcagaucgcacccggccagacaggcaagaucgccgacuacaacuacaagcugcccgacgacuucaccggcugcgugaucgccuggaacagcaacaaccucgacagcaaggugggcggcaacuacaacuaccuguuccggcuguuccggaagagcaaccugaagcccuucgagcgggacaucagcaccgagaucuaccaagccggcuccaccccuugcaacggcguggagggcuucaacugcuacuucccucugcagagcuacggcuuccagcccaccaacggcgugggcuaccagcccuaccgggugguggugcugagcuucgagcugcugcacgccccagccaccguguguggccccaagaagagcaccaaccuggugaagaacaagugcgugaacuucaacuucaacggccuuaccggcaccggcgugcugaccgagagcaacaagaaauuccugcccuuucagcaguucggccgggacaucgccgacaccaccgacgcugugcgggauccccagacccuggagauccuggacaucaccccuugcagcuucggcggcgugagcgugaucaccccaggcaccaacaccagcaaccagguggccgugcuguaccagggcgugaacugcaccgaggugcccguggccauccacgccgaccagcugacacccaccuggcgggucuacagcaccggcagcaacguguuccagacccgggccgguugccugaucggcgccgagcacgugaacaacagcuacgagugcgacauccccaucggcgccggcaucugugccagcuaccagacccagaccaauucaccccggagggcaaggagcguggccagccagagcgugaucgccuacaccaugagccugggcgccgagaacagcguggccuacagcaacaacagcaucgccauccccaccaacuucaccaucagcgugaccaccgagauucugcccgugagcaugaccaagaccagcguggacugcaccauguacaucugcggcgacagcaccgagugcagcaaccugcugcugcaguacggcagcuucugcacccagcugaaccgggcccugaccggcaucgccguggagcaggacaagaacacccaggagguguucgcccaggugaagcagaucuacaagaccccucccaucaaggacuucggcggcuucaacuucagccagauccugcccgaccccagcaagcccagcaagcggagcuucaucgaggaccugcuguucaacaaggugacccuagccgacgccggcuucaucaagcaguacggcgacugccucggcgacauagccgcccgggaccugaucugcgcccagaaguucaacggccugaccgugcugccuccccugcugaccgacgagaugaucgcccaguacaccagcgcccuguuagccggaaccaucaccagcggcuggacuuucggcgcuggagccgcucugcagauccccuucgccaugcagauggccuaccgguucaacggcaucggcgugacccagaacgugcuguacgagaaccagaagcugaucgccaaccaguucaacagcgccaucggcaagauccaggacagccugagcagcaccgcuagcgcccugggcaagcugcaggacguggugaaccagaacgcccaggcccugaacacccuggugaagcagcugagcagcaacuucggcgccaucagcagcgugcugaacgacauccugagccggcuggacccucccgaggccgaggugcagaucgaccggcugaucacuggccggcugcagagccugcagaccuacgugacccagcagcugauccgggccgccgagauucgggccagcgccaaccuggccgccaccaagaugagcgagugcgugcugggccagagcaagcggguggacuucugcggcaagggcuaccaccugaugagcuuuccccagagcgcaccccacggagugguguuccugcacgugaccuacgugcccgcccaggagaagaacuucaccaccgccccagccaucugccacgacggcaaggcccacuuuccccgggagggcguguucgugagcaacggcacccacugguucgugacccagcggaacuucuacgagccccagaucaucaccaccgacaacaccuucgugagcggcaacugcgacguggugaucggcaucgugaacaacaccguguacgauccccugcagcccgagcuggacagcuucaaggaggagcuggacaaguacuucaagaaucacaccagccccgacguggaccugggcgacaucagcggcaucaacgccagcguggugaacauccagaaggagaucgaucggcugaacgagguggccaagaaccugaacgagagccugaucgaccugcaggagcugggcaaguacgagcaguacaucaaguggcccugguacaucuggcugggcuucaucgccggccugaucgccaucgugaucgugaccaucaugcugugcugcaugaccagcugcugcagcugccugaagggcuguugcagcugcggcagcugcugcaaguucgacgaggacgacagcgagcccgugcugaagggcgugaagcugcacuacaccugaggacuaguuauaagacugacuagcccgaugggccucccaacgggcccuccuccccuccuugcaccgagauuaaucaaaggcucuuuucagagccaccaaaaaaaaaaaaaaaaaaaaaaaaaaaaaaaaaaaaaaaaaaaaaaaaaaaaaaaaaaaaaaaaaaaaaaaaaaaaaaaaaaaaaaaaaaaaaaaaaaaaa

SEQ ID NO: 24225 - RNA, 4026 nt, Artificial Sequence
  SARS-CoV-2/Wuhan/WIV05/2019__EPI_ISL_402128 spike protein mRNA gc (1-1273)(K986P_V987P_K986P_V987P_H69del_V70del_Y144del_N501Y_A570 D_D614G_P681H_T716I_S982A_D1118H)
aggagaaagcuuaccauguucguguuccuggugcugcugccccuggugagcagccagugcgugaaccugaccacccggacccagcugccaccagccuacaccaacagcuucacccggggcgucuacuaccccgacaagguguuccggagcagcguccugcacagcacccaggaccuguuccugcccuucuucagcaacgugaccugguuccacgccaucagcggcaccaacggcaccaagcgguucgacaaccccgugcugcccuucaacgacggcguguacuucgccagcaccgagaagagcaacaucauccggggcuggaucuucggcaccacccuggacagcaagacccagagccugcugaucgugaauaacgccaccaacguggugaucaaggugugcgaguuccaguucugcaacgaccccuuccugggcguguaccacaagaacaacaagagcuggauggagagcgaguuccggguguacagcagcgccaacaacugcaccuucgaguacgugagccagcccuuccugauggaccuggagggcaagcagggcaacuucaagaaccugcgggaguucguguucaagaacaucgacggcuacuucaagaucuacagcaagcacaccccaaucaaccuggugcgggaucugccccagggcuucucagcccuggagccccugguggaccugcccaucggcaucaacaucacccgguuccagacccugcuggcccugcaccggagcuaccugaccccaggcgacagcagcagcggguggacagcaggcgcggcugcuuacuacgugggcuaccugcagccccggaccuuccugcugaaguacaacgagaacggcaccaucaccgacgccguggacugcgcccuggacccucugagcgagaccaagugcacccugaagagcuucaccguggagaagggcaucuaccagaccagcaacuuccgggugcagcccaccgagagcaucgugcgguuccccaacaucaccaaccugugccccuucggcgagguguucaacgccacccgguucgccagcguguacgccuggaaccggaagcggaucagcaacugcguggccgacuacagcgugcuguacaacagcgccagcuucagcaccuucaagugcuacggcgugagccccaccaagcugaacgaccugugcuucaccaacguguacgccgacagcuucgugauccguggcgacgaggugcggcagaucgcacccggccagacaggcaagaucgccgacuacaacuacaagcugcccgacgacuucaccggcugcgugaucgccuggaacagcaacaaccucgacagcaaggugggcggcaacuacaacuaccuguaccggcuguuccggaagagcaaccugaagcccuucgagcgggacaucagcaccgagaucuaccaagccggcuccaccccuugcaacggcguggagggcuucaacugcuacuucccucugcagagcuacggcuuccagcccaccuacggcgugggcuaccagcccuaccgggugguggugcugagcuucgagcugcugcacgccccagccaccguguguggccccaagaagagcaccaaccuggugaagaacaagugcgugaacuucaacuucaacggccuuaccggcaccggcgugcugaccgagagcaacaagaaauuccugcccuuucagcaguucggccgggacaucgacgacaccaccgacgcugugcgggauccccagacccuggagauccuggacaucaccccuugcagcuucggcggcgugagcgugaucaccccaggcaccaacaccagcaaccagguggccgugcuguaccagggcgugaacugcaccgaggugcccguggccauccacgccgaccagcugacacccaccuggcgggucuacagcaccggcagcaacguguuccagacccgggccgguugccugaucggcgccgagcacgugaacaacagcuacgagugcgacauccccaucggcgccggcaucugugccagcuaccagacccagaccaauucacaccggagggcaaggagcguggccagccagagcaucaucgccuacaccaugagccugggcgccgagaacagcguggccuacagcaacaacagcaucgccauccccaucaacuucaccaucagcgugaccaccgagauucugcccgugagcaugaccaagaccagcguggacugcaccauguacaucugcggcgacagcaccgagugcagcaaccugcugcugcaguacggcagcuucugcacccagcugaaccgggcccugaccggcaucgccguggagcaggacaagaacacccaggagguguucgcccaggugaagcagaucuacaagaccccucccaucaaggacuucggcggcuucaacuucagccagauccugcccgaccccagcaagcccagcaagcggagcuucaucgaggaccugcuguucaacaaggugacccuagccgacgccggcuucaucaagcaguacggcgacugccucggcgacauagccgcccgggaccugaucugcgcccagaaguucaacggccugaccgugcugccuccccugcugaccgacgagaugaucgcccaguacaccagcgcccuguuagccggaaccaucaccagcggcuggacuuucggcgcuggagccgcucugcagauccccuucgccaugcagauggccuaccgguucaacggcaucggcgugacccagaacgugcuguacgagaaccagaagcugaucgccaaccaguucaacagcgccaucggcaagauccaggacagccugagcagcaccgcuagcgcccugggcaagcugcaggacguggugaaccagaacgcccaggcccugaacacccuggugaagcagcugagcagcaacuucggcgccaucagcagcgugcugaacgacauccuggcccggcuggacccucccgaggccgaggugcagaucgaccggcugaucacuggccggcugcagagccugcagaccuacgugacccagcagcugauccgggccgccgagauucgggccagcgccaaccuggccgccaccaagaugagcgagugcgugcugggccagagcaagcggguggacuucugcggcaagggcuaccaccugaugagcuuuccccagagcgcaccccacggagugguguuccugcacgugaccuacgugcccgcccaggagaagaacuucaccaccgccccagccaucugccacgacggcaaggcccacuuuccccgggagggcguguucgugagcaacggcacccacugguucgugacccagcggaacuucuacgagccccagaucaucaccacccacaacaccuucgugagcggcaacugcgacguggugaucggcaucgugaacaacaccguguacgauccccugcagcccgagcuggacagcuucaaggaggagcuggacaaguacuucaagaaucacaccagccccgacguggaccugggcgacaucagcggcaucaacgccagcguggugaacauccagaaggagaucgaucggcugaacgagguggccaagaaccugaacgagagccugaucgaccugcaggagcugggcaaguacgagcaguacaucaaguggcccugguacaucuggcugggcuucaucgccggccugaucgccaucgugauggugaccaucaugcugugcugcaugaccagcugcugcagcugccugaagggcuguugcagcugcggcagcugcugcaaguucgacgaggacgacagcgagcccgugcugaagggcgugaagcugcacuacaccugaggacuaguuauaagacugacuagcccgaugggccucccaacgggcccuccuccccuccuugcaccgagauuaaucaaaggcucuuuucagagccaccaaaaaaaaaaaaaaaaaaaaaaaaaaaaaaaaaaaaaaaaaaaaaaaaaaaaaaaaaaaaaaaaaaaaaaaaaaaaaaaaaaaaaaaaaaaaaaaaaaaaa

SEQ ID NO: 24226 - RNA, 4035 nt, Artificial Sequence
  SARS-CoV-2/Wuhan/WIV05/2019__EPI_ISL_402128 spike protein mRNA gc (1-1273)(K986P_V987P_K986P_V987P_K417N_E484K_N501Y_D614G)
aggagaaagcuuaccauguucguguuccuggugcugcugccccuggugagcagccagugcgugaaccugaccacccggacccagcugccaccagccuacaccaacagcuucacccggggcgucuacuaccccgacaagguguuccggagcagcguccugcacagcacccaggaccuguuccugcccuucuucagcaacgugaccugguuccacgccauccacgugagcggcaccaacggcaccaagcgguucgacaaccccgugcugcccuucaacgacggcguguacuucgccagcaccgagaagagcaacaucauccggggcuggaucuucggcaccacccuggacagcaagacccagagccugcugaucgugaauaacgccaccaacguggugaucaaggugugcgaguuccaguucugcaacgaccccuuccugggcguguacuaccacaagaacaacaagagcuggauggagagcgaguuccggguguacagcagcgccaacaacugcaccuucgaguacgugagccagcccuuccugauggaccuggagggcaagcagggcaacuucaagaaccugcgggaguucguguucaagaacaucgacggcuacuucaagaucuacagcaagcacaccccaaucaaccuggugcgggaucugccccagggcuucucagcccuggagccccugguggaccugcccaucggcaucaacaucacccgguuccagacccugcuggcccugcaccggagcuaccugaccccaggcgacagcagcagcggguggacagcaggcgcggcugcuuacuacgugggcuaccugcagccccggaccuuccugcugaaguacaacgagaacggcaccaucaccgacgccguggacugcgcccuggacccucugagcgagaccaagugcacccugaagagcuucaccguggagaagggcaucuaccagaccagcaacuuccgggugcagcccaccgagagcaucgugcgguuccccaacaucaccaaccugugccccuucggcgagguguucaacgccacccgguucgccagcguguacgccuggaaccggaagcggaucagcaacugcguggccgacuacagcgugcuguacaacagcgccagcuucagcaccuucaagugcuacggcgugagccccaccaagcugaacgaccugugcuucaccaacguguacgccgacagcuucgugauccguggcgacgaggugcggcagaucgcacccggccagacaggcaacaucgccgacuacaacuacaagcugcccgacgacuucaccggcugcgugaucgccuggaacagcaacaaccucgacagcaaggugggcggcaacuacaacuaccuguaccggcuguuccggaagagcaaccugaagcccuucgagcgggacaucagcaccgagaucuaccaagccggcuccaccccuugcaacggcgugaagggcuucaacugcuacuucccucugcagagcuacggcuuccagcccaccuacggcgugggcuaccagcccuaccgggugguggugcugagcuucgagcugcugcacgccccagccaccguguguggccccaagaagagcaccaaccuggugaagaacaagugcgugaacuucaacuucaacggccuuaccggcaccggcgugcugaccgagagcaacaagaaauuccugcccuuucagcaguucggccgggacaucgccgacaccaccgacgcugugcgggauccccagacccuggagauccuggacaucaccccuugcagcuucggcggcgugagcgugaucaccccaggcaccaacaccagcaaccagguggccgugcuguaccagggcgugaacugcaccgaggugcccguggccauccacgccgaccagcugacacccaccuggcgggucuacagcaccggcagcaacguguuccagacccgggccgguugccugaucggcgccgagcacgugaacaacagcuacgagugcgacauccccaucggcgccggcaucugugccagcuaccagacccagaccaauucaccccggagggcaaggagcguggccagccagagcaucaucgccuacaccaugagccugggcgccgagaacagcguggccuacagcaacaacagcaucgccauccccaccaacuucaccaucagcgugaccaccgagauucugcccgugagcaugaccaagaccagcguggacugcaccauguacaucugcggcgacagcaccgagugcagcaaccugcugcugcaguacggcagcuucugcacccagcugaaccgggcccugaccggcaucgccguggagcaggacaagaacacccaggagguguucgcccaggugaagcagaucuacaagaccccucccaucaaggacuucggcggcuucaacuucagccagauccugcccgaccccagcaagcccagcaagcggagcuucaucgaggaccugcuguucaacaaggugacccuagccgacgccggcuucaucaagcaguacggcgacugccucggcgacauagccgcccgggaccugaucugcgcccagaaguucaacggccugaccgugcugccuccccugcugaccgacgagaugaucgcccaguacaccagcgcccuguuagccggaaccaucaccagcggcuggacuuucggcgcuggagccgcucugcagauccccuucgccaugcagauggccuaccgguucaacggcaucggcgugacccagaacgugcuguacgagaaccagaagcugaucgccaaccaguucaacagcgccaucggcaagauccaggacagccugagcagcaccgcuagcgcccugggcaagcugcaggacguggugaaccagaacgcccaggcccugaacacccuggugaagcagcugagcagcaacuucggcgccaucagcagcgugcugaacgacauccugagccggcuggacccucccgaggccgaggugcagaucgaccggcugaucacuggccggcugcagagccugcagaccuacgugacccagcagcugauccgggccgccgagauucgggccagcgccaaccuggccgccaccaagaugagcgagugcgugcugggccagagcaagcggguggacuucugcggcaagggcuaccaccugaugagcuuuccccagagcgcaccccacggagugguguuccugcacgugaccuacgugcccgcccaggagaagaacuucaccaccgccccagccaucugccacgacggcaaggcccacuuuccccgggagggcguguucgugagcaacggcacccacugguucgugacccagcggaacuucuacgagccccagaucaucaccaccgacaacaccuucgugagcggcaacugcgacguggugaucggcaucgugaacaacaccguguacgauccccugcagcccgagcuggacagcuucaaggaggagcuggacaaguacuucaagaaucacaccagccccgacguggaccugggcgacaucagcggcaucaacgccagcguggugaacauccagaaggagaucgaucggcugaacgagguggccaagaaccugaacgagagccugaucgaccugcaggagcugggcaaguacgagcaguacaucaaguggcccugguacaucuggcugggcuucaucgccggccugaucgccaucgugauggugaccaucaugcugugcugcaugaccagcugcugcagcugccugaagggcuguugcagcugcggcagcugcugcaaguucgacgaggacgacagcgagcccgugcugaagggcgugaagcugcacuacaccugaggacuaguuauaagacugacuagcccgaugggccucccaacgggcccuccuccccuccuugcaccgagauuaaucaaaggcucuuuucagagccaccaaaaaaaaaaaaaaaaaaaaaaaaaaaaaaaaaaaaaaaaaaaaaaaaaaaaaaaaaaaaaaaaaaaaaaaaaaaaaaaaaaaaaaaaaaaaaaaaaaaaa

SEQ ID NO: 24227 - RNA, 4026 nt, Artificial Sequence
  SARS-CoV-2/Wuhan/WIV05/2019__EPI_ISL_402128 spike protein mRNA gc (1-1273)(K986P_V987P_K986P_V987P_L18F_D80A_D215G_L242del_A243del_ L244del_R246I_K417N_E484K_N501Y_D614G_A701V)
aggagaaagcuuaccauguucguguuccuggugcugcugccccuggugagcagccagugcgugaacuucaccacccggacccagcugccaccagccuacaccaacagcuucacccggggcgucuacuaccccgacaagguguuccggagcagcguccugcacagcacccaggaccuguuccugcccuucuucagcaacgugaccugguuccacgccauccacgugagcggcaccaacggcaccaagcgguucgccaaccccgugcugcccuucaacgacggcguguacuucgccagcaccgagaagagcaacaucauccggggcuggaucuucggcaccacccuggacagcaagacccagagccugcugaucgugaauaacgccaccaacguggugaucaaggugugcgaguuccaguucugcaacgaccccuuccugggcguguacuaccacaagaacaacaagagcuggauggagagcgaguuccggguguacagcagcgccaacaacugcaccuucgaguacgugagccagcccuuccugauggaccuggagggcaagcagggcaacuucaagaaccugcgggaguucguguucaagaacaucgacggcuacuucaagaucuacagcaagcacaccccaaucaaccuggugcggggccugccccagggcuucucagcccuggagccccugguggaccugcccaucggcaucaacaucacccgguuccagacccugcacaucagcuaccugaccccaggcgacagcagcagcggguggacagcaggcgcggcugcuuacuacgugggcuaccugcagccccggaccuuccugcugaaguacaacgagaacggcaccaucaccgacgccguggacugcgcccuggacccucugagcgagaccaagugcacccugaagagcuucaccguggagaagggcaucuaccagaccagcaacuuccgggugcagcccaccgagagcaucgugcgguuccccaacaucaccaaccugugccccuucggcgagguguucaacgccacccgguucgccagcguguacgccuggaaccggaagcggaucagcaacugcguggccgacuacagcgugcuguacaacagcgccagcuucagcaccuucaagugcuacggcgugagccccaccaagcugaacgaccugugcuucaccaacguguacgccgacagcuucgugauccguggcgacgaggugcggcagaucgcacccggccagacaggcaacaucgccgacuacaacuacaagcugcccgacgacuucaccggcugcgugaucgccuggaacagcaacaaccucgacagcaaggugggcggcaacuacaacuaccuguaccggcuguuccggaagagcaaccugaagcccuucgagcgggacaucagcaccgagaucuaccaagccggcuccaccccuugcaacggcgugaagggcuucaacugcuacuucccucugcagagcuacggcuuccagcccaccuacggcgugggcuaccagcccuaccgggugguggugcugagcuucgagcugcugcacgccccagccaccguguguggccccaagaagagcaccaaccuggugaagaacaagugcgugaacuucaacuucaacggccuuaccggcaccggcgugcugaccgagagcaacaagaaauuccugcccuuucagcaguucggccgggacaucgccgacaccaccgacgcugugcgggauccccagacccuggagauccuggacaucaccccuugcagcuucggcggcgugagcgugaucaccccaggcaccaacaccagcaaccagguggccgugcuguaccagggcgugaacugcaccgaggugcccguggccauccacgccgaccagcugacacccaccuggcgggucuacagcaccggcagcaacguguuccagacccgggccgguugccugaucggcgccgagcacgugaacaacagcuacgagugcgacauccccaucggcgccggcaucugugccagcuaccagacccagaccaauucaccccggagggcaaggagcguggccagccagagcaucaucgccuacaccaugagccugggcguggagaacagcguggccuacagcaacaacagcaucgccauccccaccaacuucaccaucagcgugaccaccgagauucugcccgugagcaugaccaagaccagcguggacugcaccauguacaucugcggcgacagcaccgagugcagcaaccugcugcugcaguacggcagcuucugcacccagcugaaccgggcccugaccggcaucgccguggagcaggacaagaacacccaggagguguucgcccaggugaagcagaucuacaagaccccucccaucaaggacuucggcggcuucaacuucagccagauccugcccgaccccagcaagcccagcaagcggagcuucaucgaggaccugcuguucaacaaggugacccuagccgacgccggcuucaucaagcaguacggcgacugccucggcgacauagccgcccgggaccugaucugcgcccagaaguucaacggccugaccgugcugccuccccugcugaccgacgagaugaucgcccaguacaccagcgcccuguuagccggaaccaucaccagcggcuggacuuucggcgcuggagccgcucugcagauccccuucgccaugcagauggccuaccgguucaacggcaucggcgugacccagaacgugcuguacgagaaccagaagcugaucgccaaccaguucaacagcgccaucggcaagauccaggacagccugagcagcaccgcuagcgcccugggcaagcugcaggacguggugaaccagaacgcccaggcccugaacacccuggugaagcagcugagcagcaacuucggcgccaucagcagcgugcugaacgacauccugagccggcuggacccucccgaggccgaggugcagaucgaccggcugaucacuggccggcugcagagccugcagaccuacgugacccagcagcugauccgggccgccgagauucgggccagcgccaaccuggccgccaccaagaugagcgagugcgugcugggccagagcaagcggguggacuucugcggcaagggcuaccaccugaugagcuuuccccagagcgcaccccacggagugguguuccugcacgugaccuacgugcccgcccaggagaagaacuucaccaccgccccagccaucugccacgacggcaaggcccacuuuccccgggagggcguguucgugagcaacggcacccacugguucgugacccagcggaacuucuacgagccccagaucaucaccaccgacaacaccuucgugagcggcaacugcgacguggugaucggcaucgugaacaacaccguguacgauccccugcagcccgagcuggacagcuucaaggaggagcuggacaaguacuucaagaaucacaccagccccgacguggaccugggcgacaucagcggcaucaacgccagcguggugaacauccagaaggagaucgaucggcugaacgagguggccaagaaccugaacgagagccugaucgaccugcaggagcugggcaaguacgagcaguacaucaaguggcccugguacaucuggcugggcuucaucgccggccugaucgccaucgugauggugaccaucaugcugugcugcaugaccagcugcugcagcugccugaagggcuguugcagcugcggcagcugcugcaaguucgacgaggacgacagcgagcccgugcugaagggcgugaagcugcacuacaccugaggacuaguuauaagacugacuagcccgaugggccucccaacgggcccuccuccccuccuugcaccgagauuaaucaaaggcucuuuucagagccaccaaaaaaaaaaaaaaaaaaaaaaaaaaaaaaaaaaaaaaaaaaaaaaaaaaaaaaaaaaaaaaaaaaaaaaaaaaaaaaaaaaaaaaaaaaaaaaaaaaaaa

SEQ ID NO: 24228 - RNA, 4035 nt, Artificial Sequence
  SARS-CoV-2/Wuhan/WIV05/2019__EPI_ISL_402128 spike protein mRNA gc (1-1273)(K986P_V987P_K986P_V987P_E484K_D614G)
aggagaaagcuuaccauguucguguuccuggugcugcugccccuggugagcagccagugcgugaaccugaccacccggacccagcugccaccagccuacaccaacagcuucacccggggcgucuacuaccccgacaagguguuccggagcagcguccugcacagcacccaggaccuguuccugcccuucuucagcaacgugaccugguuccacgccauccacgugagcggcaccaacggcaccaagcgguucgacaaccccgugcugcccuucaacgacggcguguacuucgccagcaccgagaagagcaacaucauccggggcuggaucuucggcaccacccuggacagcaagacccagagccugcugaucgugaauaacgccaccaacguggugaucaaggugugcgaguuccaguucugcaacgaccccuuccugggcguguacuaccacaagaacaacaagagcuggauggagagcgaguuccggguguacagcagcgccaacaacugcaccuucgaguacgugagccagcccuuccugauggaccuggagggcaagcagggcaacuucaagaaccugcgggaguucguguucaagaacaucgacggcuacuucaagaucuacagcaagcacaccccaaucaaccuggugcgggaucugccccagggcuucucagcccuggagccccugguggaccugcccaucggcaucaacaucacccgguuccagacccugcuggcccugcaccggagcuaccugaccccaggcgacagcagcagcggguggacagcaggcgcggcugcuuacuacgugggcuaccugcagccccggaccuuccugcugaaguacaacgagaacggcaccaucaccgacgccguggacugcgcccuggacccucugagcgagaccaagugcacccugaagagcuucaccguggagaagggcaucuaccagaccagcaacuuccgggugcagcccaccgagagcaucgugcgguuccccaacaucaccaaccugugccccuucggcgagguguucaacgccacccgguucgccagcguguacgccuggaaccggaagcggaucagcaacugcguggccgacuacagcgugcuguacaacagcgccagcuucagcaccuucaagugcuacggcgugagccccaccaagcugaacgaccugugcuucaccaacguguacgccgacagcuucgugauccguggcgacgaggugcggcagaucgcacccggccagacaggcaagaucgccgacuacaacuacaagcugcccgacgacuucaccggcugcgugaucgccuggaacagcaacaaccucgacagcaaggugggcggcaacuacaacuaccuguaccggcuguuccggaagagcaaccugaagcccuucgagcgggacaucagcaccgagaucuaccaagccggcuccaccccuugcaacggcgugaagggcuucaacugcuacuucccucugcagagcuacggcuuccagcccaccaacggcgugggcuaccagcccuaccgggugguggugcugagcuucgagcugcugcacgccccagccaccguguguggccccaagaagagcaccaaccuggugaagaacaagugcgugaacuucaacuucaacggccuuaccggcaccggcgugcugaccgagagcaacaagaaauuccugcccuuucagcaguucggccgggacaucgccgacaccaccgacgcugugcgggauccccagacccuggagauccuggacaucaccccuugcagcuucggcggcgugagcgugaucaccccaggcaccaacaccagcaaccagguggccgugcuguaccagggcgugaacugcaccgaggugcccguggccauccacgccgaccagcugacacccaccuggcgggucuacagcaccggcagcaacguguuccagacccgggccgguugccugaucggcgccgagcacgugaacaacagcuacgagugcgacauccccaucggcgccggcaucugugccagcuaccagacccagaccaauucaccccggagggcaaggagcguggccagccagagcaucaucgccuacaccaugagccugggcgccgagaacagcguggccuacagcaacaacagcaucgccauccccaccaacuucaccaucagcgugaccaccgagauucugcccgugagcaugaccaagaccagcguggacugcaccauguacaucugcggcgacagcaccgagugcagcaaccugcugcugcaguacggcagcuucugcacccagcugaaccgggcccugaccggcaucgccguggagcaggacaagaacacccaggagguguucgcccaggugaagcagaucuacaagaccccucccaucaaggacuucggcggcuucaacuucagccagauccugcccgaccccagcaagcccagcaagcggagcuucaucgaggaccugcuguucaacaaggugacccuagccgacgccggcuucaucaagcaguacggcgacugccucggcgacauagccgcccgggaccugaucugcgcccagaaguucaacggccugaccgugcugccuccccugcugaccgacgagaugaucgcccaguacaccagcgcccuguuagccggaaccaucaccagcggcuggacuuucggcgcuggagccgcucugcagauccccuucgccaugcagauggccuaccgguucaacggcaucggcgugacccagaacgugcuguacgagaaccagaagcugaucgccaaccaguucaacagcgccaucggcaagauccaggacagccugagcagcaccgcuagcgcccugggcaagcugcaggacguggugaaccagaacgcccaggcccugaacacccuggugaagcagcugagcagcaacuucggcgccaucagcagcgugcugaacgacauccugagccggcuggacccucccgaggccgaggugcagaucgaccggcugaucacuggccggcugcagagccugcagaccuacgugacccagcagcugauccgggccgccgagauucgggccagcgccaaccuggccgccaccaagaugagcgagugcgugcugggccagagcaagcggguggacuucugcggcaagggcuaccaccugaugagcuuuccccagagcgcaccccacggagugguguuccugcacgugaccuacgugcccgcccaggagaagaacuucaccaccgccccagccaucugccacgacggcaaggcccacuuuccccgggagggcguguucgugagcaacggcacccacugguucgugacccagcggaacuucuacgagccccagaucaucaccaccgacaacaccuucgugagcggcaacugcgacguggugaucggcaucgugaacaacaccguguacgauccccugcagcccgagcuggacagcuucaaggaggagcuggacaaguacuucaagaaucacaccagccccgacguggaccugggcgacaucagcggcaucaacgccagcguggugaacauccagaaggagaucgaucggcugaacgagguggccaagaaccugaacgagagccugaucgaccugcaggagcugggcaaguacgagcaguacaucaaguggcccugguacaucuggcugggcuucaucgccggccugaucgccaucgugauggugaccaucaugcugugcugcaugaccagcugcugcagcugccugaagggcuguugcagcugcggcagcugcugcaaguucgacgaggacgacagcgagcccgugcugaagggcgugaagcugcacuacaccugaggacuaguuauaagacugacuagcccgaugggccucccaacgggcccuccuccccuccuugcaccgagauuaaucaaaggcucuuuucagagccaccaaaaaaaaaaaaaaaaaaaaaaaaaaaaaaaaaaaaaaaaaaaaaaaaaaaaaaaaaaaaaaaaaaaaaaaaaaaaaaaaaaaaaaaaaaaaaaaaaaaaa

SEQ ID NO: 24229 - RNA, 4035 nt, Artificial Sequence
  SARS-CoV-2/Wuhan/WIV05/2019__EPI_ISL_402128 spike protein mRNA gc (1-1273)(K986P_V987P_K986P_V987P_L18F_T20N_P26S_D138Y_R190S_K417T _E484K_N501Y_D614G_H655Y_T1027I)
aggagaaagcuuaccauguucguguuccuggugcugcugccccuggugagcagccagugcgugaacuucaccaaccggacccagcugccaagcgccuacaccaacagcuucacccggggcgucuacuaccccgacaagguguuccggagcagcguccugcacagcacccaggaccuguuccugcccuucuucagcaacgugaccugguuccacgccauccacgugagcggcaccaacggcaccaagcgguucgacaaccccgugcugcccuucaacgacggcguguacuucgccagcaccgagaagagcaacaucauccggggcuggaucuucggcaccacccuggacagcaagacccagagccugcugaucgugaauaacgccaccaacguggugaucaaggugugcgaguuccaguucugcaacuaccccuuccugggcguguacuaccacaagaacaacaagagcuggauggagagcgaguuccggguguacagcagcgccaacaacugcaccuucgaguacgugagccagcccuuccugauggaccuggagggcaagcagggcaacuucaagaaccugagcgaguucguguucaagaacaucgacggcuacuucaagaucuacagcaagcacaccccaaucaaccuggugcgggaucugccccagggcuucucagcccuggagccccugguggaccugcccaucggcaucaacaucacccgguuccagacccugcuggcccugcaccggagcuaccugaccccaggcgacagcagcagcggguggacagcaggcgcggcugcuuacuacgugggcuaccugcagccccggaccuuccugcugaaguacaacgagaacggcaccaucaccgacgccguggacugcgcccuggacccucugagcgagaccaagugcacccugaagagcuucaccguggagaagggcaucuaccagaccagcaacuuccgggugcagcccaccgagagcaucgugcgguuccccaacaucaccaaccugugccccuucggcgagguguucaacgccacccgguucgccagcguguacgccuggaaccggaagcggaucagcaacugcguggccgacuacagcgugcuguacaacagcgccagcuucagcaccuucaagugcuacggcgugagccccaccaagcugaacgaccugugcuucaccaacguguacgccgacagcuucgugauccguggcgacgaggugcggcagaucgcacccggccagacaggcaccaucgccgacuacaacuacaagcugcccgacgacuucaccggcugcgugaucgccuggaacagcaacaaccucgacagcaaggugggcggcaacuacaacuaccuguaccggcuguuccggaagagcaaccugaagcccuucgagcgggacaucagcaccgagaucuaccaagccggcuccaccccuugcaacggcgugaagggcuucaacugcuacuucccucugcagagcuacggcuuccagcccaccuacggcgugggcuaccagcccuaccgggugguggugcugagcuucgagcugcugcacgccccagccaccguguguggccccaagaagagcaccaaccuggugaagaacaagugcgugaacuucaacuucaacggccuuaccggcaccggcgugcugaccgagagcaacaagaaauuccugcccuuucagcaguucggccgggacaucgccgacaccaccgacgcugugcgggauccccagacccuggagauccuggacaucaccccuugcagcuucggcggcgugagcgugaucaccccaggcaccaacaccagcaaccagguggccgugcuguaccagggcgugaacugcaccgaggugcccguggccauccacgccgaccagcugacacccaccuggcgggucuacagcaccggcagcaacguguuccagacccgggccgguugccugaucggcgccgaguacgugaacaacagcuacgagugcgacauccccaucggcgccggcaucugugccagcuaccagacccagaccaauucaccccggagggcaaggagcguggccagccagagcaucaucgccuacaccaugagccugggcgccgagaacagcguggccuacagcaacaacagcaucgccauccccaccaacuucaccaucagcgugaccaccgagauucugcccgugagcaugaccaagaccagcguggacugcaccauguacaucugcggcgacagcaccgagugcagcaaccugcugcugcaguacggcagcuucugcacccagcugaaccgggcccugaccggcaucgccguggagcaggacaagaacacccaggagguguucgcccaggugaagcagaucuacaagaccccucccaucaaggacuucggcggcuucaacuucagccagauccugcccgaccccagcaagcccagcaagcggagcuucaucgaggaccugcuguucaacaaggugacccuagccgacgccggcuucaucaagcaguacggcgacugccucggcgacauagccgcccgggaccugaucugcgcccagaaguucaacggccugaccgugcugccuccccugcugaccgacgagaugaucgcccaguacaccagcgcccuguuagccggaaccaucaccagcggcuggacuuucggcgcuggagccgcucugcagauccccuucgccaugcagauggccuaccgguucaacggcaucggcgugacccagaacgugcuguacgagaaccagaagcugaucgccaaccaguucaacagcgccaucggcaagauccaggacagccugagcagcaccgcuagcgcccugggcaagcugcaggacguggugaaccagaacgcccaggcccugaacacccuggugaagcagcugagcagcaacuucggcgccaucagcagcgugcugaacgacauccugagccggcuggacccucccgaggccgaggugcagaucgaccggcugaucacuggccggcugcagagccugcagaccuacgugacccagcagcugauccgggccgccgagauucgggccagcgccaaccuggccgccaucaagaugagcgagugcgugcugggccagagcaagcggguggacuucugcggcaagggcuaccaccugaugagcuuuccccagagcgcaccccacggagugguguuccugcacgugaccuacgugcccgcccaggagaagaacuucaccaccgccccagccaucugccacgacggcaaggcccacuuuccccgggagggcguguucgugagcaacggcacccacugguucgugacccagcggaacuucuacgagccccagaucaucaccaccgacaacaccuucgugagcggcaacugcgacguggugaucggcaucgugaacaacaccguguacgauccccugcagcccgagcuggacagcuucaaggaggagcuggacaaguacuucaagaaucacaccagccccgacguggaccugggcgacaucagcggcaucaacgccagcguggugaacauccagaaggagaucgaucggcugaacgagguggccaagaaccugaacgagagccugaucgaccugcaggagcugggcaaguacgagcaguacaucaaguggcccugguacaucuggcugggcuucaucgccggccugaucgccaucgugauggugaccaucaugcugugcugcaugaccagcugcugcagcugccugaagggcuguugcagcugcggcagcugcugcaaguucgacgaggacgacagcgagcccgugcugaagggcgugaagcugcacuacaccugaggacuaguuauaagacugacuagcccgaugggccucccaacgggcccuccuccccuccuugcaccgagauuaaucaaaggcucuuuucagagccaccaaaaaaaaaaaaaaaaaaaaaaaaaaaaaaaaaaaaaaaaaaaaaaaaaaaaaaaaaaaaaaaaaaaaaaaaaaaaaaaaaaaaaaaaaaaaaaaaaaaaa

SEQ ID NO: 24230 - RNA, 4035 nt, Artificial Sequence
  SARS-CoV-2/Wuhan/WIV05/2019__EPI_ISL_402128 spike protein mRNA gc (1-1273)(K986P_V987P_K986P_V987P_S13I_W152C_L452R_D614G)
aggagaaagcuuaccauguucguguuccuggugcugcugccccuggugagcauccagugcgugaaccugaccacccggacccagcugccaccagccuacaccaacagcuucacccggggcgucuacuaccccgacaagguguuccggagcagcguccugcacagcacccaggaccuguuccugcccuucuucagcaacgugaccugguuccacgccauccacgugagcggcaccaacggcaccaagcgguucgacaaccccgugcugcccuucaacgacggcguguacuucgccagcaccgagaagagcaacaucauccggggcuggaucuucggcaccacccuggacagcaagacccagagccugcugaucgugaauaacgccaccaacguggugaucaaggugugcgaguuccaguucugcaacgaccccuuccugggcguguacuaccacaagaacaacaagagcugcauggagagcgaguuccggguguacagcagcgccaacaacugcaccuucgaguacgugagccagcccuuccugauggaccuggagggcaagcagggcaacuucaagaaccugcgggaguucguguucaagaacaucgacggcuacuucaagaucuacagcaagcacaccccaaucaaccuggugcgggaucugccccagggcuucucagcccuggagccccugguggaccugcccaucggcaucaacaucacccgguuccagacccugcuggcccugcaccggagcuaccugaccccaggcgacagcagcagcggguggacagcaggcgcggcugcuuacuacgugggcuaccugcagccccggaccuuccugcugaaguacaacgagaacggcaccaucaccgacgccguggacugcgcccuggacccucugagcgagaccaagugcacccugaagagcuucaccguggagaagggcaucuaccagaccagcaacuuccgggugcagcccaccgagagcaucgugcgguuccccaacaucaccaaccugugccccuucggcgagguguucaacgccacccgguucgccagcguguacgccuggaaccggaagcggaucagcaacugcguggccgacuacagcgugcuguacaacagcgccagcuucagcaccuucaagugcuacggcgugagccccaccaagcugaacgaccugugcuucaccaacguguacgccgacagcuucgugauccguggcgacgaggugcggcagaucgcacccggccagacaggcaagaucgccgacuacaacuacaagcugcccgacgacuucaccggcugcgugaucgccuggaacagcaacaaccucgacagcaaggugggcggcaacuacaacuaccgcuaccggcuguuccggaagagcaaccugaagcccuucgagcgggacaucagcaccgagaucuaccaagccggcuccaccccuugcaacggcguggagggcuucaacugcuacuucccucugcagagcuacggcuuccagcccaccaacggcgugggcuaccagcccuaccgggugguggugcugagcuucgagcugcugcacgccccagccaccguguguggccccaagaagagcaccaaccuggugaagaacaagugcgugaacuucaacuucaacggccuuaccggcaccggcgugcugaccgagagcaacaagaaauuccugcccuuucagcaguucggccgggacaucgccgacaccaccgacgcugugcgggauccccagacccuggagauccuggacaucaccccuugcagcuucggcggcgugagcgugaucaccccaggcaccaacaccagcaaccagguggccgugcuguaccagggcgugaacugcaccgaggugcccguggccauccacgccgaccagcugacacccaccuggcgggucuacagcaccggcagcaacguguuccagacccgggccgguugccugaucggcgccgagcacgugaacaacagcuacgagugcgacauccccaucggcgccggcaucugugccagcuaccagacccagaccaauucaccccggagggcaaggagcguggccagccagagcaucaucgccuacaccaugagccugggcgccgagaacagcguggccuacagcaacaacagcaucgccauccccaccaacuucaccaucagcgugaccaccgagauucugcccgugagcaugaccaagaccagcguggacugcaccauguacaucugcggcgacagcaccgagugcagcaaccugcugcugcaguacggcagcuucugcacccagcugaaccgggcccugaccggcaucgccguggagcaggacaagaacacccaggagguguucgcccaggugaagcagaucuacaagaccccucccaucaaggacuucggcggcuucaacuucagccagauccugcccgaccccagcaagcccagcaagcggagcuucaucgaggaccugcuguucaacaaggugacccuagccgacgccggcuucaucaagcaguacggcgacugccucggcgacauagccgcccgggaccugaucugcgcccagaaguucaacggccugaccgugcugccuccccugcugaccgacgagaugaucgcccaguacaccagcgcccuguuagccggaaccaucaccagcggcuggacuuucggcgcuggagccgcucugcagauccccuucgccaugcagauggccuaccgguucaacggcaucggcgugacccagaacgugcuguacgagaaccagaagcugaucgccaaccaguucaacagcgccaucggcaagauccaggacagccugagcagcaccgcuagcgcccugggcaagcugcaggacguggugaaccagaacgcccaggcccugaacacccuggugaagcagcugagcagcaacuucggcgccaucagcagcgugcugaacgacauccugagccggcuggacccucccgaggccgaggugcagaucgaccggcugaucacuggccggcugcagagccugcagaccuacgugacccagcagcugauccgggccgccgagauucgggccagcgccaaccuggccgccaccaagaugagcgagugcgugcugggccagagcaagcggguggacuucugcggcaagggcuaccaccugaugagcuuuccccagagcgcaccccacggagugguguuccugcacgugaccuacgugcccgcccaggagaagaacuucaccaccgccccagccaucugccacgacggcaaggcccacuuuccccgggagggcguguucgugagcaacggcacccacugguucgugacccagcggaacuucuacgagccccagaucaucaccaccgacaacaccuucgugagcggcaacugcgacguggugaucggcaucgugaacaacaccguguacgauccccugcagcccgagcuggacagcuucaaggaggagcuggacaaguacuucaagaaucacaccagccccgacguggaccugggcgacaucagcggcaucaacgccagcguggugaacauccagaaggagaucgaucggcugaacgagguggccaagaaccugaacgagagccugaucgaccugcaggagcugggcaaguacgagcaguacaucaaguggcccugguacaucuggcugggcuucaucgccggccugaucgccaucgugauggugaccaucaugcugugcugcaugaccagcugcugcagcugccugaagggcuguugcagcugcggcagcugcugcaaguucgacgaggacgacagcgagcccgugcugaagggcgugaagcugcacuacaccugaggacuaguuauaagacugacuagcccgaugggccucccaacgggcccuccuccccuccuugcaccgagauuaaucaaaggcucuuuucagagccaccaaaaaaaaaaaaaaaaaaaaaaaaaaaaaaaaaaaaaaaaaaaaaaaaaaaaaaaaaaaaaaaaaaaaaaaaaaaaaaaaaaaaaaaaaaaaaaaaaaaaa

SEQ ID NO: 24231 - RNA, 4035 nt, Artificial Sequence
  SARS-CoV-2/Wuhan/WIV05/2019__EPI_ISL_402128 spike protein mRNA gc (1-1273)(K986P_V987P)
aggagaaagcuuaccauguucguguuccuggugcugcugccccuggugagcagccagugcgugaaccugaccacccggacccagcugcccccugccuacaccaacagcuucacccggggcguguacuaccccgacaagguguuccggagcagcgugcugcacagcacccaggaccuguuccugcccuucuucagcaacgugaccugguuccacgccauccacgugagcggcaccaacggcaccaagcgguucgacaacccagugcugcccuucaacgacggcguguacuucgccagcaccgagaagucaaacaucauccggggcuggaucuucggcaccacccuggacagcaagacacagagccugcugaucgugaacaacgccaccaacguggugaucaaggugugcgaguuucaguucugcaacgaccccuuccugggcguguacuaccacaagaacaacaagagcuggauggagagcgaguuccgggucuacagcagcgcuaacaauugcaccuucgaguacgugagccagcccuuccugauggaccucgagggcaagcagggcaacuucaagaaccugcgggaguucguguucaagaacaucgauggcuacuucaagaucuacagcaagcacacccccaucaaccuggugcgggaccugccccagggauucagcgcccuggagccucugguggaccugcccaucggcaucaacaucaccagguuccagacccugcuggcccugcaccggagcuaccugacccccggcgacagcagcagcggcuggaccgccggcgccgccgcauacuacgugggcuaccugcagccacggaccuuccugcugaaguacaacgagaacggcaccaucaccgacgccguggacugcgcccuggacccccugagcgagaccaagugcacccuaaagagcuucaccguggagaagggcaucuaccagaccagcaacuuccgggugcagcccacugagagcaucgugcgguuccccaacauuaccaaccugugucccuucggcgagguguucaacgccacccgguucgccagcguguacgccuggaaccggaagcggaucagcaacugcguggccgacuacagcgugcuguacaacagcgccagcuucagcaccuucaagugcuacggcgugagcccuaccaagcugaacgaccugugcuucaccaacguguacgcugacagcuucgugauccggggcgacgaggugcggcagaucgcccccggccagaccggcaagaucgccgacuacaacuacaagcugcccgacgacuucaccggcugcgugaucgccuggaacagcaacaaccuggacagcaaggugggcggcaacuacaacuaccuguaccggcuguuccguaagagcaaccugaagccauucgagcgggacaucagcaccgagaucuaccaggccggcagcacccccugcaacgguguggagggcuuuaacugcuacuucccccugcagagcuacggcuuccagcccaccaacggcgugggcuaccagcccuaccgggugguggugcugagcuucgagcugcugcacgcccccgccaccgugugcggcccuaaaaagagcaccaaccuggugaagaacaagugcgugaacuucaauuucaacggccugaccggcaccggcgugcugaccgagagcaacaagaaguuccugcccuuccagcaguucggccgggauaucgccgacaccaccgacgcagugcgggacccccagacccuggagauccuggacaucaccccaugcagcuucggcggcgugagcgucaucacccccggcacaaacaccagcaaccagguggccgugcuguaccaggacgugaacugcaccgaggugcccguggccauccacgccgaccagcugacccccaccuggcggguguacagcaccggaagcaacguguuccagacccgggccggcugccugaucggcgccgagcacgugaacaacuccuacgagugcgacauccccaucggcgcuggcaucugcgccagcuaccagacccagaccaacagcccccggcgggcccggagcguggccagccagagcaucaucgccuacaccaugagcuuaggcgccgagaacagcguggccuacagcaacaacagcaucgcgaucccuaccaacuucaccaucagcgugaccaccgagauacugcccgugagcaugaccaagaccagcguggacuguaccauguacaucugcggcgacagcaccgagugcagcaaccugcugcugcaguacggcagcuucugcacccagcugaaccgggcccugaccggcaucgccguggagcaggacaagaacacccaagagguguucgcccaggugaagcagaucuacaagacucccccaaucaaggacuucggcggcuucaacuucagccagauccugcccgaccccagcaagcccagcaagcggagcuucaucgaggaccugcuguucaacaaggugacccuggccgacgccggcuucaucaagcaguacggcgauugccugggcgacaucgccgcucgggaccugaucugcgcccagaaguucaacgggcugaccgugcugcccccucugcugaccgacgagaugaucgcccaguacaccagcgcccugcuugccggcaccaucaccagcggcuggaccuucggcgccggcgcagcccugcagauccccuucgccaugcagauggccuaccgguucaacggcaucggcgugacccagaacgugcuguacgagaaccagaagcugaucgccaaccaguucaacagcgccaucggcaagauccaggacagccugagcagcaccgccagcgcccugggcaagcugcaggacguggugaaccagaacgcucaggcccugaacacccuggugaagcagcugagcagcaacuucggcgccaucagcucagugcugaaugacauccugagcaggcuggaucccccagaggccgaggugcagaucgaccggcugaucaccggccggcugcagagccugcagaccuacgugacccagcagcugauccgggccgccgagauccgggccagcgccaaccuggcagccaccaagaugagcgagugcgugcugggccagagcaagcggguggacuuuugcggcaagggcuaccaccugaugagcuucccccagagcgcuccccacggcgugguguuccuccacgugacauacguccccgcccaggagaagaacuucaccaccgcccccgccauuugccacgacggcaaggcccacuucccccgggagggcguguucgugagcaacggaacccacugguucgugacccagcggaacuucuacgagccucagaucaucaccaccgacaacaccuucgugagcggcaacugcgacguggugaucggcaucgugaacaacaccguguacgacccccugcagcccgagcuggacagcuucaaggaggagcuggacaaguacuucaagaaccacaccagcccagacguggaccugggcgacaucagcggcaucaacgccagcguggugaacauccagaaggagaucgaccggcugaacgagguggccaagaaccugaacgagagccugaucgaccugcaggagcugggcaaguacgagcaguacaucaaguggcccugguacaucuggcugggcuucaucgccggccugaucgccaucgugauggugaccaucaugcugugcugcaugaccagcugcuguagcugccugaagggcugcugcagcugcggcagcugcugcaaguucgacgaggacgacagcgagcccgugcugaagggcgugaagcugcacuacaccugaggacuaguuauaagacugacuagcccgaugggccucccaacgggcccuccuccccuccuugcaccgagauuaaucaaaggcucuuuucagagccaccaaaaaaaaaaaaaaaaaaaaaaaaaaaaaaaaaaaaaaaaaaaaaaaaaaaaaaaaaaaaaaaaaaaaaaaaaaaaaaaaaaaaaaaaaaaaaaaaaaaaa

SEQ ID NO: 24232 - RNA, 4035 nt, Artificial Sequence
  SARS-CoV-2/Wuhan/WIV05/2019__EPI_ISL_402128 spike protein mRNA gc (1-1273)(K986P_V987P_ D614G)
aggagaaagcuuaccauguucguguuccuggugcugcugccccuggugagcagccagugcgugaaccugaccacccggacccagcugcccccugccuacaccaacagcuucacccggggcguguacuaccccgacaagguguuccggagcagcgugcugcacagcacccaggaccuguuccugcccuucuucagcaacgugaccugguuccacgccauccacgugagcggcaccaacggcaccaagcgguucgacaacccagugcugcccuucaacgacggcguguacuucgccagcaccgagaagucaaacaucauccggggcuggaucuucggcaccacccuggacagcaagacacagagccugcugaucgugaacaacgccaccaacguggugaucaaggugugcgaguuucaguucugcaacgaccccuuccugggcguguacuaccacaagaacaacaagagcuggauggagagcgaguuccgggucuacagcagcgcuaacaauugcaccuucgaguacgugagccagcccuuccugauggaccucgagggcaagcagggcaacuucaagaaccugcgggaguucguguucaagaacaucgauggcuacuucaagaucuacagcaagcacacccccaucaaccuggugcgggaccugccccagggauucagcgcccuggagccucugguggaccugcccaucggcaucaacaucaccagguuccagacccugcuggcccugcaccggagcuaccugacccccggcgacagcagcagcggcuggaccgccggcgccgccgcauacuacgugggcuaccugcagccacggaccuuccugcugaaguacaacgagaacggcaccaucaccgacgccguggacugcgcccuggacccccugagcgagaccaagugcacccuaaagagcuucaccguggagaagggcaucuaccagaccagcaacuuccgggugcagcccacugagagcaucgugcgguuccccaacauuaccaaccugugucccuucggcgagguguucaacgccacccgguucgccagcguguacgccuggaaccggaagcggaucagcaacugcguggccgacuacagcgugcuguacaacagcgccagcuucagcaccuucaagugcuacggcgugagcccuaccaagcugaacgaccugugcuucaccaacguguacgcugacagcuucgugauccggggcgacgaggugcggcagaucgcccccggccagaccggcaagaucgccgacuacaacuacaagcugcccgacgacuucaccggcugcgugaucgccuggaacagcaacaaccuggacagcaaggugggcggcaacuacaacuaccuguaccggcuguuccguaagagcaaccugaagccauucgagcgggacaucagcaccgagaucuaccaggccggcagcacccccugcaacgguguggagggcuuuaacugcuacuucccccugcagagcuacggcuuccagcccaccaacggcgugggcuaccagcccuaccgggugguggugcugagcuucgagcugcugcacgcccccgccaccgugugcggcccuaaaaagagcaccaaccuggugaagaacaagugcgugaacuucaauuucaacggccugaccggcaccggcgugcugaccgagagcaacaagaaguuccugcccuuccagcaguucggccgggauaucgccgacaccaccgacgcagugcgggacccccagacccuggagauccuggacaucaccccaugcagcuucggcggcgugagcgucaucacccccggcacaaacaccagcaaccagguggccgugcuguaccagggagugaacugcaccgaggugcccguggccauccacgccgaccagcugacccccaccuggcggguguacagcaccggcagcaacguguuccagacccgggccggcugccugaucggcgccgagcacgugaacaacuccuacgagugcgacauccccaucggcgcuggcaucugcgccagcuaccagacccagaccaacagcccccggcgggcccggagcguggccagccagagcaucaucgccuacaccaugagcuuaggcgccgagaacagcguggccuacagcaacaacagcaucgcgaucccuaccaacuucaccaucagcgugaccaccgagauacugcccgugagcaugaccaagaccagcguggacuguaccauguacaucugcggcgacagcaccgagugcagcaaccugcugcugcaguacggcagcuucugcacccagcugaaccgggcccugaccggcaucgccguggagcaggacaagaacacccaagagguguucgcccaggugaagcagaucuacaagacucccccaaucaaggacuucggcggcuucaacuucagccagauccugcccgaccccagcaagcccagcaagcggagcuucaucgaggaccugcuguucaacaaggugacccuggccgacgccggcuucaucaagcaguacggcgacugccugggggauaucgccgcucgggaccugaucugcgcccagaaguucaacggccugaccgugcugcccccucugcugaccgacgagaugaucgcccaguacaccagcgcccugcuugccggcaccaucaccagcggcuggaccuucggcgccggcgcagcccugcagauccccuucgccaugcagauggccuaccgguucaacggcaucggcgugacccagaacgugcuguacgagaaccagaagcugaucgccaaccaguucaacagcgccaucggcaagauccaggacagccugagcagcaccgccagcgcccugggcaagcugcaggacguggugaaccagaacgcucaggcccugaacacccuggugaagcagcugagcagcaacuucggcgccaucagcucagugcugaaugacauccugagcaggcuggaucccccagaggccgaggugcagaucgaccggcugaucaccggccggcugcagagccugcagaccuacgugacccagcagcugauccgggccgccgagauccgggccagcgccaaccuggcagccaccaagaugagcgagugcgugcugggccagagcaagcggguggacuuuugcggcaagggcuaccaccugaugagcuucccccagagcgcuccccacggcgugguguuccuccacgugacauacguccccgcccaggagaagaacuucaccaccgcccccgccauuugccacgacggcaaggcccacuucccccgggagggaguguucgugagcaacggcacccacugguucgugacccagcggaacuucuacgagccucagaucaucaccaccgacaacaccuucgugagcggcaacugcgacguggugaucggcaucgugaacaacaccguguacgacccccugcagcccgagcuggacagcuucaaggaggagcuggacaaguacuucaagaaccacaccagcccagacguggaccugggcgacaucagcggcaucaacgccagcguggugaacauccagaaggagaucgaccggcugaacgagguggccaagaaccugaacgagagccugaucgaccugcaggagcugggcaaguacgagcaguacaucaaguggcccugguacaucuggcugggcuucaucgccggccugaucgccaucgugauggugaccaucaugcugugcugcaugaccagcugcuguagcugccugaagggcugcugcagcugcggcagcugcugcaaguucgacgaggacgacagcgagcccgugcugaagggcgugaagcugcacuacaccugaggacuaguuauaagacugacuagcccgaugggccucccaacgggcccuccuccccuccuugcaccgagauuaaucaaaggcucuuuucagagccaccaaaaaaaaaaaaaaaaaaaaaaaaaaaaaaaaaaaaaaaaaaaaaaaaaaaaaaaaaaaaaaaaaaaaaaaaaaaaaaaaaaaaaaaaaaaaaaaaaaaaa

SEQ ID NO: 24233 - RNA, 4035 nt, Artificial Sequence
  SARS-CoV-2/Wuhan/WIV05/2019__EPI_ISL_402128 spike protein mRNA gc (1-1273)(K986P_V987P_A222V_D614G)
aggagaaagcuuaccauguucguguuccuggugcugcugccccuggugagcagccagugcgugaaccugaccacccggacccagcugcccccugccuacaccaacagcuucacccggggcguguacuaccccgacaagguguuccggagcagcgugcugcacagcacccaggaccuguuccugcccuucuucagcaacgugaccugguuccacgccauccacgugagcggcaccaacggcaccaagcgguucgacaacccagugcugcccuucaacgacggcguguacuucgccagcaccgagaagucaaacaucauccggggcuggaucuucggcaccacccuggacagcaagacacagagccugcugaucgugaacaacgccaccaacguggugaucaaggugugcgaguuucaguucugcaacgaccccuuccugggcguguacuaccacaagaacaacaagagcuggauggagagcgaguuccgggucuacagcagcgcuaacaauugcaccuucgaguacgugagccagcccuuccugauggaccucgagggcaagcagggcaacuucaagaaccugcgggaguucguguucaagaacaucgauggcuacuucaagaucuacagcaagcacacccccaucaaccuggugcgggaccugccccagggauucagcgugcuggagccucugguggaccugcccaucggcaucaacaucaccagguuccagacccugcuggcccugcaccggagcuaccugacccccggcgacagcagcagcggcuggaccgccggcgccgccgccuacuacgugggcuaccugcagccacggaccuuccugcugaaguacaacgagaacggcaccaucaccgacgcaguggacugcgcccuggacccccugagcgagaccaagugcacccuaaagagcuucaccguggagaagggcaucuaccagaccagcaacuuccgggugcagcccacugagagcaucgugcgguuccccaacauuaccaaccugugucccuucggcgagguguucaacgccacccgguucgccagcguguacgccuggaaccggaagcggaucagcaacugcguggccgacuacagcgugcuguacaacagcgccagcuucagcaccuucaagugcuacggcgugagcccuaccaagcugaacgaccugugcuucaccaacguguacgccgacagcuucgugauccggggcgacgaggugcggcagaucgcucccggccagaccggcaagaucgccgacuacaacuacaagcugcccgacgacuucaccggcugcgugaucgccuggaacagcaacaaccuggacagcaaggugggcggcaacuacaacuaccuguaccggcuguuccguaagagcaaccugaagccauucgagcgggacaucagcaccgagaucuaccaggccggcagcacccccugcaacgguguggagggcuuuaacugcuacuucccccugcagagcuacggcuuccagcccaccaacggcgugggcuaccagcccuaccgggugguggugcugagcuucgagcugcugcacgcccccgccaccgugugcggcccuaaaaagagcaccaaccuggugaagaacaagugcgugaacuucaauuucaacggccugaccggcaccggcgugcugaccgagagcaacaagaaguuccugcccuuccagcaguucggccgggauaucgccgacaccaccgacgccgugcgggacccccagacccuggagauccuggacaucaccccaugcagcuucggcggcgucagcgugaucacccccggcacaaacaccagcaaccagguggcagugcuguaccagggagugaacugcaccgaggugcccguggccauccacgccgaccagcugacccccaccuggcggguguacagcaccggcagcaacguguuccagacccgggccggcugccugaucggcgccgagcacgugaacaacuccuacgagugcgacauccccaucggcgccggcaucugcgcuagcuaccagacccagaccaacagcccccggcgggcccggagcguggccagccagagcaucaucgccuacaccaugagcuuaggcgccgagaacagcguggccuacagcaacaacagcaucgccaucccuaccaacuucaccaucagcgugaccaccgagauacugcccgugagcaugaccaagaccagcguggacuguaccauguacaucugcggcgacagcaccgagugcagcaaccugcugcugcaguacggcagcuucugcacccagcugaaccgggcgcugaccggcaucgccguggagcaggacaagaacacccaagagguguucgcccaggugaagcagaucuacaagacucccccaaucaaggacuucggcggcuucaacuucagccagauccugcccgaccccagcaagcccagcaagcggagcuucaucgaggaccugcuguucaacaaggugacccuggccgacgccggcuucaucaagcaguacggcgacugccugggggauaucgccgcccgggaccugaucugcgcucagaaguucaacggccugaccgugcugcccccucugcugaccgacgagaugaucgcccaguacaccagcgcccugcuugccggcaccaucaccagcggcuggaccuucggcgccggcgccgcacugcagauccccuucgccaugcagauggccuaccgguucaacggcaucggcgugacccagaacgugcuguacgagaaccagaagcugaucgccaaccaguucaacagcgccaucggcaagauccaggacagccugagcagcaccgccagcgcccugggcaagcugcaggacguggugaaccagaacgcccaggcucugaacacccuggugaagcagcugagcagcaacuucggcgccaucagcucagugcugaaugacauccugagcaggcuggaucccccagaggccgaggugcagaucgaccggcugaucaccggccggcugcagagccugcagaccuacgugacccagcagcugauccgggccgccgagauccgggccagcgccaaccuggccgcaaccaagaugagcgagugcgugcugggccagagcaagcggguggacuuuugcggcaagggcuaccaccugaugagcuucccccagagcgcuccccacggcgugguguuccuccacgucacauacgugcccgcccaggagaagaacuucaccaccgcccccgccauuugccacgacggcaaggcccacuucccccgggagggaguguucgugagcaacggcacccacugguucgugacccagcggaacuucuacgagccucagaucaucaccaccgacaacaccuucgugagcggcaacugcgacguggugaucggcaucgugaacaacaccguguacgacccccugcagcccgagcuggacagcuucaaggaggagcuggacaaguacuucaagaaccacaccagcccagacguggaccugggcgacaucagcggcaucaacgccagcguggugaacauccagaaggagaucgaccggcugaacgagguggccaagaaccugaacgagagccugaucgaccugcaggagcugggcaaguacgagcaguacaucaaguggcccugguacaucuggcugggcuucaucgccggccugaucgccaucgugauggugaccaucaugcugugcugcaugaccagcugcuguagcugccugaagggcugcugcagcugcggcagcugcugcaaguucgacgaggacgacagcgagcccgugcugaagggcgugaagcugcacuacaccugaggacuaguuauaagacugacuagcccgaugggccucccaacgggcccuccuccccuccuugcaccgagauuaaucaaaggcucuuuucagagccaccaaaaaaaaaaaaaaaaaaaaaaaaaaaaaaaaaaaaaaaaaaaaaaaaaaaaaaaaaaaaaaaaaaaaaaaaaaaaaaaaaaaaaaaaaaaaaaaaaaaaa

SEQ ID NO: 24234 - RNA, 4035 nt, Artificial Sequence
  SARS-CoV-2/Wuhan/WIV05/2019__EPI_ISL_402128 spike protein mRNA gc (1-1273)(K986P_V987P_N439K_D614G)
aggagaaagcuuaccauguucguguuccuggugcugcugccccuggugagcagccagugcgugaaccugaccacccggacccagcugcccccugccuacaccaacagcuucacccggggcguguacuaccccgacaagguguuccggagcagcgugcugcacagcacccaggaccuguuccugcccuucuucagcaacgugaccugguuccacgccauccacgugagcggcaccaacggcaccaagcgguucgacaacccagugcugcccuucaacgacggcguguacuucgccagcaccgagaagucaaacaucauccggggcuggaucuucggcaccacccuggacagcaagacacagagccugcugaucgugaacaacgccaccaacguggugaucaaggugugcgaguuucaguucugcaacgaccccuuccugggcguguacuaccacaagaacaacaagagcuggauggagagcgaguuccgggucuacagcagcgcuaacaauugcaccuucgaguacgugagccagcccuuccugauggaccucgagggcaagcagggcaacuucaagaaccugcgggaguucguguucaagaacaucgauggcuacuucaagaucuacagcaagcacacccccaucaaccuggugcgggaccugccccagggauucagcgcccuggagccucugguggaccugcccaucggcaucaacaucaccagguuccagacccugcuggcccugcaccggagcuaccugacccccggcgacagcagcagcggcuggaccgccggcgccgccgcauacuacgugggcuaccugcagccacggaccuuccugcugaaguacaacgagaacggcaccaucaccgacgccguggacugcgcccuggacccccugagcgagaccaagugcacccuaaagagcuucaccguggagaagggcaucuaccagaccagcaacuuccgggugcagcccacugagagcaucgugcgguuccccaacauuaccaaccugugucccuucggcgagguguucaacgccacccgguucgccagcguguacgccuggaaccggaagcggaucagcaacugcguggccgacuacagcgugcuguacaacagcgccagcuucagcaccuucaagugcuacggcgugagcccuaccaagcugaacgaccugugcuucaccaacguguacgcugacagcuucgugauccggggcgacgaggugcggcagaucgcccccggccagaccggcaagaucgccgacuacaacuacaagcugcccgacgacuucaccggcugcgugaucgccuggaacagcaagaaccuggacagcaaggugggcggcaacuacaacuaccuguaccggcuguuccguaagagcaaccugaagccauucgagcgggacaucagcaccgagaucuaccaggccggcagcacccccugcaacgguguggagggcuuuaacugcuacuucccccugcagagcuacggcuuccagcccaccaacggcgugggcuaccagcccuaccgggugguggugcugagcuucgagcugcugcacgcccccgccaccgugugcggcccuaaaaagagcaccaaccuggugaagaacaagugcgugaacuucaacuucaauggccugaccggcaccggcgugcugaccgagagcaacaagaaguuccugcccuuccagcaguucggccgggauaucgccgacaccaccgacgcagugcgggacccccagacccuggagauccuggacaucaccccaugcagcuucggcggcgugagcgucaucacccccggcacaaacaccagcaaccagguggccgugcuguaccagggagugaacugcaccgaggugcccguggccauccacgccgaccagcugacccccaccuggcggguguacagcaccggcagcaacguguuccagacccgggccggcugccugaucggcgccgagcacgugaacaacuccuacgagugcgacauccccaucggcgcuggcaucugcgccagcuaccagacccagaccaacagcccccggcgggcccggagcguggccagccagagcaucaucgccuacaccaugagcuuaggcgccgagaacagcguggccuacagcaacaacagcaucgcgaucccuaccaacuucaccaucagcgugaccaccgagauacugcccgugagcaugaccaagaccagcguggacuguaccauguacaucugcggcgacagcaccgagugcagcaaccugcugcugcaguacggcagcuucugcacccagcugaaccgggcccugaccggcaucgccguggagcaggacaagaacacccaagagguguucgcccaggugaagcagaucuacaagacucccccaaucaaggacuucggcggcuucaacuucagccagauccugcccgaccccagcaagcccagcaagcggagcuucaucgaggaccugcuguucaacaaggugacccuggccgacgccggcuucaucaagcaguacggcgacugccugggggauaucgccgcucgggaccugaucugcgcccagaaguucaacggccugaccgugcugcccccucugcugaccgacgagaugaucgcccaguacaccagcgcccugcuugccggcaccaucaccagcggcuggaccuucggcgccggcgcagcccugcagauccccuucgccaugcagauggccuaccgguucaacggcaucggcgugacccagaacgugcuguacgagaaccagaagcugaucgccaaccaguucaacagcgccaucggcaagauccaggacagccugagcagcaccgccagcgcccugggcaagcugcaggacguggugaaccagaacgcucaggcccugaacacccuggugaagcagcugagcagcaacuucggcgccaucagcucagugcugaacgacauccugagcaggcuggaucccccagaggccgaggugcagaucgaccggcugaucaccggccggcugcagagccugcagaccuacgugacccagcagcugauccgggccgccgagauccgggccagcgccaaucuggcagccaccaagaugagcgagugcgugcugggccagagcaagcggguggacuuuugcggcaagggcuaccaccugaugagcuucccccagagcgcuccccacggcgugguguuccuccacgugacauacguccccgcccaggagaagaacuucaccaccgcccccgccauuugccacgacggcaaggcccacuucccccgggagggaguguucgugagcaacggcacccacugguucgugacccagcggaacuucuacgagccucagaucaucaccaccgacaacaccuucgugagcggcaacugcgacguggugaucggcaucgugaacaacaccguguacgacccccugcagcccgagcuggacagcuucaaggaggagcuggacaaguacuucaagaaccacaccagcccagacguggaccugggcgacaucagcggcaucaacgccagcguggugaacauccagaaggagaucgaccggcugaacgagguggccaagaaccugaacgagagccugaucgaccugcaggagcugggcaaguacgagcaguacaucaaguggcccugguacaucuggcugggcuucaucgccggccugaucgccaucgugauggugaccaucaugcugugcugcaugaccagcugcuguagcugccugaagggcugcugcagcugcggcagcugcugcaaguucgacgaggacgacagcgagcccgugcugaagggcgugaagcugcacuacaccugaggacuaguuauaagacugacuagcccgaugggccucccaacgggcccuccuccccuccuugcaccgagauuaaucaaaggcucuuuucagagccaccaaaaaaaaaaaaaaaaaaaaaaaaaaaaaaaaaaaaaaaaaaaaaaaaaaaaaaaaaaaaaaaaaaaaaaaaaaaaaaaaaaaaaaaaaaaaaaaaaaaaa

SEQ ID NO: 24235 - RNA, 4035 nt, Artificial Sequence
  SARS-CoV-2/Wuhan/WIV05/2019__EPI_ISL_402128 spike protein mRNA gc (1-1273)(K986P_V987P_S477N_D614G)
aggagaaagcuuaccauguucguguuccuggugcugcugccccuggugagcagccagugcgugaaccugaccacccggacccagcugcccccugccuacaccaacagcuucacccggggcguguacuaccccgacaagguguuccggagcagcgugcugcacagcacccaggaccuguuccugcccuucuucagcaacgugaccugguuccacgccauccacgugagcggcaccaacggcaccaagcgguucgacaacccagugcugcccuucaacgacggcguguacuucgccagcaccgagaagucaaacaucauccggggcuggaucuucggcaccacccuggacagcaagacacagagccugcugaucgugaacaacgccaccaacguggugaucaaggugugcgaguuucaguucugcaacgaccccuuccugggcguguacuaccacaagaacaacaagagcuggauggagagcgaguuccgggucuacagcagcgcuaacaauugcaccuucgaguacgugagccagcccuuccugauggaccucgagggcaagcagggcaacuucaagaaccugcgggaguucguguucaagaacaucgauggcuacuucaagaucuacagcaagcacacccccaucaaccuggugcgggaccugccccagggauucagcgcccuggagccucugguggaccugcccaucggcaucaacaucaccagguuccagacccugcuggcccugcaccggagcuaccugacccccggcgacagcagcagcggcuggaccgccggcgccgccgcauacuacgugggcuaccugcagccacggaccuuccugcugaaguacaacgagaacggcaccaucaccgacgccguggacugcgcccuggacccccugagcgagaccaagugcacccuaaagagcuucaccguggagaagggcaucuaccagaccagcaacuuccgggugcagcccacugagagcaucgugcgguuccccaacauuaccaaccugugucccuucggcgagguguucaacgccacccgguucgccagcguguacgccuggaaccggaagcggaucagcaacugcguggccgacuacagcgugcuguacaacagcgccagcuucagcaccuucaagugcuacggcgugagcccuaccaagcugaacgaccugugcuucaccaacguguacgcugacagcuucgugauccggggcgacgaggugcggcagaucgcccccggccagaccggcaagaucgccgacuacaacuacaagcugcccgacgacuucaccggcugcgugaucgccuggaacagcaacaaccuggacagcaaggugggcggcaacuacaacuaccuguaccggcuguuccguaagagcaaccugaagccauucgagcgggacaucagcaccgagaucuaccaggccggcaacacccccugcaacgguguggagggcuuuaacugcuacuucccccugcagagcuacggcuuccagcccaccaacggcgugggcuaccagcccuaccgggugguggugcugagcuucgagcugcugcacgcccccgccaccgugugcggcccuaaaaagagcaccaaccuggugaagaacaagugcgugaauuucaacuucaacggccugaccggcaccggcgugcugaccgagagcaacaagaaguuccugcccuuccagcaguucggccgggauaucgccgacaccaccgacgcagugcgggacccccagacccuggagauccuggacaucaccccaugcagcuucggcggcgugagcgucaucacccccggcacaaacaccagcaaccagguggccgugcuguaccagggagugaacugcaccgaggugcccguggccauccacgccgaccagcugacccccaccuggcggguguacagcaccggcagcaacguguuccagacccgggccggcugccugaucggcgccgagcacgugaacaacagcuacgagugcgacauccccaucggcgcuggcaucugcgccuccuaccagacccagaccaacagcccccggcgggcccggagcguggccagccagagcaucaucgccuacaccaugagcuuaggcgccgagaacagcguggccuacagcaacaacagcaucgcgaucccuaccaacuucaccaucagcgugaccaccgagauacugcccgugagcaugaccaagaccagcguggacuguaccauguacaucugcggcgacagcaccgagugcagcaaccugcugcugcaguacggcagcuucugcacccagcugaaccgggcccugaccggcaucgccguggagcaggacaagaacacccaagagguguucgcccaggugaagcagaucuacaagacucccccaaucaaggacuucggcggcuucaacuucagccagauccugcccgaccccagcaagcccagcaagcggagcuucaucgaggaccugcuguucaacaaggugacccuggccgacgccggcuucaucaagcaguacggcgacugccugggggauaucgccgcucgggaccugaucugcgcccagaaguucaacggccugaccgugcugcccccucugcugaccgacgagaugaucgcccaguacaccagcgcccugcuugccggcaccaucaccagcggcuggaccuucggcgccggcgcagcccugcagauccccuucgccaugcagauggccuaccgguucaacggcaucggcgugacccagaacgugcuguacgagaaccagaagcugaucgccaaccaguucaacagcgccaucggcaagauccaggacagccugagcagcaccgccagcgcccugggcaagcugcaggacguggugaaccagaacgcucaggcccugaacacccuggugaagcagcugagcagcaauuucggcgccaucagcagcgugcugaacgacauccugucaaggcuggaucccccagaggccgaggugcagaucgaccggcugaucaccggccggcugcagagccugcagaccuacgugacccagcagcugauccgggccgccgagauccgggccagcgccaaccuggcagccaccaagaugagcgagugcgugcugggccagagcaagcggguggacuuuugcggcaagggcuaccaccugaugagcuucccccagagcgcuccccacggcgugguguuccuccacgugacauacguccccgcccaggagaagaacuucaccaccgcccccgccauuugccacgacggcaaggcccacuucccccgggagggaguguucgugagcaacggcacccacugguucgugacccagcggaacuucuacgagccucagaucaucaccaccgacaacaccuucgugagcggcaacugcgacguggugaucggcaucgugaacaacaccguguacgacccccugcagcccgagcuggacagcuucaaggaggagcuggacaaguacuucaagaaccacaccagcccagacguggaccugggcgacaucagcggcaucaacgccagcguggugaacauccagaaggagaucgaccggcugaacgagguggccaagaaccugaacgagagccugaucgaccugcaggagcugggcaaguacgagcaguacaucaaguggcccugguacaucuggcugggcuucaucgccggccugaucgccaucgugauggugaccaucaugcugugcugcaugaccagcugcuguagcugccugaagggcugcugcagcugcggcagcugcugcaaguucgacgaggacgacagcgagcccgugcugaagggcgugaagcugcacuacaccugaggacuaguuauaagacugacuagcccgaugggccucccaacgggcccuccuccccuccuugcaccgagauuaaucaaaggcucuuuucagagccaccaaaaaaaaaaaaaaaaaaaaaaaaaaaaaaaaaaaaaaaaaaaaaaaaaaaaaaaaaaaaaaaaaaaaaaaaaaaaaaaaaaaaaaaaaaaaaaaaaaaaa

SEQ ID NO: 24236 - RNA, 4035 nt, Artificial Sequence
  SARS-CoV-2/Wuhan/WIV05/2019__EPI_ISL_402128 spike protein mRNA gc (1-1273)(K986P_V987P_N501Y_D614G)
aggagaaagcuuaccauguucguguuccuggugcugcugccccuggugagcagccagugcgugaaccugaccacccggacccagcugcccccugccuacaccaacagcuucacccggggcguguacuaccccgacaagguguuccggagcagcgugcugcacagcacccaggaccuguuccugcccuucuucagcaacgugaccugguuccacgccauccacgugagcggcaccaacggcaccaagcgguucgacaacccagugcugcccuucaacgacggcguguacuucgccagcaccgagaagucaaacaucauccggggcuggaucuucggcaccacccuggacagcaagacacagagccugcugaucgugaacaacgccaccaacguggugaucaaggugugcgaguuucaguucugcaacgaccccuuccugggcguguacuaccacaagaacaacaagagcuggauggagagcgaguuccgggucuacagcagcgcuaacaauugcaccuucgaguacgugagccagcccuuccugauggaccucgagggcaagcagggcaacuucaagaaccugcgggaguucguguucaagaacaucgauggcuacuucaagaucuacagcaagcacacccccaucaaccuggugcgggaccugccccagggauucagcgcccuggagccucugguggaccugcccaucggcaucaacaucaccagguuccagacccugcuggcccugcaccggagcuaccugacccccggcgacagcagcagcggcuggaccgccggcgccgccgcauacuacgugggcuaccugcagccacggaccuuccugcugaaguacaacgagaacggcaccaucaccgacgccguggacugcgcccuggacccccugagcgagaccaagugcacccuaaagagcuucaccguggagaagggcaucuaccagaccagcaacuuccgggugcagcccacugagagcaucgugcgguuccccaacauuaccaaccugugucccuucggcgagguguucaacgccacccgguucgccagcguguacgccuggaaccggaagcggaucagcaacugcguggccgacuacagcgugcuguacaacagcgccagcuucagcaccuucaagugcuacggcgugagcccuaccaagcugaacgaccugugcuucaccaacguguacgcugacagcuucgugauccggggcgacgaggugcggcagaucgcccccggccagaccggcaagaucgccgacuacaacuacaagcugcccgacgacuucaccggcugcgugaucgccuggaacagcaacaaccuggacagcaaggugggcggcaacuacaacuaccuguaccggcuguuccguaagagcaaccugaagccauucgagcgggacaucagcaccgagaucuaccaggccggcagcacccccugcaacgguguggagggcuuuaacugcuacuucccccugcagagcuacggcuuccagcccaccuacggcgugggcuaccagcccuaccgggugguggugcugagcuucgagcugcugcacgcccccgccaccgugugcggcccuaaaaagagcaccaaccuggugaagaacaagugcgugaacuucaacuucaauggccugaccggcaccggcgugcugaccgagagcaacaagaaguuccugcccuuccagcaguucggccgggauaucgccgacaccaccgacgcagugcgggacccccagacccuggagauccuggacaucaccccaugcagcuucggcggcgugagcgucaucacccccggcacaaacaccagcaaccagguggccgugcuguaccagggagugaacugcaccgaggugcccguggccauccacgccgaccagcugacccccaccuggcggguguacagcaccggcagcaacguguuccagacccgggccggcugccugaucggcgccgagcacgugaacaacuccuacgagugcgacauccccaucggcgcuggcaucugcgccagcuaccagacccagaccaacagcccccggcgggcccggagcguggccagccagagcaucaucgccuacaccaugagcuuaggcgccgagaacagcguggccuacagcaacaacagcaucgcgaucccuaccaacuucaccaucagcgugaccaccgagauacugcccgugagcaugaccaagaccagcguggacuguaccauguacaucugcggcgacagcaccgagugcagcaaccugcugcugcaguacggcagcuucugcacccagcugaaccgggcccugaccggcaucgccguggagcaggacaagaacacccaagagguguucgcccaggugaagcagaucuacaagacucccccaaucaaggacuucggcggcuucaacuucagccagauccugcccgaccccagcaagcccagcaagcggagcuucaucgaggaccugcuguucaacaaggugacccuggccgacgccggcuucaucaagcaguacggcgacugccugggggauaucgccgcucgggaccugaucugcgcccagaaguucaacggccugaccgugcugcccccucugcugaccgacgagaugaucgcccaguacaccagcgcccugcuugccggcaccaucaccagcggcuggaccuucggcgccggcgcagcccugcagauccccuucgccaugcagauggccuaccgguucaacggcaucggcgugacccagaacgugcuguacgagaaccagaagcugaucgccaaccaguucaacagcgccaucggcaagauccaggacagccugagcagcaccgccagcgcccugggcaagcugcaggacguggugaaccagaacgcucaggcccugaacacccuggugaagcagcugagcagcaacuucggcgccaucagcucagugcugaacgacauccugagcaggcuggaucccccagaggccgaggugcagaucgaccggcugaucaccggccggcugcagagccugcagaccuacgugacccagcagcugauccgggccgccgagauccgggccagcgccaaucuggcagccaccaagaugagcgagugcgugcugggccagagcaagcggguggacuuuugcggcaagggcuaccaccugaugagcuucccccagagcgcuccccacggcgugguguuccuccacgugacauacguccccgcccaggagaagaacuucaccaccgcccccgccauuugccacgacggcaaggcccacuucccccgggagggaguguucgugagcaacggcacccacugguucgugacccagcggaacuucuacgagccucagaucaucaccaccgacaacaccuucgugagcggcaacugcgacguggugaucggcaucgugaacaacaccguguacgacccccugcagcccgagcuggacagcuucaaggaggagcuggacaaguacuucaagaaccacaccagcccagacguggaccugggcgacaucagcggcaucaacgccagcguggugaacauccagaaggagaucgaccggcugaacgagguggccaagaaccugaacgagagccugaucgaccugcaggagcugggcaaguacgagcaguacaucaaguggcccugguacaucuggcugggcuucaucgccggccugaucgccaucgugauggugaccaucaugcugugcugcaugaccagcugcuguagcugccugaagggcugcugcagcugcggcagcugcugcaaguucgacgaggacgacagcgagcccgugcugaagggcgugaagcugcacuacaccugaggacuaguuauaagacugacuagcccgaugggccucccaacgggcccuccuccccuccuugcaccgagauuaaucaaaggcucuuuucagagccaccaaaaaaaaaaaaaaaaaaaaaaaaaaaaaaaaaaaaaaaaaaaaaaaaaaaaaaaaaaaaaaaaaaaaaaaaaaaaaaaaaaaaaaaaaaaaaaaaaaaaa

SEQ ID NO: 24237 - RNA, 4029 nt, Artificial Sequence
  SARS-CoV-2/Wuhan/WIV05/2019__EPI_ISL_402128 spike protein mRNA gc (1-1273)(K986P_V987P_H69del_V70del_D614G)
aggagaaagcuuaccauguucguguuccuggugcugcugccccuggugagcagccagugcgugaaccugaccacccggacccagcugcccccugccuacaccaacagcuucacccggggcguguacuaccccgacaagguguuccggagcagcgugcugcacagcacccaggaccuguuccugcccuucuucagcaacgugaccugguuccacgccaucagcggcaccaacggcaccaagcgguucgacaacccagugcugcccuucaacgacggcguguacuucgccagcaccgagaagucaaacaucauccggggcuggaucuucggcaccacccuggacagcaagacacagagccugcugaucgugaacaacgccaccaacguggugaucaaggugugcgaguuucaguucugcaacgaccccuuccugggcguguacuaccacaagaacaacaagagcuggauggagagcgaguuccggguguacagcagcgcuaacaauugcaccuucgaguacgucagccagcccuuccugauggaccucgagggcaagcagggcaacuucaagaaccugcgggaguucguguucaagaacaucgauggcuacuucaagaucuacagcaagcacacccccaucaaccuggugcgggaccugccccagggauucagcgcccuggagccucugguggaccugcccaucggcaucaacaucaccagguuccagacccugcuggcccugcaccggagcuaccugacccccggcgacagcagcagcggcuggaccgccggcgccgccgcauacuacgugggcuaccugcagccacggaccuuccugcugaaguacaacgagaacggcaccaucaccgacgccguggacugcgcccuggacccccugagcgagaccaagugcacccuaaagagcuucaccguggagaagggcaucuaccagaccagcaacuuccgggugcagcccacugagagcaucgugcgguuccccaacauuaccaaccugugucccuucggcgagguguucaacgccacccgguucgccagcguguacgccuggaaccggaagcggaucagcaacugcguggccgacuacagcgugcuguacaacagcgccagcuucagcaccuucaagugcuacggcgugagcccuaccaagcugaacgaccugugcuucaccaacguguacgcugacagcuucgugauccggggcgacgaggugcggcagaucgcccccggccagaccggcaagaucgccgacuacaacuacaagcugcccgacgacuucaccggcugcgugaucgccuggaacagcaacaaccuggacagcaaggugggcggcaacuacaacuaccuguaccggcuguuccguaagagcaaccugaagccauucgagcgggacaucagcaccgagaucuaccaggccggcagcacccccugcaacgguguggagggcuuuaacugcuacuucccccugcagagcuacggcuuccagcccaccaacggcgugggcuaccagcccuaccgggugguggugcugagcuucgagcugcugcacgcccccgccaccgugugcggcccuaaaaagagcaccaaccuggugaagaacaagugcgugaacuucaauuucaacggccugaccggcaccggcgugcugaccgagagcaacaagaaguuccugcccuuccagcaguucggccgggauaucgccgacaccaccgacgcagugcgggacccccagacccuggagauccuggacaucaccccaugcagcuucggcggcgugagcgugaucacccccggcacaaacaccagcaaccaggucgccgugcuguaccagggagugaacugcaccgaggugcccguggccauccacgccgaccagcugacccccaccuggcggguguacagcaccggcagcaacguguuccagacccgggccggcugccugaucggcgccgagcacgugaacaacuccuacgagugcgacauccccaucggcgcuggcaucugcgccagcuaccagacccagaccaacagcccccggcgggcccggagcguggccagccagagcaucaucgccuacaccaugagcuuaggcgccgagaacagcguggccuacagcaacaacagcaucgcgaucccuaccaacuucaccaucagcgugaccaccgagauacugcccgugagcaugaccaagaccagcguggacuguaccauguacaucugcggcgacagcaccgagugcagcaaccugcugcugcaguacggcagcuucugcacccagcugaaccgggcccugaccggcaucgccguggagcaggacaagaacacccaagagguguucgcccaggugaagcagaucuacaagacucccccaaucaaggacuucggcggcuucaacuucagccagauccugcccgaccccagcaagcccagcaagcggagcuucaucgaggaccugcuguucaacaaggugacccuggccgacgccggcuucaucaagcaguacggcgacugccugggggauaucgccgcucgggaccugaucugcgcccagaaguucaacggccugaccgugcugcccccucugcugaccgacgagaugaucgcccaguacaccagcgcccugcuugccggcaccaucaccagcggcuggaccuucggcgccggcgcagcccugcagauccccuucgccaugcagauggccuaccgguucaacggcaucggcgugacccagaacgugcuguacgagaaccagaagcugaucgccaaccaguucaacagcgccaucggcaagauccaggacagccugagcagcaccgccagcgcccugggcaagcugcaggacguggugaaccagaacgcucaggcccugaacacccuggugaagcagcugagcagcaacuucggcgccaucagcucagugcugaaugacauccugagcaggcuggaucccccagaggccgaggugcagaucgaccggcugaucaccggccggcugcagagccugcagaccuacgugacccagcagcugauccgggccgccgagauccgggccagcgccaaccuggcagccaccaagaugagcgagugcgugcugggccagagcaagcggguggacuuuugcggcaagggcuaccaccugaugagcuucccccagagcgcuccccacggcgugguguuccuccacgugacauacgugcccgcccaggagaagaacuucaccaccgcccccgccauuugccacgacggcaaggcccacuucccccgggagggagucuucgugagcaacggcacccacugguucgugacccagcggaacuucuacgagccucagaucaucaccaccgacaacaccuucgugagcggcaacugcgacguggugaucggcaucgugaacaacaccguguacgacccccugcagcccgagcuggacagcuucaaggaggagcuggacaaguacuucaagaaccacaccagcccagacguggaccugggcgacaucagcggcaucaacgccagcguggugaacauccagaaggagaucgaccggcugaacgagguggccaagaaccugaacgagagccugaucgaccugcaggagcugggcaaguacgagcaguacaucaaguggcccugguacaucuggcugggcuucaucgccggccugaucgccaucgugauggugaccaucaugcugugcugcaugaccagcugcuguagcugccugaagggcugcugcagcugcggcagcugcugcaaguucgacgaggacgacagcgagcccgugcugaagggcgugaagcugcacuacaccugaggacuaguuauaagacugacuagcccgaugggccucccaacgggcccuccuccccuccuugcaccgagauuaaucaaaggcucuuuucagagccaccaaaaaaaaaaaaaaaaaaaaaaaaaaaaaaaaaaaaaaaaaaaaaaaaaaaaaaaaaaaaaaaaaaaaaaaaaaaaaaaaaaaaaaaaaaaaaaaaaaaaa

SEQ ID NO: 24238 - RNA, 4035 nt, Artificial Sequence
  SARS-CoV-2/Wuhan/WIV05/2019__EPI_ISL_402128 spike protein mRNA gc (1-1273)(K986P_V987P_Y453F_D614G)
aggagaaagcuuaccauguucguguuccuggugcugcugccccuggugagcagccagugcgugaaccugaccacccggacccagcugcccccugccuacaccaacagcuucacccggggcguguacuaccccgacaagguguuccggagcagcgugcugcacagcacccaggaccuguuccugcccuucuucagcaacgugaccugguuccacgccauccacgugagcggcaccaacggcaccaagcgguucgacaacccagugcugcccuucaacgacggcguguacuucgccagcaccgagaagucaaacaucauccggggcuggaucuucggcaccacccuggacagcaagacacagagccugcugaucgugaacaacgccaccaacguggugaucaaggugugcgaguuucaguucugcaacgaccccuuccugggcguguacuaccacaagaacaacaagagcuggauggagagcgaguuccgggucuacagcagcgcuaacaauugcaccuucgaguacgugagccagcccuuccugauggaccucgagggcaagcagggcaacuucaagaaccugcgggaguucguguucaagaacaucgauggcuacuucaagaucuacagcaagcacacccccaucaaccuggugcgggaccugccccagggauucagcgcccuggagccucugguggaccugcccaucggcaucaacaucaccagguuccagacccugcuggcccugcaccggagcuaccugacccccggcgacagcagcagcggcuggaccgccggcgccgccgcauacuacgugggcuaccugcagccacggaccuuccugcugaaguacaacgagaacggcaccaucaccgacgccguggacugcgcccuggacccccugagcgagaccaagugcacccuaaagagcuucaccguggagaagggcaucuaccagaccagcaacuuccgggugcagcccacugagagcaucgugcgguuccccaacauuaccaaccugugucccuucggcgagguguucaacgccacccgguucgccagcguguacgccuggaaccggaagcggaucagcaacugcguggccgacuacagcgugcuguacaacagcgccagcuucagcaccuucaagugcuacggcgugagcccuaccaagcugaacgaccugugcuucaccaacguguacgcugacagcuucgugauccggggcgacgaggugcggcagaucgcccccggccagaccggcaagaucgccgacuacaacuacaagcugcccgacgacuucaccggcugcgugaucgccuggaacagcaacaaccuggacagcaaggugggcggcaacuacaacuaccuguuccggcuguuccguaagagcaaccugaagccauuugagcgggacaucagcaccgagaucuaccaggccggcagcacccccugcaacgguguggagggcuucaacugcuacuucccccugcagagcuacggcuuccagcccaccaacggcgugggcuaccagcccuaccgggugguggugcugagcuucgagcugcugcacgcccccgccaccgugugcggcccuaaaaagagcaccaaccuggugaagaacaagugcgugaacuucaauuucaacggccugaccggcaccggcgugcugaccgagagcaacaagaaguuccugcccuuccagcaguucggccgggauaucgccgacaccaccgacgcagugcgggacccccagacccuggagauccuggacaucaccccaugcagcuucggcggcgugagcgucaucacccccggcacaaacaccagcaaccagguggccgugcuguaccagggagugaacugcaccgaggugcccguggccauccacgccgaccagcugacccccaccuggcggguguacagcaccggcagcaacguguuccagacccgggccggcugccugaucggcgccgagcacgugaacaacuccuacgagugcgacauccccaucggcgcuggcaucugcgccagcuaccagacccagaccaacagcccccggcgggcccggagcguggccagccagagcaucaucgccuacaccaugagcuuaggcgccgagaacagcguggccuacagcaacaacagcaucgcgaucccuaccaacuucaccaucagcgugaccaccgagauacugcccgugagcaugaccaagaccagcguggacuguaccauguacaucugcggcgacagcaccgagugcagcaaccugcugcugcaguacggcagcuucugcacccagcugaaccgggcccugaccggcaucgccguggagcaggacaagaacacccaagagguguucgcccaggugaagcagaucuacaagacucccccaaucaaggacuucggcggcuucaacuucagccagauccugcccgaccccagcaagcccagcaagcggagcuucaucgaggaccugcuguucaacaaggugacccuggccgacgccggcuucaucaagcaguacggcgacugccugggggauaucgccgcucgggaccugaucugcgcccagaaguucaacggccugaccgugcugcccccucugcugaccgacgagaugaucgcccaguacaccagcgcccugcuugccggcaccaucaccagcggcuggaccuucggcgccggcgcagcccugcagauccccuucgccaugcagauggccuaccgguucaacggcaucggcgugacccagaacgugcuguacgagaaccagaagcugaucgccaaccaguucaacagcgccaucggcaagauccaggacagccugagcagcaccgccagcgcccugggcaagcugcaggacguggugaaccagaacgcucaggcccugaacacccuggugaagcagcugagcagcaacuuuggcgccaucagcucagugcugaaugacauccugagcaggcuggaucccccagaggccgaggugcagaucgaccggcugaucaccggccggcugcagagccugcagaccuacgugacccagcagcugauccgggccgccgagauccgggccagcgccaaccuggcagccaccaagaugagcgagugcgugcugggccagagcaagcggguggacuucugcggcaagggcuaccaccugaugagcuucccccagagcgcuccccacggcgugguguuccuccacgugacauacguccccgcccaggagaagaacuucaccaccgcccccgccauuugccacgacggcaaggcccacuucccccgggagggaguguucgugagcaacggcacccacugguucgugacccagcggaacuucuacgagccucagaucaucaccaccgacaacaccuucgugagcggcaacugcgacguggugaucggcaucgugaacaacaccguguacgacccccugcagcccgagcuggacagcuucaaggaggagcuggacaaguacuucaagaaccacaccagcccagacguggaccugggcgacaucagcggcaucaacgccagcguggugaacauccagaaggagaucgaccggcugaacgagguggccaagaaccugaacgagagccugaucgaccugcaggagcugggcaaguacgagcaguacaucaaguggcccugguacaucuggcugggcuucaucgccggccugaucgccaucgugauggugaccaucaugcugugcugcaugaccagcugcuguagcugccugaagggcugcugcagcugcggcagcugcugcaaguucgacgaggacgacagcgagcccgugcugaagggcgugaagcugcacuacaccugaggacuaguuauaagacugacuagcccgaugggccucccaacgggcccuccuccccuccuugcaccgagauuaaucaaaggcucuuuucagagccaccaaaaaaaaaaaaaaaaaaaaaaaaaaaaaaaaaaaaaaaaaaaaaaaaaaaaaaaaaaaaaaaaaaaaaaaaaaaaaaaaaaaaaaaaaaaaaaaaaaaaa

SEQ ID NO: 24239 - RNA, 4035 nt, Artificial Sequence
  SARS-CoV-2/Wuhan/WIV05/2019__EPI_ISL_402128 spike protein mRNA gc (1-1273)(K986P_V987P_D614G_I692V)
aggagaaagcuuaccauguucguguuccuggugcugcugccccuggugagcagccagugcgugaaccugaccacccggacccagcugcccccugccuacaccaacagcuucacccggggcguguacuaccccgacaagguguuccggagcagcgugcugcacagcacccaggaccuguuccugcccuucuucagcaacgugaccugguuccacgccauccacgugagcggcaccaacggcaccaagcgguucgacaacccagugcugcccuucaacgacggcguguacuucgccagcaccgagaagucaaacaucauccggggcuggaucuucggcaccacccuggacagcaagacacagagccugcugaucgugaacaacgccaccaacguggugaucaaggugugcgaguuucaguucugcaacgaccccuuccugggcguguacuaccacaagaacaacaagagcuggauggagagcgaguuccgggucuacagcagcgcuaacaauugcaccuucgaguacgugagccagcccuuccugauggaccucgagggcaagcagggcaacuucaagaaccugcgggaguucguguucaagaacaucgauggcuacuucaagaucuacagcaagcacacccccaucaaccuggugcgggaccugccccagggauucagcgcccuggagccucugguggaccugcccaucggcaucaacaucaccagguuccagacccugcuggcccugcaccggagcuaccugacccccggcgacagcagcagcggcuggaccgccggcgccgccgcauacuacgugggcuaccugcagccacggaccuuccugcugaaguacaacgagaacggcaccaucaccgacgccguggacugcgcccuggacccccugagcgagaccaagugcacccuaaagagcuucaccguggagaagggcaucuaccagaccagcaacuuccgggugcagcccacugagagcaucgugcgguuccccaacauuaccaaccugugucccuucggcgagguguucaacgccacccgguucgccagcguguacgccuggaaccggaagcggaucagcaacugcguggccgacuacagcgugcuguacaacagcgccagcuucagcaccuucaagugcuacggcgugagcccuaccaagcugaacgaccugugcuucaccaacguguacgcugacagcuucgugauccggggcgacgaggugcggcagaucgcccccggccagaccggcaagaucgccgacuacaacuacaagcugcccgacgacuucaccggcugcgugaucgccuggaacagcaacaaccuggacagcaaggugggcggcaacuacaacuaccuguaccggcuguuccguaagagcaaccugaagccauucgagcgggacaucagcaccgagaucuaccaggccggcagcacccccugcaacgguguggagggcuuuaacugcuacuucccccugcagagcuacggcuuccagcccaccaacggcgugggcuaccagcccuaccgggugguggugcugagcuucgagcugcugcacgcccccgccaccgugugcggcccuaaaaagagcaccaaccuggugaagaacaagugcgugaacuucaauuucaacggccugaccggcaccggcgugcugaccgagagcaacaagaaguuccugcccuuccagcaguucggccgggauaucgccgacaccaccgacgcagugcgggacccccagacccuggagauccuggacaucaccccaugcagcuucggcggcgugagcgucaucacccccggcacaaacaccagcaaccagguggccgugcuguaccagggagugaacugcaccgaggugcccguggccauccacgccgaccagcugacccccaccuggcggguguacagcaccggcagcaacguguuccagacccgggccggcugccugaucggcgccgagcacgugaacaacuccuacgagugcgacauccccaucggcgcuggcaucugcgccagcuaccagacccagaccaacagcccccggcgggcccggagcguggccagccagagcgugaucgccuacaccaugagcuuaggcgccgagaacagcguggccuacagcaacaacagcaucgcgaucccuaccaacuucaccaucagcgugaccaccgagauccugcccgugagcaugaccaagaccagcguggacuguaccauguacauaugcggcgacagcaccgagugcagcaaccugcugcugcaguacggcagcuucugcacccagcugaaccgggcccugaccggcaucgccguggagcaggacaagaacacccaagagguguucgcccaggugaagcagaucuacaagacucccccaaucaaggacuucggcggcuucaacuucagccagauccugcccgaccccagcaagcccagcaagcggagcuucaucgaggaccugcuguucaacaaggugacccuggccgacgccggcuucaucaagcaguacggcgacugccugggggauaucgccgcucgggaccugaucugcgcccagaaguucaacggccugaccgugcugcccccucugcugaccgacgagaugaucgcccaguacaccagcgcccugcuugccggcaccaucaccagcggcuggaccuucggcgccggcgcagcccugcagauccccuucgccaugcagauggccuaccgguucaacggcaucggcgugacccagaacgugcuguacgagaaccagaagcugaucgccaaccaguucaacagcgccaucggcaagauccaggacagccugagcagcaccgccagcgcccugggcaagcugcaggacguggugaaccagaacgcucaggcccugaacacccuggugaagcagcugagcagcaacuucggcgccaucagcucagugcugaaugacauccugagcaggcuggaucccccagaggccgaggugcagaucgaccggcugaucaccggccggcugcagagccugcagaccuacgugacccagcagcugauccgggccgccgagauccgggccagcgccaaccuggcagccaccaagaugagcgagugcgugcugggccagagcaagcggguggacuuuugcggcaagggcuaccaccugaugagcuucccccagagcgcuccccacggcgugguguuccuccacgucacauacgugcccgcccaggagaagaacuucaccaccgcccccgccaucugccacgacggcaaggcccacuucccccgggagggaguguucgugagcaacggcacccacugguucgugacccagcggaacuucuacgagccucagauuaucaccaccgacaacaccuucgugagcggcaacugcgacguggugaucggcaucgugaacaacaccguguacgacccccugcagcccgagcuggacagcuucaaggaggagcuggacaaguacuucaagaaccacaccagcccagacguggaccugggcgacaucagcggcaucaacgccagcguggugaacauccagaaggagaucgaccggcugaacgagguggccaagaaccugaacgagagccugaucgaccugcaggagcugggcaaguacgagcaguacaucaaguggcccugguacaucuggcugggcuucaucgccggccugaucgccaucgugauggugaccaucaugcugugcugcaugaccagcugcuguagcugccugaagggcugcugcagcugcggcagcugcugcaaguucgacgaggacgacagcgagcccgugcugaagggcgugaagcugcacuacaccugaggacuaguuauaagacugacuagcccgaugggccucccaacgggcccuccuccccuccuugcaccgagauuaaucaaaggcucuuuucagagccaccaaaaaaaaaaaaaaaaaaaaaaaaaaaaaaaaaaaaaaaaaaaaaaaaaaaaaaaaaaaaaaaaaaaaaaaaaaaaaaaaaaaaaaaaaaaaaaaaaaaaa

SEQ ID NO: 24240 - RNA, 4035 nt, Artificial Sequence
  SARS-CoV-2/Wuhan/WIV05/2019__EPI_ISL_402128 spike protein mRNA gc (1-1273)(K986P_V987P_D614G_M1229I)
aggagaaagcuuaccauguucguguuccuggugcugcugccccuggugagcagccagugcgugaaccugaccacccggacccagcugcccccugccuacaccaacagcuucacccggggcguguacuaccccgacaagguguuccggagcagcgugcugcacagcacccaggaccuguuccugcccuucuucagcaacgugaccugguuccacgccauccacgugagcggcaccaacggcaccaagcgguucgacaacccagugcugcccuucaacgacggcguguacuucgccagcaccgagaagucaaacaucauccggggcuggaucuucggcaccacccuggacagcaagacacagagccugcugaucgugaacaacgccaccaacguggugaucaaggugugcgaguuucaguucugcaacgaccccuuccugggcguguacuaccacaagaacaacaagagcuggauggagagcgaguuccgggucuacagcagcgcuaacaauugcaccuucgaguacgugagccagcccuuccugauggaccucgagggcaagcagggcaacuucaagaaccugcgggaguucguguucaagaacaucgauggcuacuucaagaucuacagcaagcacacccccaucaaccuggugcgggaccugccccagggauucagcgcccuggagccucugguggaccugcccaucggcaucaacaucaccagguuccagacccugcuggcccugcaccggagcuaccugacccccggcgacagcagcagcggcuggaccgccggcgccgccgcauacuacgugggcuaccugcagccacggaccuuccugcugaaguacaacgagaacggcaccaucaccgacgccguggacugcgcccuggacccccugagcgagaccaagugcacccuaaagagcuucaccguggagaagggcaucuaccagaccagcaacuuccgggugcagcccacugagagcaucgugcgguuccccaacauuaccaaccugugucccuucggcgagguguucaacgccacccgguucgccagcguguacgccuggaaccggaagcggaucagcaacugcguggccgacuacagcgugcuguacaacagcgccagcuucagcaccuucaagugcuacggcgugagcccuaccaagcugaacgaccugugcuucaccaacguguacgcugacagcuucgugauccggggcgacgaggugcggcagaucgcccccggccagaccggcaagaucgccgacuacaacuacaagcugcccgacgacuucaccggcugcgugaucgccuggaacagcaacaaccuggacagcaaggugggcggcaacuacaacuaccuguaccggcuguuccguaagagcaaccugaagccauucgagcgggacaucagcaccgagaucuaccaggccggcagcacccccugcaacgguguggagggcuuuaacugcuacuucccccugcagagcuacggcuuccagcccaccaacggcgugggcuaccagcccuaccgggugguggugcugagcuucgagcugcugcacgcccccgccaccgugugcggcccuaaaaagagcaccaaccuggugaagaacaagugcgugaacuucaauuucaacggccugaccggcaccggcgugcugaccgagagcaacaagaaguuccugcccuuccagcaguucggccgggauaucgccgacaccaccgacgcagugcgggacccccagacccuggagauccuggacaucaccccaugcagcuucggcggcgugagcgucaucacccccggcacaaacaccagcaaccagguggccgugcuguaccagggagugaacugcaccgaggugcccguggccauccacgccgaccagcugacccccaccuggcggguguacagcaccggcagcaacguguuccagacccgggccggcugccugaucggcgccgagcacgugaacaacuccuacgagugcgacauccccaucggcgcuggcaucugcgccagcuaccagacccagaccaacagcccccggcgggcccggagcguggccagccagagcaucaucgccuacaccaugagcuuaggcgccgagaacagcguggccuacagcaacaacagcaucgcgaucccuaccaacuucaccaucagcgugaccaccgagauacugcccgugagcaugaccaagaccagcguggacuguaccauguacaucugcggcgacagcaccgagugcagcaaccugcugcugcaguacggcagcuucugcacccagcugaaccgggcccugaccggcaucgccguggagcaggacaagaacacccaagagguguucgcccaggugaagcagaucuacaagacucccccaaucaaggacuucggcggcuucaacuucagccagauccugcccgaccccagcaagcccagcaagcggagcuucaucgaggaccugcuguucaacaaggugacccuggccgacgccggcuucaucaagcaguacggcgacugccugggggauaucgccgcucgggaccugaucugcgcccagaaguucaacggccugaccgugcugcccccucugcugaccgacgagaugaucgcccaguacaccagcgcccugcuugccggcaccaucaccagcggcuggaccuucggcgccggcgcagcccugcagauccccuucgccaugcagauggccuaccgguucaacggcaucggcgugacccagaacgugcuguacgagaaccagaagcugaucgccaaccaguucaacagcgccaucggcaagauccaggacagccugagcagcaccgccagcgcccugggcaagcugcaggacguggugaaccagaacgcucaggcccugaacacccuggugaagcagcugagcagcaacuucggcgccaucagcucagugcugaaugacauccugagcaggcuggaucccccagaggccgaggugcagaucgaccggcugaucaccggccggcugcagagccugcagaccuacgugacccagcagcugauccgggccgccgagauccgggccagcgccaaccuggcagccaccaagaugagcgagugcgugcugggccagagcaagcggguggacuuuugcggcaagggcuaccaccugaugagcuucccccagagcgcuccccacggcgugguguuccuccacgugacauacguccccgcccaggagaagaacuucaccaccgcccccgccauuugccacgacggcaaggcccacuucccccgggagggaguguucgugagcaacggcacccacugguucgugacccagcggaacuucuacgagccucagaucaucaccaccgacaacaccuucgugagcggcaacugcgacguggugaucggcaucgugaacaacaccguguacgacccccugcagcccgagcuggacagcuucaaggaggagcuggacaaguacuucaagaaccacaccagcccagacguggaccugggcgacaucagcggcaucaacgccagcguggugaacauccagaaggagaucgaccggcugaacgagguggccaagaaccugaacgagagccugaucgaccugcaggagcugggcaaguacgagcaguacaucaaguggcccugguacaucuggcugggcuucaucgccggccugaucgccaucgugaucgugaccaucaugcugugcugcaugaccagcugcuguagcugccugaagggcugcugcagcugcggcagcugcugcaaguucgacgaggacgacagcgagcccgugcugaagggcgugaagcugcacuacaccugaggacuaguuauaagacugacuagcccgaugggccucccaacgggcccuccuccccuccuugcaccgagauuaaucaaaggcucuuuucagagccaccaaaaaaaaaaaaaaaaaaaaaaaaaaaaaaaaaaaaaaaaaaaaaaaaaaaaaaaaaaaaaaaaaaaaaaaaaaaaaaaaaaaaaaaaaaaaaaaaaaaaa

SEQ ID NO: 24241 - RNA, 4029 nt, Artificial Sequence
  SARS-CoV-2/Wuhan/WIV05/2019__EPI_ISL_402128 spike protein mRNA gc (1-1273)(K986P_V987P_H69del_V70del_A222V_Y453F_S477N_D614G_I692V)
aggagaaagcuuaccauguucguguuccuggugcugcugccccuggugagcagccagugcgugaaccugaccacccggacccagcugcccccugccuacaccaacagcuucacccggggcguguacuaccccgacaagguguuccggagcagcgugcugcacagcacccaggaccuguuccugcccuucuucagcaacgugaccugguuccacgccaucagcggcaccaacggcaccaagcgguucgacaacccagugcugcccuucaacgacggcguguacuucgccagcaccgagaagucaaacaucauccggggcuggaucuucggcaccacccuggacagcaagacacagagccugcugaucgugaacaacgccaccaacguggugaucaaggugugcgaguuucaguucugcaacgaccccuuccugggcguguacuaccacaagaacaacaagagcuggauggagagcgaguuccggguguacagcagcgcuaacaauugcaccuucgaguacgucagccagcccuuccugauggaccucgagggcaagcagggcaacuucaagaaccugcgggaguucguguucaagaacaucgauggcuacuucaagaucuacagcaagcacacccccaucaaccuggugcgggaccugccccagggauucagcgugcuggagccucugguggaccugcccaucggcaucaacaucaccagguuccagacccugcuggcccugcaccggagcuaccugacccccggcgacagcagcagcggcuggaccgccggcgccgccgccuacuacgugggcuaccugcagccacggaccuuccugcugaaguacaacgagaacggcaccaucaccgacgcaguggacugcgcccuggacccccugagcgagaccaagugcacccuaaagagcuucaccguggagaagggcaucuaccagaccagcaacuuccgggugcagcccacugagagcaucgugcgguuccccaacauuaccaaccugugucccuucggcgagguguucaacgccacccgguucgccagcguguacgccuggaaccggaagcggaucagcaacugcguggccgacuacagcgugcuguacaacagcgccagcuucagcaccuucaagugcuacggcgugagcccuaccaagcugaacgaccugugcuucaccaacguguacgccgacagcuucgugauccggggcgacgaggugcggcagaucgcucccggccagaccggcaagaucgccgacuacaacuacaagcugcccgacgacuucaccggcugcgugaucgccuggaacagcaacaaccuggacagcaaggugggcggcaacuacaacuaccuguuccggcuguuccguaagagcaaccugaagccauuugagcgggacaucagcaccgagaucuaccaggccggcaacacccccugcaacgguguggagggcuucaacugcuacuucccccugcagagcuacggcuuccagcccaccaacggcgugggcuaccagcccuaccgggugguggugcugagcuucgagcugcugcacgcccccgccaccgugugcggcccuaaaaagagcaccaaccuggugaagaacaagugcgugaauuucaacuucaacggccugaccggcaccggcgugcugaccgagagcaacaagaaguuccugcccuuccagcaguucggccgggauaucgccgacaccaccgacgccgugcgggacccccagacccuggagauccuggacaucaccccaugcagcuucggcggcgugagcgucaucacccccggcacaaacaccagcaaccagguggcagugcuguaccagggagugaacugcaccgaggugcccguggccauccacgccgaccagcugacccccaccuggcggguguacagcaccggcagcaacguguuccagacccgggccggcugccugaucggcgccgagcacgugaacaacagcuacgagugcgacauccccaucggcgccggcaucugcgcuuccuaccagacccagaccaacagcccccggcgggcccggagcguggccagccagagcgugaucgccuacaccaugagcuuaggcgccgagaacagcguggccuacagcaacaacagcaucgccaucccuaccaacuucaccaucagcgugaccaccgagauccugcccgugagcaugaccaagaccagcguggacuguaccauguacauaugcggcgacagcaccgagugcagcaaccugcugcugcaguacggcagcuucugcacccagcugaaccgggcgcugaccggcaucgccguggagcaggacaagaacacccaagagguguucgcccaggugaagcagaucuacaagacucccccaaucaaggacuucggcggcuucaacuucagccagauccugcccgaccccagcaagcccagcaagcggagcuucaucgaggaccugcuguucaacaaggugacccuggccgacgccggcuucaucaagcaguacggcgacugccugggggauaucgccgcccgggaccugaucugcgcucagaaguucaacggccugaccgugcugcccccucugcugaccgacgagaugaucgcccaguacaccagcgcccugcuugccggcaccaucaccagcggcuggaccuucggcgccggcgccgcacugcagauccccuucgccaugcagauggccuaccgguucaacggcaucggcgugacccagaacgugcuguacgagaaccagaagcugaucgccaaccaguucaacagcgccaucggcaagauccaggacagccugagcagcaccgccagcgcccugggcaagcugcaggacguggugaaccagaacgcccaggcucugaacacccuggugaagcagcugagcagcaauuuuggcgccaucagcagcgugcugaacgacauccugucaaggcuggaucccccagaggccgaggugcagaucgaccggcugaucaccggccggcugcagagccugcagaccuacgugacccagcagcugauccgggccgccgagauccgggccagcgccaaccuggccgcaaccaagaugagcgagugcgugcugggccagagcaagcggguggacuucugcggcaagggcuaccaccugaugagcuucccccagagcgcuccccacggcgugguguuccuccacgucacauacgugcccgcccaggagaagaacuucaccaccgcccccgccaucugccacgacggcaaggcccacuucccccgggagggaguguucgugagcaacggcacccacugguucgugacccagcggaacuucuacgagccucagauuaucaccaccgacaacaccuucgugagcggcaacugcgacguggugaucggcaucgugaacaacaccguguacgacccccugcagcccgagcuggacagcuucaaggaggagcuggacaaguacuucaagaaccacaccagcccagacguggaccugggcgacaucagcggcaucaacgccagcguggugaacauccagaaggagaucgaccggcugaacgagguggccaagaaccugaacgagagccugaucgaccugcaggagcugggcaaguacgagcaguacaucaaguggcccugguacaucuggcugggcuucaucgccggccugaucgccaucgugauggugaccaucaugcugugcugcaugaccagcugcuguagcugccugaagggcugcugcagcugcggcagcugcugcaaguucgacgaggacgacagcgagcccgugcugaagggcgugaagcugcacuacaccugaggacuaguuauaagacugacuagcccgaugggccucccaacgggcccuccuccccuccuugcaccgagauuaaucaaaggcucuuuucagagccaccaaaaaaaaaaaaaaaaaaaaaaaaaaaaaaaaaaaaaaaaaaaaaaaaaaaaaaaaaaaaaaaaaaaaaaaaaaaaaaaaaaaaaaaaaaaaaaaaaaaaa

SEQ ID NO: 24242 - RNA, 4029 nt, Artificial Sequence
  SARS-CoV-2/Wuhan/WIV05/2019__EPI_ISL_402128 spike protein mRNA gc (1-1273)(K986P_V987P_H69del_V70del_Y453F_D614G_I692V_M1229I)
aggagaaagcuuaccauguucguguuccuggugcugcugccccuggugagcagccagugcgugaaccugaccacccggacccagcugcccccugccuacaccaacagcuucacccggggcguguacuaccccgacaagguguuccggagcagcgugcugcacagcacccaggaccuguuccugcccuucuucagcaacgugaccugguuccacgccaucagcggcaccaacggcaccaagcgguucgacaacccagugcugcccuucaacgacggcguguacuucgccagcaccgagaagucaaacaucauccggggcuggaucuucggcaccacccuggacagcaagacacagagccugcugaucgugaacaacgccaccaacguggugaucaaggugugcgaguuucaguucugcaacgaccccuuccugggcguguacuaccacaagaacaacaagagcuggauggagagcgaguuccggguguacagcagcgcuaacaauugcaccuucgaguacgucagccagcccuuccugauggaccucgagggcaagcagggcaacuucaagaaccugcgggaguucguguucaagaacaucgauggcuacuucaagaucuacagcaagcacacccccaucaaccuggugcgggaccugccccagggauucagcgcccuggagccucugguggaccugcccaucggcaucaacaucaccagguuccagacccugcuggcccugcaccggagcuaccugacccccggcgacagcagcagcggcuggaccgccggcgccgccgcauacuacgugggcuaccugcagccacggaccuuccugcugaaguacaacgagaacggcaccaucaccgacgccguggacugcgcccuggacccccugagcgagaccaagugcacccuaaagagcuucaccguggagaagggcaucuaccagaccagcaacuuccgggugcagcccacugagagcaucgugcgguuccccaacauuaccaaccugugucccuucggcgagguguucaacgccacccgguucgccagcguguacgccuggaaccggaagcggaucagcaacugcguggccgacuacagcgugcuguacaacagcgccagcuucagcaccuucaagugcuacggcgugagcccuaccaagcugaacgaccugugcuucaccaacguguacgcugacagcuucgugauccggggcgacgaggugcggcagaucgcccccggccagaccggcaagaucgccgacuacaacuacaagcugcccgacgacuucaccggcugcgugaucgccuggaacagcaacaaccuggacagcaaggugggcggcaacuacaacuaccuguuccggcuguuccguaagagcaaccugaagccauuugagcgggacaucagcaccgagaucuaccaggccggcagcacccccugcaacgguguggagggcuucaacugcuacuucccccugcagagcuacggcuuccagcccaccaacggcgugggcuaccagcccuaccgggugguggugcugagcuucgagcugcugcacgcccccgccaccgugugcggcccuaaaaagagcaccaaccuggugaagaacaagugcgugaacuucaauuucaacggccugaccggcaccggcgugcugaccgagagcaacaagaaguuccugcccuuccagcaguucggccgggauaucgccgacaccaccgacgcagugcgggacccccagacccuggagauccuggacaucaccccaugcagcuucggcggcgugagcgugaucacccccggcacaaacaccagcaaccaggucgccgugcuguaccagggagugaacugcaccgaggugcccguggccauccacgccgaccagcugacccccaccuggcggguguacagcaccggcagcaacguguuccagacccgggccggcugccugaucggcgccgagcacgugaacaacuccuacgagugcgacauccccaucggcgcuggcaucugcgccagcuaccagacccagaccaacagcccccggcgggcccggagcguggccagccagagcgugaucgccuacaccaugagcuuaggcgccgagaacagcguggccuacagcaacaacagcaucgcgaucccuaccaacuucaccaucagcgugaccaccgagauccugcccgugagcaugaccaagaccagcguggacuguaccauguacauaugcggcgacagcaccgagugcagcaaccugcugcugcaguacggcagcuucugcacccagcugaaccgggcccugaccggcaucgccguggagcaggacaagaacacccaagagguguucgcccaggugaagcagaucuacaagacucccccaaucaaggacuucggcggcuucaacuucagccagauccugcccgaccccagcaagcccagcaagcggagcuucaucgaggaccugcuguucaacaaggugacccuggccgacgccggcuucaucaagcaguacggcgacugccugggggauaucgccgcucgggaccugaucugcgcccagaaguucaacggccugaccgugcugcccccucugcugaccgacgagaugaucgcccaguacaccagcgcccugcuugccggcaccaucaccagcggcuggaccuucggcgccggcgcagcccugcagauccccuucgccaugcagauggccuaccgguucaacggcaucggcgugacccagaacgugcuguacgagaaccagaagcugaucgccaaccaguucaacagcgccaucggcaagauccaggacagccugagcagcaccgccagcgcccugggcaagcugcaggacguggugaaccagaacgcucaggcccugaacacccuggugaagcagcugagcagcaacuuuggcgccaucagcucagugcugaaugacauccugagcaggcuggaucccccagaggccgaggugcagaucgaccggcugaucaccggccggcugcagagccugcagaccuacgugacccagcagcugauccgggccgccgagauccgggccagcgccaaccuggcagccaccaagaugagcgagugcgugcugggccagagcaagcggguggacuucugcggcaagggcuaccaccugaugagcuucccccagagcgcuccccacggcgugguguuccuccacgugacauacguccccgcccaggagaagaacuucaccaccgcccccgccaucugccacgacggcaaggcccacuucccccgggagggaguguucgugagcaacggcacccacugguucgugacccagcggaacuucuacgagccucagauuaucaccaccgacaacaccuucgugagcggcaacugcgacguggugaucggcaucgugaacaacaccguguacgacccccugcagcccgagcuggacagcuucaaggaggagcuggacaaguacuucaagaaccacaccagcccagacguggaccugggcgacaucagcggcaucaacgccagcguggugaacauccagaaggagaucgaccggcugaacgagguggccaagaaccugaacgagagccugaucgaccugcaggagcugggcaaguacgagcaguacaucaaguggcccugguacaucuggcugggcuucaucgccggccugaucgccaucgugaucgugaccaucaugcugugcugcaugaccagcugcuguagcugccugaagggcugcugcagcugcggcagcugcugcaaguucgacgaggacgacagcgagcccgugcugaagggcgugaagcugcacuacaccugaggacuaguuauaagacugacuagcccgaugggccucccaacgggcccuccuccccuccuugcaccgagauuaaucaaaggcucuuuucagagccaccaaaaaaaaaaaaaaaaaaaaaaaaaaaaaaaaaaaaaaaaaaaaaaaaaaaaaaaaaaaaaaaaaaaaaaaaaaaaaaaaaaaaaaaaaaaaaaaaaaaaa

SEQ ID NO: 24243 - RNA, 4026 nt, Artificial Sequence
  SARS-CoV-2/Wuhan/WIV05/2019__EPI_ISL_402128 spike protein mRNA gc (1-1273)(K986P_V987P_K986P_V987P_H69del_V70del_Y144del_N501Y_A570 D_D614G_P681H_T716I_S982A_D1118H)
aggagaaagcuuaccauguucguguuccuggugcugcugccccuggugagcagccagugcgugaaccugaccacccggacccagcugcccccugccuacaccaacagcuucacccggggcguguacuaccccgacaagguguuccggagcagcgugcugcacagcacccaggaccuguuccugcccuucuucagcaacgugaccugguuccacgccaucagcggcaccaacggcaccaagcgguucgacaacccagugcugcccuucaacgacggcguguacuucgccagcaccgagaagucaaacaucauccggggcuggaucuucggcaccacccuggacagcaagacacagagccugcugaucgugaacaacgccaccaacguggugaucaaggugugcgaguuucaguucugcaacgaccccuuccugggcguguaccacaagaacaacaagagcuggauggagagcgaguuccggguguacagcagcgcuaacaauugcaccuucgaguacgucagccagcccuuccugauggaccucgagggcaagcagggcaacuucaagaaccugcgggaguucguguucaagaacaucgauggcuacuucaagaucuacagcaagcacacccccaucaaccuggugcgggaccugccccagggauucagcgcccuggagccucugguggaccugcccaucggcaucaacaucaccagguuccagacccugcuggcccugcaccggagcuaccugacccccggcgacagcagcagcggcuggaccgccggcgccgccgcauacuacgugggcuaccugcagccacggaccuuccugcugaaguacaacgagaacggcaccaucaccgacgccguggacugcgcccuggacccccugagcgagaccaagugcacccuaaagagcuucaccguggagaagggcaucuaccagaccagcaacuuccgggugcagcccacugagagcaucgugcgguuccccaacauuaccaaccugugucccuucggcgagguguucaacgccacccgguucgccagcguguacgccuggaaccggaagcggaucagcaacugcguggccgacuacagcgugcuguacaacagcgccagcuucagcaccuucaagugcuacggcgugagcccuaccaagcugaacgaccugugcuucaccaacguguacgcugacagcuucgugauccggggcgacgaggugcggcagaucgcccccggccagaccggcaagaucgccgacuacaacuacaagcugcccgacgacuucaccggcugcgugaucgccuggaacagcaacaaccuggacagcaaggugggcggcaacuacaacuaccuguaccggcuguuccguaagagcaaccugaagccauucgagcgggacaucagcaccgagaucuaccaggccggcagcacccccugcaacgguguggagggcuuuaacugcuacuucccccugcagagcuacggcuuccagcccaccuacggcgugggcuaccagcccuaccgggugguggugcugagcuucgagcugcugcacgcccccgccaccgugugcggcccuaaaaagagcaccaaccuggugaagaacaagugcgugaacuucaacuucaauggccugaccggcaccggcgugcugaccgagagcaacaagaaguuccugcccuuccagcaguucggccgggauaucgacgacaccaccgacgccgugcgggacccccagacccuggagauccuggacaucaccccaugcagcuucggcggcgugagcgugaucacccccggcacaaacaccagcaaccaggucgcagugcuguaccagggagugaacugcaccgaggugcccguggccauccacgccgaccagcugacccccaccuggcggguguacagcaccggcagcaacguguuccagacccgggccggcugccugaucggcgccgagcacgugaacaacuccuacgagugcgacauccccaucggcgccggcaucugcgcuagcuaccagacccagaccaacagccaccggcgggcccggagcguggccagccagagcaucaucgccuacaccaugagcuuaggcgccgagaacagcguggccuacagcaacaacagcaucgccauccccaucaacuucaccauaagcgugaccaccgagauccugccugugagcaugaccaagaccagcguggacuguaccauguacaucugcggcgacagcaccgagugcagcaaccugcugcugcaguacggcagcuucugcacccagcugaaccgggcgcugaccggcaucgccguggagcaggacaagaacacccaagagguguucgcccaggugaagcagaucuacaagaccccacccaucaaggacuucggcggcuucaacuucagccagauccugcccgaccccagcaagcccagcaagcggagcuucaucgaggaccugcuguucaacaaggugacucuggccgacgccggcuucaucaagcaguacggcgauugccugggggacaucgccgcccgggaccugaucugcgcucagaaguucaacggccugaccgugcugccuccccugcugaccgacgagaugaucgcccaguacaccagcgcccugcuugccggcaccaucaccagcggcuggaccuucggcgccggcgccgcacugcagauccccuucgccaugcagauggccuaccgguucaacggcaucggcgugacccagaacgugcuguacgagaaccagaagcugaucgccaaccaguucaacagcgccaucggcaagauccaggacagccugagcagcaccgccagcgcccugggcaagcugcaggacguggugaaccagaacgcccaggcucugaacacccuggugaagcagcugagcagcaacuucggcgccaucagcucagugcugaacgacauccuggccaggcuggacccacccgaggccgaggugcagaucgaccggcugaucaccggccggcugcagagccugcagaccuacgugacccagcagcugauccgggccgccgagauucgggccagcgccaaucuggcagccaccaagaugagcgagugcgugcugggccagagcaagcggguggacuuuugcggcaagggcuaccaccugaugagcuucccccagagcgcuccccacggcgugguguuccuccacgugaccuacgugcccgcccaggagaagaacuucacaaccgcccccgccaucugccacgacggcaaggcccacuucccccgggagggagucuucgugagcaacggcacccacugguucgugacccagcggaacuucuacgagccccagaucaucaccacccacaacaccuucgugagcggcaacugcgacguggugaucggcaucgugaacaacaccguguacgacccucugcagcccgagcuggacagcuucaaggaggagcuggacaaguacuucaagaaccacaccagccccgacguggaucugggcgacaucagcggcaucaacgccagcguggugaacauccagaaggagaucgaccggcugaacgagguggccaagaaccugaacgagagccugaucgaccugcaggagcugggcaaguacgagcaguacaucaaguggccaugguacaucuggcugggcuucaucgccggccugaucgccaucgugauggugaccaucaugcugugcugcaugaccagcugcuguagcugccugaagggcugcugcagcugcggcagcugcugcaaguucgacgaggacgacagcgagcccgugcugaagggcgugaagcugcacuacaccugaggacuaguuauaagacugacuagcccgaugggccucccaacgggcccuccuccccuccuugcaccgagauuaaucaaaggcucuuuucagagccaccaaaaaaaaaaaaaaaaaaaaaaaaaaaaaaaaaaaaaaaaaaaaaaaaaaaaaaaaaaaaaaaaaaaaaaaaaaaaaaaaaaaaaaaaaaaaaaaaaaaaa

SEQ ID NO: 24244 - RNA, 4035 nt, Artificial Sequence
  SARS-CoV-2/Wuhan/WIV05/2019__EPI_ISL_402128 spike protein mRNA gc (1-1273)(K986P_V987P_K986P_V987P_K417N_E484K_N501Y_D614G)
aggagaaagcuuaccauguucguguuccuggugcugcugccccuggugagcagccagugcgugaaccugaccacccggacccagcugcccccugccuacaccaacagcuucacccggggcguguacuaccccgacaagguguuccggagcagcgugcugcacagcacccaggaccuguuccugcccuucuucagcaacgugaccugguuccacgccauccacgugagcggcaccaacggcaccaagcgguucgacaacccagugcugcccuucaacgacggcguguacuucgccagcaccgagaagucaaacaucauccggggcuggaucuucggcaccacccuggacagcaagacacagagccugcugaucgugaacaacgccaccaacguggugaucaaggugugcgaguuucaguucugcaacgaccccuuccugggcguguacuaccacaagaacaacaagagcuggauggagagcgaguuccgggucuacagcagcgcuaacaauugcaccuucgaguacgugagccagcccuuccugauggaccucgagggcaagcagggcaacuucaagaaccugcgggaguucguguucaagaacaucgauggcuacuucaagaucuacagcaagcacacccccaucaaccuggugcgggaccugccccagggauucagcgcccuggagccucugguggaccugcccaucggcaucaacaucaccagguuccagacccugcuggcccugcaccggagcuaccugacccccggcgacagcagcagcggcuggaccgccggcgccgccgcauacuacgugggcuaccugcagccacggaccuuccugcugaaguacaacgagaacggcaccaucaccgacgccguggacugcgcccuggacccccugagcgagaccaagugcacccuaaagagcuucaccguggagaagggcaucuaccagaccagcaacuuccgggugcagcccacugagagcaucgugcgguuccccaacauuaccaaccugugucccuucggcgagguguucaacgccacccgguucgccagcguguacgccuggaaccggaagcggaucagcaacugcguggccgacuacagcgugcuguacaacagcgccagcuucagcaccuucaagugcuacggcgugagcccuaccaagcugaacgaccugugcuucaccaacguguacgcugacagcuucgugauccggggcgacgaggugcggcagaucgcccccggccagaccggcaacaucgccgacuacaacuacaagcugcccgacgacuucaccggcugcgugaucgccuggaacagcaacaaccuggacagcaaggugggcggcaacuacaacuaccuguaccggcuguuccguaagagcaaccugaagccauucgagcgggacaucagcaccgagaucuaccaggccggcagcacccccugcaacggugugaagggcuuuaacugcuacuucccccugcagagcuacggcuuccagcccaccuacggcgugggcuaccagcccuaccgggugguggugcugagcuucgagcugcugcacgcccccgccaccgugugcggcccuaaaaagagcaccaaccuggugaagaacaagugcgugaacuucaauuucaacggccugaccggcaccggcgugcugaccgagagcaacaagaaguuccugcccuuccagcaguucggccgggauaucgccgacaccaccgacgcagugcgggacccccagacccuggagauccuggacaucaccccaugcagcuucggcggcgugagcgucaucacccccggcacaaacaccagcaaccagguggccgugcuguaccagggagugaacugcaccgaggugcccguggccauccacgccgaccagcugacccccaccuggcggguguacagcaccggcagcaacguguuccagacccgggccggcugccugaucggcgccgagcacgugaacaacuccuacgagugcgacauccccaucggcgcuggcaucugcgccagcuaccagacccagaccaacagcccccggcgggcccggagcguggccagccagagcaucaucgccuacaccaugagcuuaggcgccgagaacagcguggccuacagcaacaacagcaucgcgaucccuaccaacuucaccaucagcgugaccaccgagauacugcccgugagcaugaccaagaccagcguggacuguaccauguacaucugcggcgacagcaccgagugcagcaaccugcugcugcaguacggcagcuucugcacccagcugaaccgggcccugaccggcaucgccguggagcaggacaagaacacccaagagguguucgcccaggugaagcagaucuacaagacucccccaaucaaggacuucggcggcuucaacuucagccagauccugcccgaccccagcaagcccagcaagcggagcuucaucgaggaccugcuguucaacaaggugacccuggccgacgccggcuucaucaagcaguacggcgacugccugggggauaucgccgcucgggaccugaucugcgcccagaaguucaacggccugaccgugcugcccccucugcugaccgacgagaugaucgcccaguacaccagcgcccugcuugccggcaccaucaccagcggcuggaccuucggcgccggcgcagcccugcagauccccuucgccaugcagauggccuaccgguucaacggcaucggcgugacccagaacgugcuguacgagaaccagaagcugaucgccaaccaguucaacagcgccaucggcaagauccaggacagccugagcagcaccgccagcgcccugggcaagcugcaggacguggugaaccagaacgcucaggcccugaacacccuggugaagcagcugagcagcaacuucggcgccaucagcucagugcugaaugacauccugagcaggcuggaucccccagaggccgaggugcagaucgaccggcugaucaccggccggcugcagagccugcagaccuacgugacccagcagcugauccgggccgccgagauccgggccagcgccaaccuggcagccaccaagaugagcgagugcgugcugggccagagcaagcggguggacuuuugcggcaagggcuaccaccugaugagcuucccccagagcgcuccccacggcgugguguuccuccacgugacauacguccccgcccaggagaagaacuucaccaccgcccccgccauuugccacgacggcaaggcccacuucccccgggagggaguguucgugagcaacggcacccacugguucgugacccagcggaacuucuacgagccucagaucaucaccaccgacaacaccuucgugagcggcaacugcgacguggugaucggcaucgugaacaacaccguguacgacccccugcagcccgagcuggacagcuucaaggaggagcuggacaaguacuucaagaaccacaccagcccagacguggaccugggcgacaucagcggcaucaacgccagcguggugaacauccagaaggagaucgaccggcugaacgagguggccaagaaccugaacgagagccugaucgaccugcaggagcugggcaaguacgagcaguacaucaaguggcccugguacaucuggcugggcuucaucgccggccugaucgccaucgugauggugaccaucaugcugugcugcaugaccagcugcuguagcugccugaagggcugcugcagcugcggcagcugcugcaaguucgacgaggacgacagcgagcccgugcugaagggcgugaagcugcacuacaccugaggacuaguuauaagacugacuagcccgaugggccucccaacgggcccuccuccccuccuugcaccgagauuaaucaaaggcucuuuucagagccaccaaaaaaaaaaaaaaaaaaaaaaaaaaaaaaaaaaaaaaaaaaaaaaaaaaaaaaaaaaaaaaaaaaaaaaaaaaaaaaaaaaaaaaaaaaaaaaaaaaaaa

SEQ ID NO: 24245 - RNA, 4026 nt, Artificial Sequence
  SARS-CoV-2/Wuhan/WIV05/2019__EPI_ISL_402128 spike protein mRNA gc (1-1273)(K986P_V987P_K986P_V987P_L18F_D80A_D215G_L242del_A243del_ L244del_R246I_K417N_E484K_N501Y_D614G_A701V)
aggagaaagcuuaccauguucguguuccuggugcugcugccccuggugagcagccagugcgugaacuucaccacccggacccagcugcccccugccuacaccaacagcuucacccggggcguguacuaccccgacaagguguuccggagcagcgugcugcacagcacccaggaccuguuccugcccuucuucagcaacgugaccugguuccacgccauccacgugagcggcaccaacggcaccaagcgguucgccaacccagugcugcccuucaacgacggcguguacuucgccagcaccgagaagucaaacaucauccggggcuggaucuuuggcaccacccuggacagcaagacacagagccugcugaucgugaacaacgcuaccaacguggugaucaaggugugcgaguuccaguucugcaacgaccccuuccugggcguguacuaccacaagaacaacaagagcuggauggagagcgaguuccgggucuacagcagcgccaacaauugcaccuucgaguacgugagccagcccuuccugauggaccuggagggcaagcagggcaacuucaagaaccuccgggaguucguguucaagaacaucgacggcuacuucaagaucuacagcaagcacacccccaucaaccuggugcggggacugccccagggcuucagcgcccuggagccucugguggaucugcccaucggcaucaacaucaccagguuccagacccugcacaucagcuaccugacccccggcgacagcagcagcggcuggaccgccggcgccgccgcauacuacgugggcuaccugcagccacggaccuuccugcugaaguacaacgagaacggcaccaucaccgacgccguggacugcgcccuggacccccugagcgagaccaagugcacccuuaagagcuucaccguggagaagggcaucuaccagaccagcaacuuccgggugcagcccacugagagcauugugcgguuccccaacaucaccaaccugugucccuucggcgagguguucaacgccacccgguucgccagcguguacgccuggaaccggaagcggaucagcaacugcguggccgacuacagcgugcuguacaacagcgccagcuucagcaccuucaagugcuacggcgugagcccuaccaagcugaacgaccugugcuucaccaacguguacgcugacagcuucgugauccggggcgacgaggugcggcagaucgcccccggccagaccggcaacaucgccgacuacaacuacaagcugcccgacgacuucaccggcugcgugaucgccuggaacagcaacaaccuggacagcaaggugggcggcaacuacaacuaccuguaccggcuauuccguaagagcaaccugaagccauuugagcgggacaucagcaccgagaucuaccaggccgguagcacccccugcaacggcgugaagggcuucaacugcuacuucccccugcagagcuacggcuuccagcccaccuacggcgugggcuaccagcccuaccgggugguggugcugagcuucgagcugcugcacgcccccgccaccgugugcggcccuaaaaagagcaccaaccuggugaagaacaagugcgugaacuucaauuucaacggccugaccggcaccggcgugcugaccgagagcaacaagaaguuccugcccuuccagcaguucggccgggacaucgccgacaccaccgaugcagugcgggacccccagacccuggagauccuggacaucaccccaugcagcuucggcggcgugagcgucaucacccccggaacaaacaccagcaaccagguggccgugcuguaccagggcgugaacugcaccgaggugcccguggccauccacgccgaccagcugacccccaccuggcggguguacagcaccggcagcaacguguuccagacccgggccggcugccugaucggcgccgagcacgugaacaacuccuacgagugcgacauccccaucggcgcuggcaucugcgccagcuaccagacccagaccaacagcccccggcgggcccggagcguggccagccagagcaucaucgccuacaccaugagccugggcguggagaacagcguggccuacagcaacaacagcaucgccaucccuaccaacuucaccauaagcgugaccaccgagauccugcccgugagcaugaccaagaccagcguggacuguaccauguacaucugcggcgacagcaccgagugcagcaaccuguuacugcaguacggcagcuucugcacccagcugaaccgggcgcugaccggcaucgccguggagcaggacaagaacacccaagagguguucgcccaggugaagcagaucuacaagacucccccaaucaaggacuucggcggcuucaacuucagccagauccugcccgaccccagcaagcccagcaagcggagcuucaucgaggaccugcuguucaacaaggugacccuggccgacgccggcuucaucaagcaguacggggacugccugggcgacaucgccgcccgggaccugaucugcgcucagaaguucaacggccugaccgugcugcccccucugcugaccgaugagaugaucgcccaguacaccagcgcccugcuggccggcaccaucaccagcggcuggaccuucggcgccggcgccgcacugcagauccccuucgccaugcagauggccuaccgguucaacggcaucggcgugacccagaacgugcuguacgagaaccagaagcugaucgccaaccaguucaacagcgccaucggcaagauccaggacagccugagcagcaccgccagcgcccugggcaagcugcaggacguggugaaccagaacgcccaggcucugaacacccuggugaagcagcugagcagcaacuuuggcgccaucagcucagugcugaaugacauccugagccggcuggaucccccagaggccgaggugcagaucgacaggcugaucaccggccggcugcagagccugcagaccuacgugacccagcagcugauccgggccgccgagauucgggccagcgccaaccuggccgcaaccaagaugagcgagugcgugcugggccagagcaagcggguggacuucugcggcaagggcuaccaccugaugagcuucccccagagcgcuccccacggcgugguguuccugcacgucacauacgugcccgcccaggagaagaacuucaccaccgcccccgccaucugccacgacggaaaggcccacuucccccgggagggcguguucgugagcaacggcacccacugguucgugacccagcggaacuucuacgagccucagaucaucaccaccgacaacaccuucgugagcggcaacugcgacguggugaucggcaucgugaacaacaccguguacgacccccugcagcccgagcuggacagcuucaaggaggagcucgacaaguacuucaagaaccacaccagcccagacguggaccugggcgacaucagcggcaucaacgccagcguggugaacauccagaaggagaucgaccggcugaacgagguggccaagaaccugaacgagagccugaucgaccugcaggagcugggcaaguacgagcaguacaucaaguggcccugguacaucuggcugggcuucaucgccggccugaucgccaucgugauggugaccaucaugcugugcugcaugaccagcugcuguagcugccugaagggcugcugcagcugcggcagcugcugcaaguucgacgaggacgacagcgagcccgugcugaagggcgugaagcugcacuacaccugaggacuaguuauaagacugacuagcccgaugggccucccaacgggcccuccuccccuccuugcaccgagauuaaucaaaggcucuuuucagagccaccaaaaaaaaaaaaaaaaaaaaaaaaaaaaaaaaaaaaaaaaaaaaaaaaaaaaaaaaaaaaaaaaaaaaaaaaaaaaaaaaaaaaaaaaaaaaaaaaaaaaa

SEQ ID NO: 24246 - RNA, 4035 nt, Artificial Sequence
  SARS-CoV-2/Wuhan/WIV05/2019__EPI_ISL_402128 spike protein mRNA gc (1-1273)(K986P_V987P_K986P_V987P_E484K_D614G)
aggagaaagcuuaccauguucguguuccuggugcugcugccccuggugagcagccagugcgugaaccugaccacccggacccagcugcccccugccuacaccaacagcuucacccggggcguguacuaccccgacaagguguuccggagcagcgugcugcacagcacccaggaccuguuccugcccuucuucagcaacgugaccugguuccacgccauccacgugagcggcaccaacggcaccaagcgguucgacaacccagugcugcccuucaacgacggcguguacuucgccagcaccgagaagucaaacaucauccggggcuggaucuucggcaccacccuggacagcaagacacagagccugcugaucgugaacaacgccaccaacguggugaucaaggugugcgaguuucaguucugcaacgaccccuuccugggcguguacuaccacaagaacaacaagagcuggauggagagcgaguuccgggucuacagcagcgcuaacaauugcaccuucgaguacgugagccagcccuuccugauggaccucgagggcaagcagggcaacuucaagaaccugcgggaguucguguucaagaacaucgauggcuacuucaagaucuacagcaagcacacccccaucaaccuggugcgggaccugccccagggauucagcgcccuggagccucugguggaccugcccaucggcaucaacaucaccagguuccagacccugcuggcccugcaccggagcuaccugacccccggcgacagcagcagcggcuggaccgccggcgccgccgcauacuacgugggcuaccugcagccacggaccuuccugcugaaguacaacgagaacggcaccaucaccgacgccguggacugcgcccuggacccccugagcgagaccaagugcacccuaaagagcuucaccguggagaagggcaucuaccagaccagcaacuuccgggugcagcccacugagagcaucgugcgguuccccaacauuaccaaccugugucccuucggcgagguguucaacgccacccgguucgccagcguguacgccuggaaccggaagcggaucagcaacugcguggccgacuacagcgugcuguacaacagcgccagcuucagcaccuucaagugcuacggcgugagcccuaccaagcugaacgaccugugcuucaccaacguguacgcugacagcuucgugauccggggcgacgaggugcggcagaucgcccccggccagaccggcaagaucgccgacuacaacuacaagcugcccgacgacuucaccggcugcgugaucgccuggaacagcaacaaccuggacagcaaggugggcggcaacuacaacuaccuguaccggcuguuccguaagagcaaccugaagccauucgagcgggacaucagcaccgagaucuaccaggccggcagcacccccugcaacggugugaagggcuuuaacugcuacuucccccugcagagcuacggcuuccagcccaccaacggcgugggcuaccagcccuaccgggugguggugcugagcuucgagcugcugcacgcccccgccaccgugugcggcccuaaaaagagcaccaaccuggugaagaacaagugcgugaacuucaauuucaacggccugaccggcaccggcgugcugaccgagagcaacaagaaguuccugcccuuccagcaguucggccgggauaucgccgacaccaccgacgcagugcgggacccccagacccuggagauccuggacaucaccccaugcagcuucggcggcgugagcgucaucacccccggcacaaacaccagcaaccagguggccgugcuguaccagggagugaacugcaccgaggugcccguggccauccacgccgaccagcugacccccaccuggcggguguacagcaccggcagcaacguguuccagacccgggccggcugccugaucggcgccgagcacgugaacaacuccuacgagugcgacauccccaucggcgcuggcaucugcgccagcuaccagacccagaccaacagcccccggcgggcccggagcguggccagccagagcaucaucgccuacaccaugagcuuaggcgccgagaacagcguggccuacagcaacaacagcaucgcgaucccuaccaacuucaccaucagcgugaccaccgagauacugcccgugagcaugaccaagaccagcguggacuguaccauguacaucugcggcgacagcaccgagugcagcaaccugcugcugcaguacggcagcuucugcacccagcugaaccgggcccugaccggcaucgccguggagcaggacaagaacacccaagagguguucgcccaggugaagcagaucuacaagacucccccaaucaaggacuucggcggcuucaacuucagccagauccugcccgaccccagcaagcccagcaagcggagcuucaucgaggaccugcuguucaacaaggugacccuggccgacgccggcuucaucaagcaguacggcgacugccugggggauaucgccgcucgggaccugaucugcgcccagaaguucaacggccugaccgugcugcccccucugcugaccgacgagaugaucgcccaguacaccagcgcccugcuugccggcaccaucaccagcggcuggaccuucggcgccggcgcagcccugcagauccccuucgccaugcagauggccuaccgguucaacggcaucggcgugacccagaacgugcuguacgagaaccagaagcugaucgccaaccaguucaacagcgccaucggcaagauccaggacagccugagcagcaccgccagcgcccugggcaagcugcaggacguggugaaccagaacgcucaggcccugaacacccuggugaagcagcugagcagcaacuucggcgccaucagcucagugcugaaugacauccugagcaggcuggaucccccagaggccgaggugcagaucgaccggcugaucaccggccggcugcagagccugcagaccuacgugacccagcagcugauccgggccgccgagauccgggccagcgccaaccuggcagccaccaagaugagcgagugcgugcugggccagagcaagcggguggacuuuugcggcaagggcuaccaccugaugagcuucccccagagcgcuccccacggcgugguguuccuccacgugacauacguccccgcccaggagaagaacuucaccaccgcccccgccauuugccacgacggcaaggcccacuucccccgggagggaguguucgugagcaacggcacccacugguucgugacccagcggaacuucuacgagccucagaucaucaccaccgacaacaccuucgugagcggcaacugcgacguggugaucggcaucgugaacaacaccguguacgacccccugcagcccgagcuggacagcuucaaggaggagcuggacaaguacuucaagaaccacaccagcccagacguggaccugggcgacaucagcggcaucaacgccagcguggugaacauccagaaggagaucgaccggcugaacgagguggccaagaaccugaacgagagccugaucgaccugcaggagcugggcaaguacgagcaguacaucaaguggcccugguacaucuggcugggcuucaucgccggccugaucgccaucgugauggugaccaucaugcugugcugcaugaccagcugcuguagcugccugaagggcugcugcagcugcggcagcugcugcaaguucgacgaggacgacagcgagcccgugcugaagggcgugaagcugcacuacaccugaggacuaguuauaagacugacuagcccgaugggccucccaacgggcccuccuccccuccuugcaccgagauuaaucaaaggcucuuuucagagccaccaaaaaaaaaaaaaaaaaaaaaaaaaaaaaaaaaaaaaaaaaaaaaaaaaaaaaaaaaaaaaaaaaaaaaaaaaaaaaaaaaaaaaaaaaaaaaaaaaaaaa

SEQ ID NO: 24247 - RNA, 4035 nt, Artificial Sequence
  SARS-CoV-2/Wuhan/WIV05/2019__EPI_ISL_402128 spike protein mRNA gc (1-1273)(K986P_V987P_K986P_V987P_L18F_T20N_P26S_D138Y_R190S_K417T _E484K_N501Y_D614G_H655Y_T1027I)
aggagaaagcuuaccauguucguguuccuggugcugcugccccuggugagcagccagugcgugaacuucaccaaccggacccagcugcccagcgccuacaccaacagcuucacccggggcguguacuacccugacaagguguuccggagcagcgugcugcacagcacccaggaccuguuccugcccuucuucagcaacgugaccugguuccacgccauccacgugagcggcaccaacggcaccaagcgguucgacaaccccgugcugccauucaacgacggcguguacuucgccagcaccgagaagucaaacaucauccggggcuggaucuuuggcaccacccuggacagcaagacccagagccugcugaucgugaacaacgccacaaacguggugaucaaggugugcgaguuccaguucugcaacuaccccuuccugggcguguacuaccacaagaacaacaagagcuggauggagagcgaguuccgggucuacagcagcgcuaauaacugcaccuucgaguacgugagccagcccuuccugauggaccuggagggcaagcagggcaacuucaagaaccucagcgaguucguguucaagaacaucgacggcuacuucaagaucuacagcaagcacacccccaucaaccuggugcgggaucugccccagggauucagcgcccuggagccccugguggaccugccuaucggcaucaacaucacccgguuccagacccugcuggcccugcacaggagcuaccugacccccggcgacagcagcagcggcuggaccgccggcgccgccgcauacuacgugggcuaccugcagccccggaccuuccugcugaaguacaacgagaacggcaccaucaccgacgccguggacugcgcccuggacccacugagcgagaccaagugcacccuaaagagcuucaccguggagaagggcaucuaccagaccagcaacuuccgggugcagcccaccgagagcaucgugcgguuccccaacauuacuaaccugugucccuucggcgagguguucaacgccacccgguucgccagcguguacgccuggaaccggaagcggaucagcaacugcguggccgacuacagcgugcuguacaacagcgccagcuucagcaccuucaagugcuacggcgugagccccaccaagcugaacgaccugugcuucaccaacguguacgcugacagcuucgugauccggggcgacgaggugcggcagaucgccccuggccagaccggcaccaucgccgacuacaacuacaagcugcccgacgacuucaccggcugcgugaucgccuggaacagcaacaaccuggacagcaaggugggcggcaacuacaacuaccuguaccggcuguuccguaagagcaaccugaagcccuuugagcgggacaucagcaccgagaucuaccaggccggcagcaccccaugcaacggugugaagggcuucaacugcuacuucccccugcagagcuacggcuuccagcccaccuacggcgugggcuaccagcccuaccgggugguggugcugagcuucgagcugcugcacgcccccgccaccgugugcggccccaaaaagagcaccaaccuggugaagaacaagugcgugaacuucaauuucaacggccugaccggcaccggcgugcugaccgagagcaacaagaaguuccugccuuuccagcaguucggccgggacaucgccgauaccaccgacgcagugcgggacccccagacccuggagauccuggacaucacccccugcagcuucggcggcgugagcgucaucaccccaggcacaaacaccagcaaccagguggccgugcuguaccagggagugaacugcaccgaggugcccguggccauccacgccgaccagcugacccccaccuggcggguguacuccaccggcagcaacguguuccagacccgggccggcugccugaucggcgccgaguacgugaacaacagcuacgagugcgacauccccaucggcgcuggcaucugcgccagcuaccagacccagaccaacagcccccggcgggcccggagcguggccagccagagcaucaucgccuacaccaugagccugggcgccgagaacagcguggccuacagcaacaacagcaucgcgauccccaccaacuucaccaucagcgugaccaccgagauauuaccugugagcaugaccaagaccagcguggacuguaccauguacaucugcggcgacagcaccgagugcagcaaccugcugcugcaguacggcagcuucugcacccagcugaaccgggcccugaccggcaucgccguggagcaggacaagaacacccaagagguguucgcccaggugaagcagaucuacaagacuccacccaucaaggacuucggcggcuucaacuucagccagauccugcccgaccccagcaagcccagcaagcggagcuucaucgaggaccugcuguucaacaaggugacccuggccgacgccggcuucaucaagcaguacggcgacugccugggggacaucgccgcucgggaucugaucugcgcccagaaguucaacggccugaccgugcugccuccccugcugaccgacgagaugaucgcccaguacaccagcgcccugcuggccggcaccaucaccagcggcuggaccuucggcgccggcgcagcccuucagauccccuucgccaugcagauggccuaccgguucaacggcaucggcgugacccagaacgugcuguacgagaaccagaagcugaucgccaaccaguucaacagcgccaucggcaagauccaggacagccugagcagcaccgccagcgcccugggcaagcugcaggacguggugaaccagaacgcucaggcccugaacacccuggugaagcagcugagcucaaacuuuggcgccaucagcagcgugcugaaugacauccugagccggcuggacccacccgaggccgaggugcagaucgacaggcugaucaccggccggcugcagagccugcagaccuacgugacccagcagcugauccgggccgccgagauccgggccagcgccaaccuggcagccauuaagaugagcgagugcgugcugggccagagcaagcggguggacuucugcggcaagggcuaccaccugaugagcuucccccagagcgcuccccacggcgugguguuccugcacgugaccuacguccccgcccaggagaagaacuucacaaccgcccccgccaucugccacgacggcaaggcccacuucccccgggagggaguguucgugagcaacggcacccacugguucgugacccagcggaacuucuacgagccccagaucaucaccaccgacaacaccuucgugagcggcaacugcgacguggugaucggcaucgugaacaacaccguguacgacccucuccagcccgagcuggacagcuucaaggaggagcuggacaaguacuucaagaaccacaccagccccgacguggaccugggcgauaucagcggcaucaacgccagcguggugaacauccagaaggagaucgaccggcugaacgagguggccaagaaccugaacgagagccugaucgaccugcaggagcugggcaaguacgagcaguacaucaaguggccaugguacaucuggcugggcuucaucgccggccugaucgccaucgugauggugaccaucaugcugugcugcaugaccagcugcuguagcugccugaagggcugcugcagcugcggcagcugcugcaaguucgacgaggacgacagcgagcccgugcugaagggcgugaagcugcacuacaccugaggacuaguuauaagacugacuagcccgaugggccucccaacgggcccuccuccccuccuugcaccgagauuaaucaaaggcucuuuucagagccaccaaaaaaaaaaaaaaaaaaaaaaaaaaaaaaaaaaaaaaaaaaaaaaaaaaaaaaaaaaaaaaaaaaaaaaaaaaaaaaaaaaaaaaaaaaaaaaaaaaaaa

SEQ ID NO: 24248 - RNA, 4035 nt, Artificial Sequence
  SARS-CoV-2/Wuhan/WIV05/2019__EPI_ISL_402128 spike protein mRNA gc (1-1273)(K986P_V987P_K986P_V987P_S13I_W152C_L452R_D614G)
aggagaaagcuuaccauguucguguuccuggugcugcugccccuggugagcauccagugcgugaaccugaccacccggacccagcugcccccugccuacaccaacagcuucacccggggcguguacuaccccgacaagguguuccggagcagcgugcugcacagcacccaggaccuguuccugcccuucuucagcaacgugaccugguuccacgccauccacgugagcggcaccaacggcaccaagcgguucgacaacccagugcugcccuucaacgacggcguguacuucgccagcaccgagaagucaaacaucauccggggcuggaucuucggcaccacccuggacagcaagacacagagccugcugaucgugaacaacgccaccaacguggugaucaaggugugcgaguuucaguucugcaacgaccccuuccugggcguguacuaccacaagaacaacaagagcugcauggagagcgaguuccgggucuacagcagcgcuaacaauugcaccuucgaguacgugagccagcccuuccugauggaccucgagggcaagcagggcaacuucaagaaccugcgggaguucguguucaagaacaucgauggcuacuucaagaucuacagcaagcacacccccaucaaccuggugcgggaccugccccagggauucagcgcccuggagccucugguggaccugcccaucggcaucaacaucaccagguuccagacccugcuggcccugcaccggagcuaccugacccccggcgacagcagcagcggcuggaccgccggcgccgccgcauacuacgugggcuaccugcagccacggaccuuccugcugaaguacaacgagaacggcaccaucaccgacgccguggacugcgcccuggacccccugagcgagaccaaguguacccuaaagagcuucaccguggagaagggcaucuaccagaccagcaacuuccgggugcagcccacugagagcauugugcgguuccccaacaucaccaaccugugccccuucggcgagguguucaacgccacccgguucgccagcguguacgccuggaaccggaagcggaucagcaacugcguggccgacuacagcgugcuguacaacagcgccagcuucagcaccuucaagugcuacggcgugagcccuaccaagcugaacgaccugugcuucaccaacguguacgcugacagcuucgugauccggggcgacgaggugcggcagaucgcccccggccagaccggcaagaucgccgacuacaacuacaagcugcccgacgacuucaccggcugcgugaucgccuggaacagcaacaaccuggacagcaaggugggcggcaacuacaacuaccgguaccggcuguuccguaagagcaaccugaagccauucgagcgggacaucagcaccgagaucuaccaggccggcagcacccccugcaacgguguggagggcuuuaacugcuacuucccccugcagagcuacggcuuccagcccaccaacggcgugggcuaccagcccuaccgggugguggugcugagcuucgagcugcugcacgcccccgccaccgugugcggcccuaaaaagagcaccaaccuggugaagaacaagugcgugaacuucaauuucaacggccugaccggcaccggcgugcugaccgagagcaacaagaaguuccugcccuuccagcaguucggccgggauaucgccgacaccaccgacgcagugcgggacccccagacccuggagauccuggacaucaccccaugcagcuucggcggcgugagcgucaucacccccggcacaaacaccagcaaccagguggccgugcuguaccagggagugaacugcaccgaggugcccguggccauccacgccgaccagcugacccccaccuggcggguguacagcaccggcagcaacguguuccagacccgggccggcugccugaucggcgccgagcacgugaacaacagcuacgagugcgacauccccaucggcgcuggcaucugugccuccuaccagacccagaccaacagcccccggcgggcccggagcguggccagccagagcaucaucgccuacaccaugagccugggcgccgagaacagcguggccuacagcaacaacagcaucgcgaucccuaccaacuucaccauaagcgugaccaccgagaucuuacccgugagcaugaccaagaccagcguggacugcaccauguacaucugcggcgacagcaccgagugcagcaaccugcugcugcaguacggcagcuucugcacccagcugaaccgggcccugaccggcaucgccguggagcaggacaagaacacccaagagguguucgcccaggugaagcagaucuacaagacucccccaaucaaggacuucggcggcuucaacuucagccagauccugcccgaccccagcaagcccagcaagcggagcuucaucgaggaccugcuguucaacaaggugacccuggccgacgccggcuucaucaagcaguacggcgacugccugggggauaucgccgcucgggaccugaucugcgcccagaaguucaacggccugaccgugcugcccccucugcugaccgacgagaugaucgcccaguacaccagcgcccugcuggccggcaccaucaccagcggcuggaccuucggcgccggcgcagcccuucagauccccuucgccaugcagauggccuacagguucaacggcaucggcgugacccagaacgugcuguacgagaaccagaagcugaucgccaaccaguucaacagcgccaucggcaagauccaggacagccugagcagcaccgccagcgcccugggcaagcugcaggacguggugaaccagaacgcucaggcccugaacacccuggugaagcagcugagcagcaacuucggcgccaucagcagcgugcugaaugacauccugucacggcuggaucccccagaggccgaggugcagaucgaccggcugaucaccggccggcugcagagccugcagaccuacgugacccagcagcugauccgggccgccgagauucgggccagcgccaaccuggcagccaccaagaugagcgagugcgugcugggccagagcaagcggguggacuuuugcggcaagggcuaccaccugaugagcuucccccagagcgcuccccacggcgugguguuccugcacgugacauacguccccgcccaggagaagaacuucaccaccgcccccgccaucugccacgacggcaaggcccacuucccccgggagggaguguucgugagcaacggcacccacugguucgugacccagcggaacuucuacgagccucagaucaucaccaccgacaacaccuucgugagcggcaacugcgacguggugaucggcaucgugaacaacaccguguacgacccccuccagcccgagcuggacagcuucaaggaggagcuggacaaguacuucaagaaccacaccagcccagacguggaccugggcgacaucagcggcaucaacgccagcguggugaacauccagaaggagaucgaccggcugaacgagguggccaagaaccugaacgagagccugaucgaccugcaggagcugggcaaguacgagcaguacaucaaguggcccugguacaucuggcugggcuucaucgccggccugaucgccaucgugauggugaccaucaugcugugcugcaugaccagcuguugcagcugccugaagggcugcugcagcugcggcagcugcugcaaguucgacgaggacgacagcgagcccgugcugaagggcgugaagcugcacuacaccugaggacuaguuauaagacugacuagcccgaugggccucccaacgggcccuccuccccuccuugcaccgagauuaaucaaaggcucuuuucagagccaccaaaaaaaaaaaaaaaaaaaaaaaaaaaaaaaaaaaaaaaaaaaaaaaaaaaaaaaaaaaaaaaaaaaaaaaaaaaaaaaaaaaaaaaaaaaaaaaaaaaaa

SEQ ID NO: 24249 - RNA, 4035 nt, Artificial Sequence
  SARS-CoV-2/Wuhan/WIV05/2019__EPI_ISL_402128 spike protein mRNA gc mod (1-1273)(K986P_V987P)
aggagaaagcuuaccauguucguguuucuggugcugcugccccugguguccagccagugugugaaccugaccaccagaacacagcugccuccagccuacaccaacagcuucaccagaggcguguacuaccccgacaagguguucagauccagcgugcugcacucuacccaggaccuguuccugccuuucuucagcaacgugaccugguuccacgccauccacguguccggcaccaauggcaccaagagauucgacaaccccgugcugcccuucaacgacgggguguacuuugccagcaccgagaaguccaacaucaucagaggcuggaucuucggcaccacacuggacagcaagacccagagccugcugaucgugaacaacgccaccaacguggucaucaaagugugcgaguuccaguucugcaacgaccccuuccugggcgucuacuaccacaagaacaacaagagcuggauggaaagcgaguuccggguguacagcagcgccaacaacugcaccuucgaguacgugucccagccuuuccugauggaccuggaaggcaagcagggcaacuucaagaaccugcgcgaguucguguucaagaacaucgacggcuacuucaaaaucuacagcaagcacaccccuaucaaccucgugcgggaucugccucagggcuucucugcucuggaaccccugguggaucugcccaucggcaucaacaucacccgguuucagacacugcuggcccugcacagaagcuaccugacaccuggcgauagcagcagcggauggacagcuggugccgccgcuuacuaugugggcuaccugcagccuagaaccuuccugcugaaguacaacgagaacggcaccaucaccgacgccguggauugugcucuggauccucugagcgagacaaagugcacccugaaguccuucaccguggaaaagggcaucuaccagaccagcaacuuccgggugcagcccaccgaauccaucgugcgguuccccaauaucaccaaucugugccccuucggcgagguguucaaugccaccagauucgccucuguguacgccuggaaccggaagcggaucagcaauugcguggccgacuacuccgugcuguacaacuccgccagcuucagcaccuucaagugcuacggcguguccccuaccaagcugaacgaccugugcuucacaaacguguacgccgacagcuucgugauccggggagaugaagugcggcagauugccccuggacagacaggcaagaucgccgacuacaacuacaagcugcccgacgacuucaccggcugugugauugccuggaacagcaacaaccuggacuccaaagucggcggcaacuacaauuaccuguaccggcuguuccggaaguccaaucugaagcccuucgagcgggacaucagcaccgaaaucuaucaggccggcagcaccccuugcaacggcguggaaggcuucaacugcuacuucccacugcaguccuacggcuuucagcccacaaauggcgugggcuaucagcccuacagagugguggugcugagcuucgaacugcugcaugcuccugccacagugugcggcccuaagaaaagcaccaaucucgugaagaacaaaugcgugaacuucaacuucaacggccugaccggcaccggcgugcugacagagagcaacaagaaguuccugccauuccagcaguuuggccgggauaucgccgauaccacagacgccguuagagauccccagacacuggaaauccuggacaucaccccaugcagcuucggcggagugucugugaucaccccuggcaccaacaccagcaaucagguggcagugcuguaccaggacgugaacuguaccgaagugcccguggccauucacgccgaucagcugacaccuacauggcggguguacuccaccggcagcaauguguuucagaccagagccggcugucugaucggagccgagcacgugaacaauagcuacgagugcgacauccccaucggcgcuggcaucugugccagcuaccagacacagacaaacagccccagacgggcuagaagcguggccagccagagcaucauugccuacacaaugucucugggcgccgagaacagcguggccuacuccaacaacucuaucgcuauccccaccaacuucaccaucagcgugaccaccgagauccugccuguguccaugaccaagaccagcguggacugcaccauguacaucugcggcgauuccaccgagugcuccaaccugcugcugcaguacggcagcuucugcacccagcugaauagagcccugacagggaucgccguggaacaggacaagaacacccaagagguguucgcccaagugaagcaaaucuacaagaccccuccuaucaaggacuucggcggcuucaauuucagccagauucugcccgauccuagcaagcccagcaagcggagcuucaucgaggaccugcuguucaacaaagugacacuggccgacgccggcuucaucaagcaguauggcgauugucugggcgacauugccgccagggaucugauuugcgcccagaaguuuaacggacugacagugcugccuccucugcugaccgaugagaugaucgcccaguacacaucugcccugcuggccggcacaaucacaagcggcuggacauuuggagcuggcgccgcucugcagauccccuuugcuaugcagauggccuaccgguucaacggcaucggagugacccagaaugugcuguacgagaaccagaagcugaucgccaaccaguucaacagcgccaucggcaagauccaggacagccugagcagcacagcaagcgcccugggaaagcugcaggacguggucaaccagaaugcccaggcacugaacacccuggucaagcagcuguccuccaacuucggcgccaucagcucugugcugaacgauauccugagcagacuggacccuccugaggccgaggugcagaucgacagacugaucacaggcagacugcagagccuccagacauacgugacccagcagcugaucagagccgccgagauuagagccucugccaaucuggccgccaccaagaugucugagugugugcugggccagagcaagagaguggacuuuugcggcaagggcuaccaccugaugagcuucccucagucugccccucacggcgugguguuucugcacgugacauaugugcccgcucaagagaagaauuucaccaccgcuccagccaucugccacgacggcaaagcccacuuuccuagagaaggcguguucguguccaacggcacccauugguucgugacacagcggaacuucuacgagccccagaucaucaccaccgacaacaccuucgugucuggcaacugcgacguugugaucggcauugugaacaauaccguguacgacccucugcagcccgagcuggacagcuucaaagaggaacuggacaaguacuuuaagaaccacacaagccccgacguggaccugggcgauaucagcggaaucaaugccagcgucgugaacauccagaaagagaucgaccggcugaacgagguggccaagaaucugaacgagagccugaucgaccugcaagaacuggggaaguacgagcaguacaucaaguggcccugguacaucuggcugggcuuuaucgccggacugauugccaucgugauggucacaaucaugcuguguugcaugaccagcugcuguagcugccugaagggcuguuguagcuguggcagcugcugcaaguucgacgaggacgauucugagcccgugcugaagggcgugaaacugcacuacaccugaggacuaguuauaagacugacuagcccgaugggccucccaacgggcccuccuccccuccuugcaccgagauuaaucaaaggcucuuuucagagccaccaaaaaaaaaaaaaaaaaaaaaaaaaaaaaaaaaaaaaaaaaaaaaaaaaaaaaaaaaaaaaaaaaaaaaaaaaaaaaaaaaaaaaaaaaaaaaaaaaaaaa

SEQ ID NO: 24250 - RNA, 4035 nt, Artificial Sequence
  SARS-CoV-2/Wuhan/WIV05/2019__EPI_ISL_402128 spike protein mRNA gc mod (1-1273)(K986P_V987P_ D614G)
aggagaaagcuuaccauguucguguuucuggugcugcugccccugguguccagccagugugugaaccugaccaccagaacacagcugccuccagccuacaccaacagcuucaccagaggcguguacuaccccgacaagguguucagauccagcgugcugcacucuacccaggaccuguuccugccuuucuucagcaacgugaccugguuccacgccauccacguguccggcaccaauggcaccaagagauucgacaaccccgugcugcccuucaacgacgggguguacuuugccagcaccgagaaguccaacaucaucagaggcuggaucuucggcaccacacuggacagcaagacccagagccugcugaucgugaacaacgccaccaacguggucaucaaagugugcgaguuccaguucugcaacgaccccuuccugggcgucuacuaccacaagaacaacaagagcuggauggaaagcgaguuccggguguacagcagcgccaacaacugcaccuucgaguacgugucccagccuuuccugauggaccuggaaggcaagcagggcaacuucaagaaccugcgcgaguucguguucaagaacaucgacggcuacuucaaaaucuacagcaagcacaccccuaucaaccucgugcgggaucugccucagggcuucucugcucuggaaccccugguggaucugcccaucggcaucaacaucacccgguuucagacacugcuggcccugcacagaagcuaccugacaccuggcgauagcagcagcggauggacagcuggugccgccgcuuacuaugugggcuaccugcagccuagaaccuuccugcugaaguacaacgagaacggcaccaucaccgacgccguggauugugcucuggauccucugagcgagacaaagugcacccugaaguccuucaccguggaaaagggcaucuaccagaccagcaacuuccgggugcagcccaccgaauccaucgugcgguuccccaauaucaccaaucugugccccuucggcgagguguucaaugccaccagauucgccucuguguacgccuggaaccggaagcggaucagcaauugcguggccgacuacuccgugcuguacaacuccgccagcuucagcaccuucaagugcuacggcguguccccuaccaagcugaacgaccugugcuucacaaacguguacgccgacagcuucgugauccggggagaugaagugcggcagauugccccuggacagacaggcaagaucgccgacuacaacuacaagcugcccgacgacuucaccggcugugugauugccuggaacagcaacaaccuggacuccaaagucggcggcaacuacaauuaccuguaccggcuguuccggaaguccaaucugaagcccuucgagcgggacaucagcaccgaaaucuaucaggccggcagcaccccuugcaacggcguggaaggcuucaacugcuacuucccacugcaguccuacggcuuucagcccacaaauggcgugggcuaucagcccuacagagugguggugcugagcuucgaacugcugcaugcuccugccacagugugcggcccuaagaaaagcaccaaucucgugaagaacaaaugcgugaacuucaacuucaacggccugaccggcaccggcgugcugacagagagcaacaagaaguuccugccauuccagcaguuuggccgggauaucgccgauaccacagacgccguuagagauccccagacacuggaaauccuggacaucaccccaugcagcuucggcggagugucugugaucaccccuggcaccaacaccagcaaucagguggcagugcuguaccagggcgugaacuguaccgaagugcccguggccauucacgccgaucagcugacaccuacauggcggguguacuccaccggcagcaauguguuucagaccagagccggcugucugaucggagccgagcacgugaacaauagcuacgagugcgacauccccaucggcgcuggcaucugugccagcuaccagacacagacaaacagccccagacgggcuagaagcguggccagccagagcaucauugccuacacaaugucucugggcgccgagaacagcguggccuacuccaacaacucuaucgcuauccccaccaacuucaccaucagcgugaccaccgagauccugccuguguccaugaccaagaccagcguggacugcaccauguacaucugcggcgauuccaccgagugcuccaaccugcugcugcaguacggcagcuucugcacccagcugaauagagcccugacagggaucgccguggaacaggacaagaacacccaagagguguucgcccaagugaagcaaaucuacaagaccccuccuaucaaggacuucggcggcuucaauuucagccagauucugcccgauccuagcaagcccagcaagcggagcuucaucgaggaccugcuguucaacaaagugacacuggccgacgccggcuucaucaagcaguauggcgauugucugggcgacauugccgccagggaucugauuugcgcccagaaguuuaacggacugacagugcugccuccucugcugaccgaugagaugaucgcccaguacacaucugcccugcuggccggcacaaucacaagcggcuggacauuuggagcuggcgccgcucugcagauccccuuugcuaugcagauggccuaccgguucaacggcaucggagugacccagaaugugcuguacgagaaccagaagcugaucgccaaccaguucaacagcgccaucggcaagauccaggacagccugagcagcacagcaagcgcccugggaaagcugcaggacguggucaaccagaaugcccaggcacugaacacccuggucaagcagcuguccuccaacuucggcgccaucagcucugugcugaacgauauccugagcagacuggacccuccugaggccgaggugcagaucgacagacugaucacaggcagacugcagagccuccagacauacgugacccagcagcugaucagagccgccgagauuagagccucugccaaucuggccgccaccaagaugucugagugugugcugggccagagcaagagaguggacuuuugcggcaagggcuaccaccugaugagcuucccucagucugccccucacggcgugguguuucugcacgugacauaugugcccgcucaagagaagaauuucaccaccgcuccagccaucugccacgacggcaaagcccacuuuccuagagaaggcguguucguguccaacggcacccauugguucgugacacagcggaacuucuacgagccccagaucaucaccaccgacaacaccuucgugucuggcaacugcgacguugugaucggcauugugaacaauaccguguacgacccucugcagcccgagcuggacagcuucaaagaggaacuggacaaguacuuuaagaaccacacaagccccgacguggaccugggcgauaucagcggaaucaaugccagcgucgugaacauccagaaagagaucgaccggcugaacgagguggccaagaaucugaacgagagccugaucgaccugcaagaacuggggaaguacgagcaguacaucaaguggcccugguacaucuggcugggcuuuaucgccggacugauugccaucgugauggucacaaucaugcuguguugcaugaccagcugcuguagcugccugaagggcuguuguagcuguggcagcugcugcaaguucgacgaggacgauucugagcccgugcugaagggcgugaaacugcacuacaccugaggacuaguuauaagacugacuagcccgaugggccucccaacgggcccuccuccccuccuugcaccgagauuaaucaaaggcucuuuucagagccaccaaaaaaaaaaaaaaaaaaaaaaaaaaaaaaaaaaaaaaaaaaaaaaaaaaaaaaaaaaaaaaaaaaaaaaaaaaaaaaaaaaaaaaaaaaaaaaaaaaaaa

SEQ ID NO: 24251 - RNA, 4035 nt, Artificial Sequence
  SARS-CoV-2/Wuhan/WIV05/2019__EPI_ISL_402128 spike protein mRNA gc mod (1-1273)(K986P_V987P_A222V_D614G)
aggagaaagcuuaccauguucguguuucuggugcugcugccccugguguccagccagugugugaaccugaccaccagaacacagcugccuccagccuacaccaacagcuucaccagaggcguguacuaccccgacaagguguucagauccagcgugcugcacucuacccaggaccuguuccugccuuucuucagcaacgugaccugguuccacgccauccacguguccggcaccaauggcaccaagagauucgacaaccccgugcugcccuucaacgacgggguguacuuugccagcaccgagaaguccaacaucaucagaggcuggaucuucggcaccacacuggacagcaagacccagagccugcugaucgugaacaacgccaccaacguggucaucaaagugugcgaguuccaguucugcaacgaccccuuccugggcgucuacuaccacaagaacaacaagagcuggauggaaagcgaguuccggguguacagcagcgccaacaacugcaccuucgaguacgugucccagccuuuccugauggaccuggaaggcaagcagggcaacuucaagaaccugcgcgaguucguguucaagaacaucgacggcuacuucaaaaucuacagcaagcacaccccuaucaaccucgugcgggaucugccucagggcuucucugugcuggaaccccugguggaucugcccaucggcaucaacaucacccgguuucagacacugcuggcccugcacagaagcuaccugacaccuggcgauagcagcagcggauggacagcuggugccgccgcuuacuaugugggcuaccugcagccuagaaccuuccugcugaaguacaacgagaacggcaccaucaccgacgccguggauugugcucuggauccucugagcgagacaaagugcacccugaaguccuucaccguggaaaagggcaucuaccagaccagcaacuuccgggugcagcccaccgaauccaucgugcgguuccccaauaucaccaaucugugccccuucggcgagguguucaaugccaccagauucgccucuguguacgccuggaaccggaagcggaucagcaauugcguggccgacuacuccgugcuguacaacuccgccagcuucagcaccuucaagugcuacggcguguccccuaccaagcugaacgaccugugcuucacaaacguguacgccgacagcuucgugauccggggagaugaagugcggcagauugccccuggacagacaggcaagaucgccgacuacaacuacaagcugcccgacgacuucaccggcugugugauugccuggaacagcaacaaccuggacuccaaagucggcggcaacuacaauuaccuguaccggcuguuccggaaguccaaucugaagcccuucgagcgggacaucagcaccgaaaucuaucaggccggcagcaccccuugcaacggcguggaaggcuucaacugcuacuucccacugcaguccuacggcuuucagcccacaaauggcgugggcuaucagcccuacagagugguggugcugagcuucgaacugcugcaugcuccugccacagugugcggcccuaagaaaagcaccaaucucgugaagaacaaaugcgugaacuucaacuucaacggccugaccggcaccggcgugcugacagagagcaacaagaaguuccugccauuccagcaguuuggccgggauaucgccgauaccacagacgccguuagagauccccagacacuggaaauccuggacaucaccccaugcagcuucggcggagugucugugaucaccccuggcaccaacaccagcaaucagguggcagugcuguaccagggcgugaacuguaccgaagugcccguggccauucacgccgaucagcugacaccuacauggcggguguacuccaccggcagcaauguguuucagaccagagccggcugucugaucggagccgagcacgugaacaauagcuacgagugcgacauccccaucggcgcuggcaucugugccagcuaccagacacagacaaacagccccagacgggcuagaagcguggccagccagagcaucauugccuacacaaugucucugggcgccgagaacagcguggccuacuccaacaacucuaucgcuauccccaccaacuucaccaucagcgugaccaccgagauccugccuguguccaugaccaagaccagcguggacugcaccauguacaucugcggcgauuccaccgagugcuccaaccugcugcugcaguacggcagcuucugcacccagcugaauagagcccugacagggaucgccguggaacaggacaagaacacccaagagguguucgcccaagugaagcaaaucuacaagaccccuccuaucaaggacuucggcggcuucaauuucagccagauucugcccgauccuagcaagcccagcaagcggagcuucaucgaggaccugcuguucaacaaagugacacuggccgacgccggcuucaucaagcaguauggcgauugucugggcgacauugccgccagggaucugauuugcgcccagaaguuuaacggacugacagugcugccuccucugcugaccgaugagaugaucgcccaguacacaucugcccugcuggccggcacaaucacaagcggcuggacauuuggagcuggcgccgcucugcagauccccuuugcuaugcagauggccuaccgguucaacggcaucggagugacccagaaugugcuguacgagaaccagaagcugaucgccaaccaguucaacagcgccaucggcaagauccaggacagccugagcagcacagcaagcgcccugggaaagcugcaggacguggucaaccagaaugcccaggcacugaacacccuggucaagcagcuguccuccaacuucggcgccaucagcucugugcugaacgauauccugagcagacuggacccuccugaggccgaggugcagaucgacagacugaucacaggcagacugcagagccuccagacauacgugacccagcagcugaucagagccgccgagauuagagccucugccaaucuggccgccaccaagaugucugagugugugcugggccagagcaagagaguggacuuuugcggcaagggcuaccaccugaugagcuucccucagucugccccucacggcgugguguuucugcacgugacauaugugcccgcucaagagaagaauuucaccaccgcuccagccaucugccacgacggcaaagcccacuuuccuagagaaggcguguucguguccaacggcacccauugguucgugacacagcggaacuucuacgagccccagaucaucaccaccgacaacaccuucgugucuggcaacugcgacguugugaucggcauugugaacaauaccguguacgacccucugcagcccgagcuggacagcuucaaagaggaacuggacaaguacuuuaagaaccacacaagccccgacguggaccugggcgauaucagcggaaucaaugccagcgucgugaacauccagaaagagaucgaccggcugaacgagguggccaagaaucugaacgagagccugaucgaccugcaagaacuggggaaguacgagcaguacaucaaguggcccugguacaucuggcugggcuuuaucgccggacugauugccaucgugauggucacaaucaugcuguguugcaugaccagcugcuguagcugccugaagggcuguuguagcuguggcagcugcugcaaguucgacgaggacgauucugagcccgugcugaagggcgugaaacugcacuacaccugaggacuaguuauaagacugacuagcccgaugggccucccaacgggcccuccuccccuccuugcaccgagauuaaucaaaggcucuuuucagagccaccaaaaaaaaaaaaaaaaaaaaaaaaaaaaaaaaaaaaaaaaaaaaaaaaaaaaaaaaaaaaaaaaaaaaaaaaaaaaaaaaaaaaaaaaaaaaaaaaaaaaa

SEQ ID NO: 24252 - RNA, 4035 nt, Artificial Sequence
  SARS-CoV-2/Wuhan/WIV05/2019__EPI_ISL_402128 spike protein mRNA gc mod (1-1273)(K986P_V987P_N439K_D614G)
aggagaaagcuuaccauguucguguuucuggugcugcugccccugguguccagccagugugugaaccugaccaccagaacacagcugccuccagccuacaccaacagcuucaccagaggcguguacuaccccgacaagguguucagauccagcgugcugcacucuacccaggaccuguuccugccuuucuucagcaacgugaccugguuccacgccauccacguguccggcaccaauggcaccaagagauucgacaaccccgugcugcccuucaacgacgggguguacuuugccagcaccgagaaguccaacaucaucagaggcuggaucuucggcaccacacuggacagcaagacccagagccugcugaucgugaacaacgccaccaacguggucaucaaagugugcgaguuccaguucugcaacgaccccuuccugggcgucuacuaccacaagaacaacaagagcuggauggaaagcgaguuccggguguacagcagcgccaacaacugcaccuucgaguacgugucccagccuuuccugauggaccuggaaggcaagcagggcaacuucaagaaccugcgcgaguucguguucaagaacaucgacggcuacuucaaaaucuacagcaagcacaccccuaucaaccucgugcgggaucugccucagggcuucucugcucuggaaccccugguggaucugcccaucggcaucaacaucacccgguuucagacacugcuggcccugcacagaagcuaccugacaccuggcgauagcagcagcggauggacagcuggugccgccgcuuacuaugugggcuaccugcagccuagaaccuuccugcugaaguacaacgagaacggcaccaucaccgacgccguggauugugcucuggauccucugagcgagacaaagugcacccugaaguccuucaccguggaaaagggcaucuaccagaccagcaacuuccgggugcagcccaccgaauccaucgugcgguuccccaauaucaccaaucugugccccuucggcgagguguucaaugccaccagauucgccucuguguacgccuggaaccggaagcggaucagcaauugcguggccgacuacuccgugcuguacaacuccgccagcuucagcaccuucaagugcuacggcguguccccuaccaagcugaacgaccugugcuucacaaacguguacgccgacagcuucgugauccggggagaugaagugcggcagauugccccuggacagacaggcaagaucgccgacuacaacuacaagcugcccgacgacuucaccggcugugugauugccuggaacagcaagaaccuggacuccaaagucggcggcaacuacaauuaccuguaccggcuguuccggaaguccaaucugaagcccuucgagcgggacaucagcaccgaaaucuaucaggccggcagcaccccuugcaacggcguggaaggcuucaacugcuacuucccacugcaguccuacggcuuucagcccacaaauggcgugggcuaucagcccuacagagugguggugcugagcuucgaacugcugcaugcuccugccacagugugcggcccuaagaaaagcaccaaucucgugaagaacaaaugcgugaacuucaacuucaacggccugaccggcaccggcgugcugacagagagcaacaagaaguuccugccauuccagcaguuuggccgggauaucgccgauaccacagacgccguuagagauccccagacacuggaaauccuggacaucaccccaugcagcuucggcggagugucugugaucaccccuggcaccaacaccagcaaucagguggcagugcuguaccagggcgugaacuguaccgaagugcccguggccauucacgccgaucagcugacaccuacauggcggguguacuccaccggcagcaauguguuucagaccagagccggcugucugaucggagccgagcacgugaacaauagcuacgagugcgacauccccaucggcgcuggcaucugugccagcuaccagacacagacaaacagccccagacgggcuagaagcguggccagccagagcaucauugccuacacaaugucucugggcgccgagaacagcguggccuacuccaacaacucuaucgcuauccccaccaacuucaccaucagcgugaccaccgagauccugccuguguccaugaccaagaccagcguggacugcaccauguacaucugcggcgauuccaccgagugcuccaaccugcugcugcaguacggcagcuucugcacccagcugaauagagcccugacagggaucgccguggaacaggacaagaacacccaagagguguucgcccaagugaagcaaaucuacaagaccccuccuaucaaggacuucggcggcuucaauuucagccagauucugcccgauccuagcaagcccagcaagcggagcuucaucgaggaccugcuguucaacaaagugacacuggccgacgccggcuucaucaagcaguauggcgauugucugggcgacauugccgccagggaucugauuugcgcccagaaguuuaacggacugacagugcugccuccucugcugaccgaugagaugaucgcccaguacacaucugcccugcuggccggcacaaucacaagcggcuggacauuuggagcuggcgccgcucugcagauccccuuugcuaugcagauggccuaccgguucaacggcaucggagugacccagaaugugcuguacgagaaccagaagcugaucgccaaccaguucaacagcgccaucggcaagauccaggacagccugagcagcacagcaagcgcccugggaaagcugcaggacguggucaaccagaaugcccaggcacugaacacccuggucaagcagcuguccuccaacuucggcgccaucagcucugugcugaacgauauccugagcagacuggacccuccugaggccgaggugcagaucgacagacugaucacaggcagacugcagagccuccagacauacgugacccagcagcugaucagagccgccgagauuagagccucugccaaucuggccgccaccaagaugucugagugugugcugggccagagcaagagaguggacuuuugcggcaagggcuaccaccugaugagcuucccucagucugccccucacggcgugguguuucugcacgugacauaugugcccgcucaagagaagaauuucaccaccgcuccagccaucugccacgacggcaaagcccacuuuccuagagaaggcguguucguguccaacggcacccauugguucgugacacagcggaacuucuacgagccccagaucaucaccaccgacaacaccuucgugucuggcaacugcgacguugugaucggcauugugaacaauaccguguacgacccucugcagcccgagcuggacagcuucaaagaggaacuggacaaguacuuuaagaaccacacaagccccgacguggaccugggcgauaucagcggaaucaaugccagcgucgugaacauccagaaagagaucgaccggcugaacgagguggccaagaaucugaacgagagccugaucgaccugcaagaacuggggaaguacgagcaguacaucaaguggcccugguacaucuggcugggcuuuaucgccggacugauugccaucgugauggucacaaucaugcuguguugcaugaccagcugcuguagcugccugaagggcuguuguagcuguggcagcugcugcaaguucgacgaggacgauucugagcccgugcugaagggcgugaaacugcacuacaccugaggacuaguuauaagacugacuagcccgaugggccucccaacgggcccuccuccccuccuugcaccgagauuaaucaaaggcucuuuucagagccaccaaaaaaaaaaaaaaaaaaaaaaaaaaaaaaaaaaaaaaaaaaaaaaaaaaaaaaaaaaaaaaaaaaaaaaaaaaaaaaaaaaaaaaaaaaaaaaaaaaaaa

SEQ ID NO: 24253 - RNA, 4035 nt, Artificial Sequence
  SARS-CoV-2/Wuhan/WIV05/2019__EPI_ISL_402128 spike protein mRNA gc mod (1-1273)(K986P_V987P_S477N_D614G)
aggagaaagcuuaccauguucguguuucuggugcugcugccccugguguccagccagugugugaaccugaccaccagaacacagcugccuccagccuacaccaacagcuucaccagaggcguguacuaccccgacaagguguucagauccagcgugcugcacucuacccaggaccuguuccugccuuucuucagcaacgugaccugguuccacgccauccacguguccggcaccaauggcaccaagagauucgacaaccccgugcugcccuucaacgacgggguguacuuugccagcaccgagaaguccaacaucaucagaggcuggaucuucggcaccacacuggacagcaagacccagagccugcugaucgugaacaacgccaccaacguggucaucaaagugugcgaguuccaguucugcaacgaccccuuccugggcgucuacuaccacaagaacaacaagagcuggauggaaagcgaguuccggguguacagcagcgccaacaacugcaccuucgaguacgugucccagccuuuccugauggaccuggaaggcaagcagggcaacuucaagaaccugcgcgaguucguguucaagaacaucgacggcuacuucaaaaucuacagcaagcacaccccuaucaaccucgugcgggaucugccucagggcuucucugcucuggaaccccugguggaucugcccaucggcaucaacaucacccgguuucagacacugcuggcccugcacagaagcuaccugacaccuggcgauagcagcagcggauggacagcuggugccgccgcuuacuaugugggcuaccugcagccuagaaccuuccugcugaaguacaacgagaacggcaccaucaccgacgccguggauugugcucuggauccucugagcgagacaaagugcacccugaaguccuucaccguggaaaagggcaucuaccagaccagcaacuuccgggugcagcccaccgaauccaucgugcgguuccccaauaucaccaaucugugccccuucggcgagguguucaaugccaccagauucgccucuguguacgccuggaaccggaagcggaucagcaauugcguggccgacuacuccgugcuguacaacuccgccagcuucagcaccuucaagugcuacggcguguccccuaccaagcugaacgaccugugcuucacaaacguguacgccgacagcuucgugauccggggagaugaagugcggcagauugccccuggacagacaggcaagaucgccgacuacaacuacaagcugcccgacgacuucaccggcugugugauugccuggaacagcaacaaccuggacuccaaagucggcggcaacuacaauuaccuguaccggcuguuccggaaguccaaucugaagcccuucgagcgggacaucagcaccgaaaucuaucaggccggcaacaccccuugcaacggcguggaaggcuucaacugcuacuucccacugcaguccuacggcuuucagcccacaaauggcgugggcuaucagcccuacagagugguggugcugagcuucgaacugcugcaugcuccugccacagugugcggcccuaagaaaagcaccaaucucgugaagaacaaaugcgugaacuucaacuucaacggccugaccggcaccggcgugcugacagagagcaacaagaaguuccugccauuccagcaguuuggccgggauaucgccgauaccacagacgccguuagagauccccagacacuggaaauccuggacaucaccccaugcagcuucggcggagugucugugaucaccccuggcaccaacaccagcaaucagguggcagugcuguaccagggcgugaacuguaccgaagugcccguggccauucacgccgaucagcugacaccuacauggcggguguacuccaccggcagcaauguguuucagaccagagccggcugucugaucggagccgagcacgugaacaauagcuacgagugcgacauccccaucggcgcuggcaucugugccagcuaccagacacagacaaacagccccagacgggcuagaagcguggccagccagagcaucauugccuacacaaugucucugggcgccgagaacagcguggccuacuccaacaacucuaucgcuauccccaccaacuucaccaucagcgugaccaccgagauccugccuguguccaugaccaagaccagcguggacugcaccauguacaucugcggcgauuccaccgagugcuccaaccugcugcugcaguacggcagcuucugcacccagcugaauagagcccugacagggaucgccguggaacaggacaagaacacccaagagguguucgcccaagugaagcaaaucuacaagaccccuccuaucaaggacuucggcggcuucaauuucagccagauucugcccgauccuagcaagcccagcaagcggagcuucaucgaggaccugcuguucaacaaagugacacuggccgacgccggcuucaucaagcaguauggcgauugucugggcgacauugccgccagggaucugauuugcgcccagaaguuuaacggacugacagugcugccuccucugcugaccgaugagaugaucgcccaguacacaucugcccugcuggccggcacaaucacaagcggcuggacauuuggagcuggcgccgcucugcagauccccuuugcuaugcagauggccuaccgguucaacggcaucggagugacccagaaugugcuguacgagaaccagaagcugaucgccaaccaguucaacagcgccaucggcaagauccaggacagccugagcagcacagcaagcgcccugggaaagcugcaggacguggucaaccagaaugcccaggcacugaacacccuggucaagcagcuguccuccaacuucggcgccaucagcucugugcugaacgauauccugagcagacuggacccuccugaggccgaggugcagaucgacagacugaucacaggcagacugcagagccuccagacauacgugacccagcagcugaucagagccgccgagauuagagccucugccaaucuggccgccaccaagaugucugagugugugcugggccagagcaagagaguggacuuuugcggcaagggcuaccaccugaugagcuucccucagucugccccucacggcgugguguuucugcacgugacauaugugcccgcucaagagaagaauuucaccaccgcuccagccaucugccacgacggcaaagcccacuuuccuagagaaggcguguucguguccaacggcacccauugguucgugacacagcggaacuucuacgagccccagaucaucaccaccgacaacaccuucgugucuggcaacugcgacguugugaucggcauugugaacaauaccguguacgacccucugcagcccgagcuggacagcuucaaagaggaacuggacaaguacuuuaagaaccacacaagccccgacguggaccugggcgauaucagcggaaucaaugccagcgucgugaacauccagaaagagaucgaccggcugaacgagguggccaagaaucugaacgagagccugaucgaccugcaagaacuggggaaguacgagcaguacaucaaguggcccugguacaucuggcugggcuuuaucgccggacugauugccaucgugauggucacaaucaugcuguguugcaugaccagcugcuguagcugccugaagggcuguuguagcuguggcagcugcugcaaguucgacgaggacgauucugagcccgugcugaagggcgugaaacugcacuacaccugaggacuaguuauaagacugacuagcccgaugggccucccaacgggcccuccuccccuccuugcaccgagauuaaucaaaggcucuuuucagagccaccaaaaaaaaaaaaaaaaaaaaaaaaaaaaaaaaaaaaaaaaaaaaaaaaaaaaaaaaaaaaaaaaaaaaaaaaaaaaaaaaaaaaaaaaaaaaaaaaaaaaa

SEQ ID NO: 24254 - RNA, 4035 nt, Artificial Sequence
  SARS-CoV-2/Wuhan/WIV05/2019__EPI_ISL_402128 spike protein mRNA gc mod (1-1273)(K986P_V987P_N501Y_D614G)
aggagaaagcuuaccauguucguguuucuggugcugcugccccugguguccagccagugugugaaccugaccaccagaacacagcugccuccagccuacaccaacagcuucaccagaggcguguacuaccccgacaagguguucagauccagcgugcugcacucuacccaggaccuguuccugccuuucuucagcaacgugaccugguuccacgccauccacguguccggcaccaauggcaccaagagauucgacaaccccgugcugcccuucaacgacgggguguacuuugccagcaccgagaaguccaacaucaucagaggcuggaucuucggcaccacacuggacagcaagacccagagccugcugaucgugaacaacgccaccaacguggucaucaaagugugcgaguuccaguucugcaacgaccccuuccugggcgucuacuaccacaagaacaacaagagcuggauggaaagcgaguuccggguguacagcagcgccaacaacugcaccuucgaguacgugucccagccuuuccugauggaccuggaaggcaagcagggcaacuucaagaaccugcgcgaguucguguucaagaacaucgacggcuacuucaaaaucuacagcaagcacaccccuaucaaccucgugcgggaucugccucagggcuucucugcucuggaaccccugguggaucugcccaucggcaucaacaucacccgguuucagacacugcuggcccugcacagaagcuaccugacaccuggcgauagcagcagcggauggacagcuggugccgccgcuuacuaugugggcuaccugcagccuagaaccuuccugcugaaguacaacgagaacggcaccaucaccgacgccguggauugugcucuggauccucugagcgagacaaagugcacccugaaguccuucaccguggaaaagggcaucuaccagaccagcaacuuccgggugcagcccaccgaauccaucgugcgguuccccaauaucaccaaucugugccccuucggcgagguguucaaugccaccagauucgccucuguguacgccuggaaccggaagcggaucagcaauugcguggccgacuacuccgugcuguacaacuccgccagcuucagcaccuucaagugcuacggcguguccccuaccaagcugaacgaccugugcuucacaaacguguacgccgacagcuucgugauccggggagaugaagugcggcagauugccccuggacagacaggcaagaucgccgacuacaacuacaagcugcccgacgacuucaccggcugugugauugccuggaacagcaacaaccuggacuccaaagucggcggcaacuacaauuaccuguaccggcuguuccggaaguccaaucugaagcccuucgagcgggacaucagcaccgaaaucuaucaggccggcagcaccccuugcaacggcguggaaggcuucaacugcuacuucccacugcaguccuacggcuuucagcccacauacggcgugggcuaucagcccuacagagugguggugcugagcuucgaacugcugcaugcuccugccacagugugcggcccuaagaaaagcaccaaucucgugaagaacaaaugcgugaacuucaacuucaacggccugaccggcaccggcgugcugacagagagcaacaagaaguuccugccauuccagcaguuuggccgggauaucgccgauaccacagacgccguuagagauccccagacacuggaaauccuggacaucaccccaugcagcuucggcggagugucugugaucaccccuggcaccaacaccagcaaucagguggcagugcuguaccagggcgugaacuguaccgaagugcccguggccauucacgccgaucagcugacaccuacauggcggguguacuccaccggcagcaauguguuucagaccagagccggcugucugaucggagccgagcacgugaacaauagcuacgagugcgacauccccaucggcgcuggcaucugugccagcuaccagacacagacaaacagccccagacgggcuagaagcguggccagccagagcaucauugccuacacaaugucucugggcgccgagaacagcguggccuacuccaacaacucuaucgcuauccccaccaacuucaccaucagcgugaccaccgagauccugccuguguccaugaccaagaccagcguggacugcaccauguacaucugcggcgauuccaccgagugcuccaaccugcugcugcaguacggcagcuucugcacccagcugaauagagcccugacagggaucgccguggaacaggacaagaacacccaagagguguucgcccaagugaagcaaaucuacaagaccccuccuaucaaggacuucggcggcuucaauuucagccagauucugcccgauccuagcaagcccagcaagcggagcuucaucgaggaccugcuguucaacaaagugacacuggccgacgccggcuucaucaagcaguauggcgauugucugggcgacauugccgccagggaucugauuugcgcccagaaguuuaacggacugacagugcugccuccucugcugaccgaugagaugaucgcccaguacacaucugcccugcuggccggcacaaucacaagcggcuggacauuuggagcuggcgccgcucugcagauccccuuugcuaugcagauggccuaccgguucaacggcaucggagugacccagaaugugcuguacgagaaccagaagcugaucgccaaccaguucaacagcgccaucggcaagauccaggacagccugagcagcacagcaagcgcccugggaaagcugcaggacguggucaaccagaaugcccaggcacugaacacccuggucaagcagcuguccuccaacuucggcgccaucagcucugugcugaacgauauccugagcagacuggacccuccugaggccgaggugcagaucgacagacugaucacaggcagacugcagagccuccagacauacgugacccagcagcugaucagagccgccgagauuagagccucugccaaucuggccgccaccaagaugucugagugugugcugggccagagcaagagaguggacuuuugcggcaagggcuaccaccugaugagcuucccucagucugccccucacggcgugguguuucugcacgugacauaugugcccgcucaagagaagaauuucaccaccgcuccagccaucugccacgacggcaaagcccacuuuccuagagaaggcguguucguguccaacggcacccauugguucgugacacagcggaacuucuacgagccccagaucaucaccaccgacaacaccuucgugucuggcaacugcgacguugugaucggcauugugaacaauaccguguacgacccucugcagcccgagcuggacagcuucaaagaggaacuggacaaguacuuuaagaaccacacaagccccgacguggaccugggcgauaucagcggaaucaaugccagcgucgugaacauccagaaagagaucgaccggcugaacgagguggccaagaaucugaacgagagccugaucgaccugcaagaacuggggaaguacgagcaguacaucaaguggcccugguacaucuggcugggcuuuaucgccggacugauugccaucgugauggucacaaucaugcuguguugcaugaccagcugcuguagcugccugaagggcuguuguagcuguggcagcugcugcaaguucgacgaggacgauucugagcccgugcugaagggcgugaaacugcacuacaccugaggacuaguuauaagacugacuagcccgaugggccucccaacgggcccuccuccccuccuugcaccgagauuaaucaaaggcucuuuucagagccaccaaaaaaaaaaaaaaaaaaaaaaaaaaaaaaaaaaaaaaaaaaaaaaaaaaaaaaaaaaaaaaaaaaaaaaaaaaaaaaaaaaaaaaaaaaaaaaaaaaaaa

SEQ ID NO: 24255 - RNA, 4029 nt, Artificial Sequence
  SARS-CoV-2/Wuhan/WIV05/2019__EPI_ISL_402128 spike protein mRNA gc mod (1-1273)(K986P_V987P_H69del_V70del_D614G)
aggagaaagcuuaccauguucguguuucuggugcugcugccccugguguccagccagugugugaaccugaccaccagaacacagcugccuccagccuacaccaacagcuucaccagaggcguguacuaccccgacaagguguucagauccagcgugcugcacucuacccaggaccuguuccugccuuucuucagcaacgugaccugguuccacgccaucuccggcaccaauggcaccaagagauucgacaaccccgugcugcccuucaacgacgggguguacuuugccagcaccgagaaguccaacaucaucagaggcuggaucuucggcaccacacuggacagcaagacccagagccugcugaucgugaacaacgccaccaacguggucaucaaagugugcgaguuccaguucugcaacgaccccuuccugggcgucuacuaccacaagaacaacaagagcuggauggaaagcgaguuccggguguacagcagcgccaacaacugcaccuucgaguacgugucccagccuuuccugauggaccuggaaggcaagcagggcaacuucaagaaccugcgcgaguucguguucaagaacaucgacggcuacuucaaaaucuacagcaagcacaccccuaucaaccucgugcgggaucugccucagggcuucucugcucuggaaccccugguggaucugcccaucggcaucaacaucacccgguuucagacacugcuggcccugcacagaagcuaccugacaccuggcgauagcagcagcggauggacagcuggugccgccgcuuacuaugugggcuaccugcagccuagaaccuuccugcugaaguacaacgagaacggcaccaucaccgacgccguggauugugcucuggauccucugagcgagacaaagugcacccugaaguccuucaccguggaaaagggcaucuaccagaccagcaacuuccgggugcagcccaccgaauccaucgugcgguuccccaauaucaccaaucugugccccuucggcgagguguucaaugccaccagauucgccucuguguacgccuggaaccggaagcggaucagcaauugcguggccgacuacuccgugcuguacaacuccgccagcuucagcaccuucaagugcuacggcguguccccuaccaagcugaacgaccugugcuucacaaacguguacgccgacagcuucgugauccggggagaugaagugcggcagauugccccuggacagacaggcaagaucgccgacuacaacuacaagcugcccgacgacuucaccggcugugugauugccuggaacagcaacaaccuggacuccaaagucggcggcaacuacaauuaccuguaccggcuguuccggaaguccaaucugaagcccuucgagcgggacaucagcaccgaaaucuaucaggccggcagcaccccuugcaacggcguggaaggcuucaacugcuacuucccacugcaguccuacggcuuucagcccacaaauggcgugggcuaucagcccuacagagugguggugcugagcuucgaacugcugcaugcuccugccacagugugcggcccuaagaaaagcaccaaucucgugaagaacaaaugcgugaacuucaacuucaacggccugaccggcaccggcgugcugacagagagcaacaagaaguuccugccauuccagcaguuuggccgggauaucgccgauaccacagacgccguuagagauccccagacacuggaaauccuggacaucaccccaugcagcuucggcggagugucugugaucaccccuggcaccaacaccagcaaucagguggcagugcuguaccagggcgugaacuguaccgaagugcccguggccauucacgccgaucagcugacaccuacauggcggguguacuccaccggcagcaauguguuucagaccagagccggcugucugaucggagccgagcacgugaacaauagcuacgagugcgacauccccaucggcgcuggcaucugugccagcuaccagacacagacaaacagccccagacgggcuagaagcguggccagccagagcaucauugccuacacaaugucucugggcgccgagaacagcguggccuacuccaacaacucuaucgcuauccccaccaacuucaccaucagcgugaccaccgagauccugccuguguccaugaccaagaccagcguggacugcaccauguacaucugcggcgauuccaccgagugcuccaaccugcugcugcaguacggcagcuucugcacccagcugaauagagcccugacagggaucgccguggaacaggacaagaacacccaagagguguucgcccaagugaagcaaaucuacaagaccccuccuaucaaggacuucggcggcuucaauuucagccagauucugcccgauccuagcaagcccagcaagcggagcuucaucgaggaccugcuguucaacaaagugacacuggccgacgccggcuucaucaagcaguauggcgauugucugggcgacauugccgccagggaucugauuugcgcccagaaguuuaacggacugacagugcugccuccucugcugaccgaugagaugaucgcccaguacacaucugcccugcuggccggcacaaucacaagcggcuggacauuuggagcuggcgccgcucugcagauccccuuugcuaugcagauggccuaccgguucaacggcaucggagugacccagaaugugcuguacgagaaccagaagcugaucgccaaccaguucaacagcgccaucggcaagauccaggacagccugagcagcacagcaagcgcccugggaaagcugcaggacguggucaaccagaaugcccaggcacugaacacccuggucaagcagcuguccuccaacuucggcgccaucagcucugugcugaacgauauccugagcagacuggacccuccugaggccgaggugcagaucgacagacugaucacaggcagacugcagagccuccagacauacgugacccagcagcugaucagagccgccgagauuagagccucugccaaucuggccgccaccaagaugucugagugugugcugggccagagcaagagaguggacuuuugcggcaagggcuaccaccugaugagcuucccucagucugccccucacggcgugguguuucugcacgugacauaugugcccgcucaagagaagaauuucaccaccgcuccagccaucugccacgacggcaaagcccacuuuccuagagaaggcguguucguguccaacggcacccauugguucgugacacagcggaacuucuacgagccccagaucaucaccaccgacaacaccuucgugucuggcaacugcgacguugugaucggcauugugaacaauaccguguacgacccucugcagcccgagcuggacagcuucaaagaggaacuggacaaguacuuuaagaaccacacaagccccgacguggaccugggcgauaucagcggaaucaaugccagcgucgugaacauccagaaagagaucgaccggcugaacgagguggccaagaaucugaacgagagccugaucgaccugcaagaacuggggaaguacgagcaguacaucaaguggcccugguacaucuggcugggcuuuaucgccggacugauugccaucgugauggucacaaucaugcuguguugcaugaccagcugcuguagcugccugaagggcuguuguagcuguggcagcugcugcaaguucgacgaggacgauucugagcccgugcugaagggcgugaaacugcacuacaccugaggacuaguuauaagacugacuagcccgaugggccucccaacgggcccuccuccccuccuugcaccgagauuaaucaaaggcucuuuucagagccaccaaaaaaaaaaaaaaaaaaaaaaaaaaaaaaaaaaaaaaaaaaaaaaaaaaaaaaaaaaaaaaaaaaaaaaaaaaaaaaaaaaaaaaaaaaaaaaaaaaaaa

SEQ ID NO: 24256 - RNA, 4035 nt, Artificial Sequence
  SARS-CoV-2/Wuhan/WIV05/2019__EPI_ISL_402128 spike protein mRNA gc mod (1-1273)(K986P_V987P_Y453F_D614G)
aggagaaagcuuaccauguucguguuucuggugcugcugccccugguguccagccagugugugaaccugaccaccagaacacagcugccuccagccuacaccaacagcuucaccagaggcguguacuaccccgacaagguguucagauccagcgugcugcacucuacccaggaccuguuccugccuuucuucagcaacgugaccugguuccacgccauccacguguccggcaccaauggcaccaagagauucgacaaccccgugcugcccuucaacgacgggguguacuuugccagcaccgagaaguccaacaucaucagaggcuggaucuucggcaccacacuggacagcaagacccagagccugcugaucgugaacaacgccaccaacguggucaucaaagugugcgaguuccaguucugcaacgaccccuuccugggcgucuacuaccacaagaacaacaagagcuggauggaaagcgaguuccggguguacagcagcgccaacaacugcaccuucgaguacgugucccagccuuuccugauggaccuggaaggcaagcagggcaacuucaagaaccugcgcgaguucguguucaagaacaucgacggcuacuucaaaaucuacagcaagcacaccccuaucaaccucgugcgggaucugccucagggcuucucugcucuggaaccccugguggaucugcccaucggcaucaacaucacccgguuucagacacugcuggcccugcacagaagcuaccugacaccuggcgauagcagcagcggauggacagcuggugccgccgcuuacuaugugggcuaccugcagccuagaaccuuccugcugaaguacaacgagaacggcaccaucaccgacgccguggauugugcucuggauccucugagcgagacaaagugcacccugaaguccuucaccguggaaaagggcaucuaccagaccagcaacuuccgggugcagcccaccgaauccaucgugcgguuccccaauaucaccaaucugugccccuucggcgagguguucaaugccaccagauucgccucuguguacgccuggaaccggaagcggaucagcaauugcguggccgacuacuccgugcuguacaacuccgccagcuucagcaccuucaagugcuacggcguguccccuaccaagcugaacgaccugugcuucacaaacguguacgccgacagcuucgugauccggggagaugaagugcggcagauugccccuggacagacaggcaagaucgccgacuacaacuacaagcugcccgacgacuucaccggcugugugauugccuggaacagcaacaaccuggacuccaaagucggcggcaacuacaauuaccuguuccggcuguuccggaaguccaaucugaagcccuucgagcgggacaucagcaccgaaaucuaucaggccggcagcaccccuugcaacggcguggaaggcuucaacugcuacuucccacugcaguccuacggcuuucagcccacaaauggcgugggcuaucagcccuacagagugguggugcugagcuucgaacugcugcaugcuccugccacagugugcggcccuaagaaaagcaccaaucucgugaagaacaaaugcgugaacuucaacuucaacggccugaccggcaccggcgugcugacagagagcaacaagaaguuccugccauuccagcaguuuggccgggauaucgccgauaccacagacgccguuagagauccccagacacuggaaauccuggacaucaccccaugcagcuucggcggagugucugugaucaccccuggcaccaacaccagcaaucagguggcagugcuguaccagggcgugaacuguaccgaagugcccguggccauucacgccgaucagcugacaccuacauggcggguguacuccaccggcagcaauguguuucagaccagagccggcugucugaucggagccgagcacgugaacaauagcuacgagugcgacauccccaucggcgcuggcaucugugccagcuaccagacacagacaaacagccccagacgggcuagaagcguggccagccagagcaucauugccuacacaaugucucugggcgccgagaacagcguggccuacuccaacaacucuaucgcuauccccaccaacuucaccaucagcgugaccaccgagauccugccuguguccaugaccaagaccagcguggacugcaccauguacaucugcggcgauuccaccgagugcuccaaccugcugcugcaguacggcagcuucugcacccagcugaauagagcccugacagggaucgccguggaacaggacaagaacacccaagagguguucgcccaagugaagcaaaucuacaagaccccuccuaucaaggacuucggcggcuucaauuucagccagauucugcccgauccuagcaagcccagcaagcggagcuucaucgaggaccugcuguucaacaaagugacacuggccgacgccggcuucaucaagcaguauggcgauugucugggcgacauugccgccagggaucugauuugcgcccagaaguuuaacggacugacagugcugccuccucugcugaccgaugagaugaucgcccaguacacaucugcccugcuggccggcacaaucacaagcggcuggacauuuggagcuggcgccgcucugcagauccccuuugcuaugcagauggccuaccgguucaacggcaucggagugacccagaaugugcuguacgagaaccagaagcugaucgccaaccaguucaacagcgccaucggcaagauccaggacagccugagcagcacagcaagcgcccugggaaagcugcaggacguggucaaccagaaugcccaggcacugaacacccuggucaagcagcuguccuccaacuucggcgccaucagcucugugcugaacgauauccugagcagacuggacccuccugaggccgaggugcagaucgacagacugaucacaggcagacugcagagccuccagacauacgugacccagcagcugaucagagccgccgagauuagagccucugccaaucuggccgccaccaagaugucugagugugugcugggccagagcaagagaguggacuuuugcggcaagggcuaccaccugaugagcuucccucagucugccccucacggcgugguguuucugcacgugacauaugugcccgcucaagagaagaauuucaccaccgcuccagccaucugccacgacggcaaagcccacuuuccuagagaaggcguguucguguccaacggcacccauugguucgugacacagcggaacuucuacgagccccagaucaucaccaccgacaacaccuucgugucuggcaacugcgacguugugaucggcauugugaacaauaccguguacgacccucugcagcccgagcuggacagcuucaaagaggaacuggacaaguacuuuaagaaccacacaagccccgacguggaccugggcgauaucagcggaaucaaugccagcgucgugaacauccagaaagagaucgaccggcugaacgagguggccaagaaucugaacgagagccugaucgaccugcaagaacuggggaaguacgagcaguacaucaaguggcccugguacaucuggcugggcuuuaucgccggacugauugccaucgugauggucacaaucaugcuguguugcaugaccagcugcuguagcugccugaagggcuguuguagcuguggcagcugcugcaaguucgacgaggacgauucugagcccgugcugaagggcgugaaacugcacuacaccugaggacuaguuauaagacugacuagcccgaugggccucccaacgggcccuccuccccuccuugcaccgagauuaaucaaaggcucuuuucagagccaccaaaaaaaaaaaaaaaaaaaaaaaaaaaaaaaaaaaaaaaaaaaaaaaaaaaaaaaaaaaaaaaaaaaaaaaaaaaaaaaaaaaaaaaaaaaaaaaaaaaaa

SEQ ID NO: 24257 - RNA, 4035 nt, Artificial Sequence
  SARS-CoV-2/Wuhan/WIV05/2019__EPI_ISL_402128 spike protein mRNA gc mod (1-1273)(K986P_V987P_D614G_I692V)
aggagaaagcuuaccauguucguguuucuggugcugcugccccugguguccagccagugugugaaccugaccaccagaacacagcugccuccagccuacaccaacagcuucaccagaggcguguacuaccccgacaagguguucagauccagcgugcugcacucuacccaggaccuguuccugccuuucuucagcaacgugaccugguuccacgccauccacguguccggcaccaauggcaccaagagauucgacaaccccgugcugcccuucaacgacgggguguacuuugccagcaccgagaaguccaacaucaucagaggcuggaucuucggcaccacacuggacagcaagacccagagccugcugaucgugaacaacgccaccaacguggucaucaaagugugcgaguuccaguucugcaacgaccccuuccugggcgucuacuaccacaagaacaacaagagcuggauggaaagcgaguuccggguguacagcagcgccaacaacugcaccuucgaguacgugucccagccuuuccugauggaccuggaaggcaagcagggcaacuucaagaaccugcgcgaguucguguucaagaacaucgacggcuacuucaaaaucuacagcaagcacaccccuaucaaccucgugcgggaucugccucagggcuucucugcucuggaaccccugguggaucugcccaucggcaucaacaucacccgguuucagacacugcuggcccugcacagaagcuaccugacaccuggcgauagcagcagcggauggacagcuggugccgccgcuuacuaugugggcuaccugcagccuagaaccuuccugcugaaguacaacgagaacggcaccaucaccgacgccguggauugugcucuggauccucugagcgagacaaagugcacccugaaguccuucaccguggaaaagggcaucuaccagaccagcaacuuccgggugcagcccaccgaauccaucgugcgguuccccaauaucaccaaucugugccccuucggcgagguguucaaugccaccagauucgccucuguguacgccuggaaccggaagcggaucagcaauugcguggccgacuacuccgugcuguacaacuccgccagcuucagcaccuucaagugcuacggcguguccccuaccaagcugaacgaccugugcuucacaaacguguacgccgacagcuucgugauccggggagaugaagugcggcagauugccccuggacagacaggcaagaucgccgacuacaacuacaagcugcccgacgacuucaccggcugugugauugccuggaacagcaacaaccuggacuccaaagucggcggcaacuacaauuaccuguaccggcuguuccggaaguccaaucugaagcccuucgagcgggacaucagcaccgaaaucuaucaggccggcagcaccccuugcaacggcguggaaggcuucaacugcuacuucccacugcaguccuacggcuuucagcccacaaauggcgugggcuaucagcccuacagagugguggugcugagcuucgaacugcugcaugcuccugccacagugugcggcccuaagaaaagcaccaaucucgugaagaacaaaugcgugaacuucaacuucaacggccugaccggcaccggcgugcugacagagagcaacaagaaguuccugccauuccagcaguuuggccgggauaucgccgauaccacagacgccguuagagauccccagacacuggaaauccuggacaucaccccaugcagcuucggcggagugucugugaucaccccuggcaccaacaccagcaaucagguggcagugcuguaccagggcgugaacuguaccgaagugcccguggccauucacgccgaucagcugacaccuacauggcggguguacuccaccggcagcaauguguuucagaccagagccggcugucugaucggagccgagcacgugaacaauagcuacgagugcgacauccccaucggcgcuggcaucugugccagcuaccagacacagacaaacagccccagacgggcuagaagcguggccagccagagcgugauugccuacacaaugucucugggcgccgagaacagcguggccuacuccaacaacucuaucgcuauccccaccaacuucaccaucagcgugaccaccgagauccugccuguguccaugaccaagaccagcguggacugcaccauguacaucugcggcgauuccaccgagugcuccaaccugcugcugcaguacggcagcuucugcacccagcugaauagagcccugacagggaucgccguggaacaggacaagaacacccaagagguguucgcccaagugaagcaaaucuacaagaccccuccuaucaaggacuucggcggcuucaauuucagccagauucugcccgauccuagcaagcccagcaagcggagcuucaucgaggaccugcuguucaacaaagugacacuggccgacgccggcuucaucaagcaguauggcgauugucugggcgacauugccgccagggaucugauuugcgcccagaaguuuaacggacugacagugcugccuccucugcugaccgaugagaugaucgcccaguacacaucugcccugcuggccggcacaaucacaagcggcuggacauuuggagcuggcgccgcucugcagauccccuuugcuaugcagauggccuaccgguucaacggcaucggagugacccagaaugugcuguacgagaaccagaagcugaucgccaaccaguucaacagcgccaucggcaagauccaggacagccugagcagcacagcaagcgcccugggaaagcugcaggacguggucaaccagaaugcccaggcacugaacacccuggucaagcagcuguccuccaacuucggcgccaucagcucugugcugaacgauauccugagcagacuggacccuccugaggccgaggugcagaucgacagacugaucacaggcagacugcagagccuccagacauacgugacccagcagcugaucagagccgccgagauuagagccucugccaaucuggccgccaccaagaugucugagugugugcugggccagagcaagagaguggacuuuugcggcaagggcuaccaccugaugagcuucccucagucugccccucacggcgugguguuucugcacgugacauaugugcccgcucaagagaagaauuucaccaccgcuccagccaucugccacgacggcaaagcccacuuuccuagagaaggcguguucguguccaacggcacccauugguucgugacacagcggaacuucuacgagccccagaucaucaccaccgacaacaccuucgugucuggcaacugcgacguugugaucggcauugugaacaauaccguguacgacccucugcagcccgagcuggacagcuucaaagaggaacuggacaaguacuuuaagaaccacacaagccccgacguggaccugggcgauaucagcggaaucaaugccagcgucgugaacauccagaaagagaucgaccggcugaacgagguggccaagaaucugaacgagagccugaucgaccugcaagaacuggggaaguacgagcaguacaucaaguggcccugguacaucuggcugggcuuuaucgccggacugauugccaucgugauggucacaaucaugcuguguugcaugaccagcugcuguagcugccugaagggcuguuguagcuguggcagcugcugcaaguucgacgaggacgauucugagcccgugcugaagggcgugaaacugcacuacaccugaggacuaguuauaagacugacuagcccgaugggccucccaacgggcccuccuccccuccuugcaccgagauuaaucaaaggcucuuuucagagccaccaaaaaaaaaaaaaaaaaaaaaaaaaaaaaaaaaaaaaaaaaaaaaaaaaaaaaaaaaaaaaaaaaaaaaaaaaaaaaaaaaaaaaaaaaaaaaaaaaaaaa

SEQ ID NO: 24258 - RNA, 4035 nt, Artificial Sequence
  SARS-CoV-2/Wuhan/WIV05/2019__EPI_ISL_402128 spike protein mRNA gc mod (1-1273)(K986P_V987P_D614G_M1229I)
aggagaaagcuuaccauguucguguuucuggugcugcugccccugguguccagccagugugugaaccugaccaccagaacacagcugccuccagccuacaccaacagcuucaccagaggcguguacuaccccgacaagguguucagauccagcgugcugcacucuacccaggaccuguuccugccuuucuucagcaacgugaccugguuccacgccauccacguguccggcaccaauggcaccaagagauucgacaaccccgugcugcccuucaacgacgggguguacuuugccagcaccgagaaguccaacaucaucagaggcuggaucuucggcaccacacuggacagcaagacccagagccugcugaucgugaacaacgccaccaacguggucaucaaagugugcgaguuccaguucugcaacgaccccuuccugggcgucuacuaccacaagaacaacaagagcuggauggaaagcgaguuccggguguacagcagcgccaacaacugcaccuucgaguacgugucccagccuuuccugauggaccuggaaggcaagcagggcaacuucaagaaccugcgcgaguucguguucaagaacaucgacggcuacuucaaaaucuacagcaagcacaccccuaucaaccucgugcgggaucugccucagggcuucucugcucuggaaccccugguggaucugcccaucggcaucaacaucacccgguuucagacacugcuggcccugcacagaagcuaccugacaccuggcgauagcagcagcggauggacagcuggugccgccgcuuacuaugugggcuaccugcagccuagaaccuuccugcugaaguacaacgagaacggcaccaucaccgacgccguggauugugcucuggauccucugagcgagacaaagugcacccugaaguccuucaccguggaaaagggcaucuaccagaccagcaacuuccgggugcagcccaccgaauccaucgugcgguuccccaauaucaccaaucugugccccuucggcgagguguucaaugccaccagauucgccucuguguacgccuggaaccggaagcggaucagcaauugcguggccgacuacuccgugcuguacaacuccgccagcuucagcaccuucaagugcuacggcguguccccuaccaagcugaacgaccugugcuucacaaacguguacgccgacagcuucgugauccggggagaugaagugcggcagauugccccuggacagacaggcaagaucgccgacuacaacuacaagcugcccgacgacuucaccggcugugugauugccuggaacagcaacaaccuggacuccaaagucggcggcaacuacaauuaccuguaccggcuguuccggaaguccaaucugaagcccuucgagcgggacaucagcaccgaaaucuaucaggccggcagcaccccuugcaacggcguggaaggcuucaacugcuacuucccacugcaguccuacggcuuucagcccacaaauggcgugggcuaucagcccuacagagugguggugcugagcuucgaacugcugcaugcuccugccacagugugcggcccuaagaaaagcaccaaucucgugaagaacaaaugcgugaacuucaacuucaacggccugaccggcaccggcgugcugacagagagcaacaagaaguuccugccauuccagcaguuuggccgggauaucgccgauaccacagacgccguuagagauccccagacacuggaaauccuggacaucaccccaugcagcuucggcggagugucugugaucaccccuggcaccaacaccagcaaucagguggcagugcuguaccagggcgugaacuguaccgaagugcccguggccauucacgccgaucagcugacaccuacauggcggguguacuccaccggcagcaauguguuucagaccagagccggcugucugaucggagccgagcacgugaacaauagcuacgagugcgacauccccaucggcgcuggcaucugugccagcuaccagacacagacaaacagccccagacgggcuagaagcguggccagccagagcaucauugccuacacaaugucucugggcgccgagaacagcguggccuacuccaacaacucuaucgcuauccccaccaacuucaccaucagcgugaccaccgagauccugccuguguccaugaccaagaccagcguggacugcaccauguacaucugcggcgauuccaccgagugcuccaaccugcugcugcaguacggcagcuucugcacccagcugaauagagcccugacagggaucgccguggaacaggacaagaacacccaagagguguucgcccaagugaagcaaaucuacaagaccccuccuaucaaggacuucggcggcuucaauuucagccagauucugcccgauccuagcaagcccagcaagcggagcuucaucgaggaccugcuguucaacaaagugacacuggccgacgccggcuucaucaagcaguauggcgauugucugggcgacauugccgccagggaucugauuugcgcccagaaguuuaacggacugacagugcugccuccucugcugaccgaugagaugaucgcccaguacacaucugcccugcuggccggcacaaucacaagcggcuggacauuuggagcuggcgccgcucugcagauccccuuugcuaugcagauggccuaccgguucaacggcaucggagugacccagaaugugcuguacgagaaccagaagcugaucgccaaccaguucaacagcgccaucggcaagauccaggacagccugagcagcacagcaagcgcccugggaaagcugcaggacguggucaaccagaaugcccaggcacugaacacccuggucaagcagcuguccuccaacuucggcgccaucagcucugugcugaacgauauccugagcagacuggacccuccugaggccgaggugcagaucgacagacugaucacaggcagacugcagagccuccagacauacgugacccagcagcugaucagagccgccgagauuagagccucugccaaucuggccgccaccaagaugucugagugugugcugggccagagcaagagaguggacuuuugcggcaagggcuaccaccugaugagcuucccucagucugccccucacggcgugguguuucugcacgugacauaugugcccgcucaagagaagaauuucaccaccgcuccagccaucugccacgacggcaaagcccacuuuccuagagaaggcguguucguguccaacggcacccauugguucgugacacagcggaacuucuacgagccccagaucaucaccaccgacaacaccuucgugucuggcaacugcgacguugugaucggcauugugaacaauaccguguacgacccucugcagcccgagcuggacagcuucaaagaggaacuggacaaguacuuuaagaaccacacaagccccgacguggaccugggcgauaucagcggaaucaaugccagcgucgugaacauccagaaagagaucgaccggcugaacgagguggccaagaaucugaacgagagccugaucgaccugcaagaacuggggaaguacgagcaguacaucaaguggcccugguacaucuggcugggcuuuaucgccggacugauugccaucgugaucgucacaaucaugcuguguugcaugaccagcugcuguagcugccugaagggcuguuguagcuguggcagcugcugcaaguucgacgaggacgauucugagcccgugcugaagggcgugaaacugcacuacaccugaggacuaguuauaagacugacuagcccgaugggccucccaacgggcccuccuccccuccuugcaccgagauuaaucaaaggcucuuuucagagccaccaaaaaaaaaaaaaaaaaaaaaaaaaaaaaaaaaaaaaaaaaaaaaaaaaaaaaaaaaaaaaaaaaaaaaaaaaaaaaaaaaaaaaaaaaaaaaaaaaaaaa

SEQ ID NO: 24259 - RNA, 4029 nt, Artificial Sequence
  SARS-CoV-2/Wuhan/WIV05/2019__EPI_ISL_402128 spike protein mRNA gc mod (1-1273)(K986P_V987P_H69del_V70del_A222V_Y453F_S477N_D614G_I692V)
aggagaaagcuuaccauguucguguuucuggugcugcugccccugguguccagccagugugugaaccugaccaccagaacacagcugccuccagccuacaccaacagcuucaccagaggcguguacuaccccgacaagguguucagauccagcgugcugcacucuacccaggaccuguuccugccuuucuucagcaacgugaccugguuccacgccaucuccggcaccaauggcaccaagagauucgacaaccccgugcugcccuucaacgacgggguguacuuugccagcaccgagaaguccaacaucaucagaggcuggaucuucggcaccacacuggacagcaagacccagagccugcugaucgugaacaacgccaccaacguggucaucaaagugugcgaguuccaguucugcaacgaccccuuccugggcgucuacuaccacaagaacaacaagagcuggauggaaagcgaguuccggguguacagcagcgccaacaacugcaccuucgaguacgugucccagccuuuccugauggaccuggaaggcaagcagggcaacuucaagaaccugcgcgaguucguguucaagaacaucgacggcuacuucaaaaucuacagcaagcacaccccuaucaaccucgugcgggaucugccucagggcuucucugugcuggaaccccugguggaucugcccaucggcaucaacaucacccgguuucagacacugcuggcccugcacagaagcuaccugacaccuggcgauagcagcagcggauggacagcuggugccgccgcuuacuaugugggcuaccugcagccuagaaccuuccugcugaaguacaacgagaacggcaccaucaccgacgccguggauugugcucuggauccucugagcgagacaaagugcacccugaaguccuucaccguggaaaagggcaucuaccagaccagcaacuuccgggugcagcccaccgaauccaucgugcgguuccccaauaucaccaaucugugccccuucggcgagguguucaaugccaccagauucgccucuguguacgccuggaaccggaagcggaucagcaauugcguggccgacuacuccgugcuguacaacuccgccagcuucagcaccuucaagugcuacggcguguccccuaccaagcugaacgaccugugcuucacaaacguguacgccgacagcuucgugauccggggagaugaagugcggcagauugccccuggacagacaggcaagaucgccgacuacaacuacaagcugcccgacgacuucaccggcugugugauugccuggaacagcaacaaccuggacuccaaagucggcggcaacuacaauuaccuguuccggcuguuccggaaguccaaucugaagcccuucgagcgggacaucagcaccgaaaucuaucaggccggcaacaccccuugcaacggcguggaaggcuucaacugcuacuucccacugcaguccuacggcuuucagcccacaaauggcgugggcuaucagcccuacagagugguggugcugagcuucgaacugcugcaugcuccugccacagugugcggcccuaagaaaagcaccaaucucgugaagaacaaaugcgugaacuucaacuucaacggccugaccggcaccggcgugcugacagagagcaacaagaaguuccugccauuccagcaguuuggccgggauaucgccgauaccacagacgccguuagagauccccagacacuggaaauccuggacaucaccccaugcagcuucggcggagugucugugaucaccccuggcaccaacaccagcaaucagguggcagugcuguaccagggcgugaacuguaccgaagugcccguggccauucacgccgaucagcugacaccuacauggcggguguacuccaccggcagcaauguguuucagaccagagccggcugucugaucggagccgagcacgugaacaauagcuacgagugcgacauccccaucggcgcuggcaucugugccagcuaccagacacagacaaacagccccagacgggcuagaagcguggccagccagagcgugauugccuacacaaugucucugggcgccgagaacagcguggccuacuccaacaacucuaucgcuauccccaccaacuucaccaucagcgugaccaccgagauccugccuguguccaugaccaagaccagcguggacugcaccauguacaucugcggcgauuccaccgagugcuccaaccugcugcugcaguacggcagcuucugcacccagcugaauagagcccugacagggaucgccguggaacaggacaagaacacccaagagguguucgcccaagugaagcaaaucuacaagaccccuccuaucaaggacuucggcggcuucaauuucagccagauucugcccgauccuagcaagcccagcaagcggagcuucaucgaggaccugcuguucaacaaagugacacuggccgacgccggcuucaucaagcaguauggcgauugucugggcgacauugccgccagggaucugauuugcgcccagaaguuuaacggacugacagugcugccuccucugcugaccgaugagaugaucgcccaguacacaucugcccugcuggccggcacaaucacaagcggcuggacauuuggagcuggcgccgcucugcagauccccuuugcuaugcagauggccuaccgguucaacggcaucggagugacccagaaugugcuguacgagaaccagaagcugaucgccaaccaguucaacagcgccaucggcaagauccaggacagccugagcagcacagcaagcgcccugggaaagcugcaggacguggucaaccagaaugcccaggcacugaacacccuggucaagcagcuguccuccaacuucggcgccaucagcucugugcugaacgauauccugagcagacuggacccuccugaggccgaggugcagaucgacagacugaucacaggcagacugcagagccuccagacauacgugacccagcagcugaucagagccgccgagauuagagccucugccaaucuggccgccaccaagaugucugagugugugcugggccagagcaagagaguggacuuuugcggcaagggcuaccaccugaugagcuucccucagucugccccucacggcgugguguuucugcacgugacauaugugcccgcucaagagaagaauuucaccaccgcuccagccaucugccacgacggcaaagcccacuuuccuagagaaggcguguucguguccaacggcacccauugguucgugacacagcggaacuucuacgagccccagaucaucaccaccgacaacaccuucgugucuggcaacugcgacguugugaucggcauugugaacaauaccguguacgacccucugcagcccgagcuggacagcuucaaagaggaacuggacaaguacuuuaagaaccacacaagccccgacguggaccugggcgauaucagcggaaucaaugccagcgucgugaacauccagaaagagaucgaccggcugaacgagguggccaagaaucugaacgagagccugaucgaccugcaagaacuggggaaguacgagcaguacaucaaguggcccugguacaucuggcugggcuuuaucgccggacugauugccaucgugauggucacaaucaugcuguguugcaugaccagcugcuguagcugccugaagggcuguuguagcuguggcagcugcugcaaguucgacgaggacgauucugagcccgugcugaagggcgugaaacugcacuacaccugaggacuaguuauaagacugacuagcccgaugggccucccaacgggcccuccuccccuccuugcaccgagauuaaucaaaggcucuuuucagagccaccaaaaaaaaaaaaaaaaaaaaaaaaaaaaaaaaaaaaaaaaaaaaaaaaaaaaaaaaaaaaaaaaaaaaaaaaaaaaaaaaaaaaaaaaaaaaaaaaaaaaa

SEQ ID NO: 24260 - RNA, 4029 nt, Artificial Sequence
  SARS-CoV-2/Wuhan/WIV05/2019__EPI_ISL_402128 spike protein mRNA gc mod (1-1273)(K986P_V987P_H69del_V70del_Y453F_D614G_I692V_M1229I)
aggagaaagcuuaccauguucguguuucuggugcugcugccccugguguccagccagugugugaaccugaccaccagaacacagcugccuccagccuacaccaacagcuucaccagaggcguguacuaccccgacaagguguucagauccagcgugcugcacucuacccaggaccuguuccugccuuucuucagcaacgugaccugguuccacgccaucuccggcaccaauggcaccaagagauucgacaaccccgugcugcccuucaacgacgggguguacuuugccagcaccgagaaguccaacaucaucagaggcuggaucuucggcaccacacuggacagcaagacccagagccugcugaucgugaacaacgccaccaacguggucaucaaagugugcgaguuccaguucugcaacgaccccuuccugggcgucuacuaccacaagaacaacaagagcuggauggaaagcgaguuccggguguacagcagcgccaacaacugcaccuucgaguacgugucccagccuuuccugauggaccuggaaggcaagcagggcaacuucaagaaccugcgcgaguucguguucaagaacaucgacggcuacuucaaaaucuacagcaagcacaccccuaucaaccucgugcgggaucugccucagggcuucucugcucuggaaccccugguggaucugcccaucggcaucaacaucacccgguuucagacacugcuggcccugcacagaagcuaccugacaccuggcgauagcagcagcggauggacagcuggugccgccgcuuacuaugugggcuaccugcagccuagaaccuuccugcugaaguacaacgagaacggcaccaucaccgacgccguggauugugcucuggauccucugagcgagacaaagugcacccugaaguccuucaccguggaaaagggcaucuaccagaccagcaacuuccgggugcagcccaccgaauccaucgugcgguuccccaauaucaccaaucugugccccuucggcgagguguucaaugccaccagauucgccucuguguacgccuggaaccggaagcggaucagcaauugcguggccgacuacuccgugcuguacaacuccgccagcuucagcaccuucaagugcuacggcguguccccuaccaagcugaacgaccugugcuucacaaacguguacgccgacagcuucgugauccggggagaugaagugcggcagauugccccuggacagacaggcaagaucgccgacuacaacuacaagcugcccgacgacuucaccggcugugugauugccuggaacagcaacaaccuggacuccaaagucggcggcaacuacaauuaccuguuccggcuguuccggaaguccaaucugaagcccuucgagcgggacaucagcaccgaaaucuaucaggccggcagcaccccuugcaacggcguggaaggcuucaacugcuacuucccacugcaguccuacggcuuucagcccacaaauggcgugggcuaucagcccuacagagugguggugcugagcuucgaacugcugcaugcuccugccacagugugcggcccuaagaaaagcaccaaucucgugaagaacaaaugcgugaacuucaacuucaacggccugaccggcaccggcgugcugacagagagcaacaagaaguuccugccauuccagcaguuuggccgggauaucgccgauaccacagacgccguuagagauccccagacacuggaaauccuggacaucaccccaugcagcuucggcggagugucugugaucaccccuggcaccaacaccagcaaucagguggcagugcuguaccagggcgugaacuguaccgaagugcccguggccauucacgccgaucagcugacaccuacauggcggguguacuccaccggcagcaauguguuucagaccagagccggcugucugaucggagccgagcacgugaacaauagcuacgagugcgacauccccaucggcgcuggcaucugugccagcuaccagacacagacaaacagccccagacgggcuagaagcguggccagccagagcgugauugccuacacaaugucucugggcgccgagaacagcguggccuacuccaacaacucuaucgcuauccccaccaacuucaccaucagcgugaccaccgagauccugccuguguccaugaccaagaccagcguggacugcaccauguacaucugcggcgauuccaccgagugcuccaaccugcugcugcaguacggcagcuucugcacccagcugaauagagcccugacagggaucgccguggaacaggacaagaacacccaagagguguucgcccaagugaagcaaaucuacaagaccccuccuaucaaggacuucggcggcuucaauuucagccagauucugcccgauccuagcaagcccagcaagcggagcuucaucgaggaccugcuguucaacaaagugacacuggccgacgccggcuucaucaagcaguauggcgauugucugggcgacauugccgccagggaucugauuugcgcccagaaguuuaacggacugacagugcugccuccucugcugaccgaugagaugaucgcccaguacacaucugcccugcuggccggcacaaucacaagcggcuggacauuuggagcuggcgccgcucugcagauccccuuugcuaugcagauggccuaccgguucaacggcaucggagugacccagaaugugcuguacgagaaccagaagcugaucgccaaccaguucaacagcgccaucggcaagauccaggacagccugagcagcacagcaagcgcccugggaaagcugcaggacguggucaaccagaaugcccaggcacugaacacccuggucaagcagcuguccuccaacuucggcgccaucagcucugugcugaacgauauccugagcagacuggacccuccugaggccgaggugcagaucgacagacugaucacaggcagacugcagagccuccagacauacgugacccagcagcugaucagagccgccgagauuagagccucugccaaucuggccgccaccaagaugucugagugugugcugggccagagcaagagaguggacuuuugcggcaagggcuaccaccugaugagcuucccucagucugccccucacggcgugguguuucugcacgugacauaugugcccgcucaagagaagaauuucaccaccgcuccagccaucugccacgacggcaaagcccacuuuccuagagaaggcguguucguguccaacggcacccauugguucgugacacagcggaacuucuacgagccccagaucaucaccaccgacaacaccuucgugucuggcaacugcgacguugugaucggcauugugaacaauaccguguacgacccucugcagcccgagcuggacagcuucaaagaggaacuggacaaguacuuuaagaaccacacaagccccgacguggaccugggcgauaucagcggaaucaaugccagcgucgugaacauccagaaagagaucgaccggcugaacgagguggccaagaaucugaacgagagccugaucgaccugcaagaacuggggaaguacgagcaguacaucaaguggcccugguacaucuggcugggcuuuaucgccggacugauugccaucgugaucgucacaaucaugcuguguugcaugaccagcugcuguagcugccugaagggcuguuguagcuguggcagcugcugcaaguucgacgaggacgauucugagcccgugcugaagggcgugaaacugcacuacaccugaggacuaguuauaagacugacuagcccgaugggccucccaacgggcccuccuccccuccuugcaccgagauuaaucaaaggcucuuuucagagccaccaaaaaaaaaaaaaaaaaaaaaaaaaaaaaaaaaaaaaaaaaaaaaaaaaaaaaaaaaaaaaaaaaaaaaaaaaaaaaaaaaaaaaaaaaaaaaaaaaaaaa

SEQ ID NO: 24261 - RNA, 4026 nt, Artificial Sequence
  SARS-CoV-2/Wuhan/WIV05/2019__EPI_ISL_402128 spike protein mRNA gc mod (1-1273)(K986P_V987P_K986P_V987P_H69del_V70del_Y144del_N501Y_A570 D_D614G_P681H_T716I_S982A_D1118H)
aggagaaagcuuaccauguucguguuucuggugcugcugccccugguguccagccagugugugaaccugaccaccagaacacagcugccuccagccuacaccaacagcuucaccagaggcguguacuaccccgacaagguguucagauccagcgugcugcacucuacccaggaccuguuccugccuuucuucagcaacgugaccugguuccacgccaucuccggcaccaauggcaccaagagauucgacaaccccgugcugcccuucaacgacgggguguacuuugccagcaccgagaaguccaacaucaucagaggcuggaucuucggcaccacacuggacagcaagacccagagccugcugaucgugaacaacgccaccaacguggucaucaaagugugcgaguuccaguucugcaacgaccccuuccugggcgucuaccacaagaacaacaagagcuggauggaaagcgaguuccggguguacagcagcgccaacaacugcaccuucgaguacgugucccagccuuuccugauggaccuggaaggcaagcagggcaacuucaagaaccugcgcgaguucguguucaagaacaucgacggcuacuucaaaaucuacagcaagcacaccccuaucaaccucgugcgggaucugccucagggcuucucugcucuggaaccccugguggaucugcccaucggcaucaacaucacccgguuucagacacugcuggcccugcacagaagcuaccugacaccuggcgauagcagcagcggauggacagcuggugccgccgcuuacuaugugggcuaccugcagccuagaaccuuccugcugaaguacaacgagaacggcaccaucaccgacgccguggauugugcucuggauccucugagcgagacaaagugcacccugaaguccuucaccguggaaaagggcaucuaccagaccagcaacuuccgggugcagcccaccgaauccaucgugcgguuccccaauaucaccaaucugugccccuucggcgagguguucaaugccaccagauucgccucuguguacgccuggaaccggaagcggaucagcaauugcguggccgacuacuccgugcuguacaacuccgccagcuucagcaccuucaagugcuacggcguguccccuaccaagcugaacgaccugugcuucacaaacguguacgccgacagcuucgugauccggggagaugaagugcggcagauugccccuggacagacaggcaagaucgccgacuacaacuacaagcugcccgacgacuucaccggcugugugauugccuggaacagcaacaaccuggacuccaaagucggcggcaacuacaauuaccuguaccggcuguuccggaaguccaaucugaagcccuucgagcgggacaucagcaccgaaaucuaucaggccggcagcaccccuugcaacggcguggaaggcuucaacugcuacuucccacugcaguccuacggcuuucagcccacauacggcgugggcuaucagcccuacagagugguggugcugagcuucgaacugcugcaugcuccugccacagugugcggcccuaagaaaagcaccaaucucgugaagaacaaaugcgugaacuucaacuucaacggccugaccggcaccggcgugcugacagagagcaacaagaaguuccugccauuccagcaguuuggccgggauaucgacgauaccacagacgccguuagagauccccagacacuggaaauccuggacaucaccccaugcagcuucggcggagugucugugaucaccccuggcaccaacaccagcaaucagguggcagugcuguaccagggcgugaacuguaccgaagugcccguggccauucacgccgaucagcugacaccuacauggcggguguacuccaccggcagcaauguguuucagaccagagccggcugucugaucggagccgagcacgugaacaauagcuacgagugcgacauccccaucggcgcuggcaucugugccagcuaccagacacagacaaacagccacagacgggcuagaagcguggccagccagagcaucauugccuacacaaugucucugggcgccgagaacagcguggccuacuccaacaacucuaucgcuauccccaucaacuucaccaucagcgugaccaccgagauccugccuguguccaugaccaagaccagcguggacugcaccauguacaucugcggcgauuccaccgagugcuccaaccugcugcugcaguacggcagcuucugcacccagcugaauagagcccugacagggaucgccguggaacaggacaagaacacccaagagguguucgcccaagugaagcaaaucuacaagaccccuccuaucaaggacuucggcggcuucaauuucagccagauucugcccgauccuagcaagcccagcaagcggagcuucaucgaggaccugcuguucaacaaagugacacuggccgacgccggcuucaucaagcaguauggcgauugucugggcgacauugccgccagggaucugauuugcgcccagaaguuuaacggacugacagugcugccuccucugcugaccgaugagaugaucgcccaguacacaucugcccugcuggccggcacaaucacaagcggcuggacauuuggagcuggcgccgcucugcagauccccuuugcuaugcagauggccuaccgguucaacggcaucggagugacccagaaugugcuguacgagaaccagaagcugaucgccaaccaguucaacagcgccaucggcaagauccaggacagccugagcagcacagcaagcgcccugggaaagcugcaggacguggucaaccagaaugcccaggcacugaacacccuggucaagcagcuguccuccaacuucggcgccaucagcucugugcugaacgauauccuggccagacuggacccuccugaggccgaggugcagaucgacagacugaucacaggcagacugcagagccuccagacauacgugacccagcagcugaucagagccgccgagauuagagccucugccaaucuggccgccaccaagaugucugagugugugcugggccagagcaagagaguggacuuuugcggcaagggcuaccaccugaugagcuucccucagucugccccucacggcgugguguuucugcacgugacauaugugcccgcucaagagaagaauuucaccaccgcuccagccaucugccacgacggcaaagcccacuuuccuagagaaggcguguucguguccaacggcacccauugguucgugacacagcggaacuucuacgagccccagaucaucaccacccacaacaccuucgugucuggcaacugcgacguugugaucggcauugugaacaauaccguguacgacccucugcagcccgagcuggacagcuucaaagaggaacuggacaaguacuuuaagaaccacacaagccccgacguggaccugggcgauaucagcggaaucaaugccagcgucgugaacauccagaaagagaucgaccggcugaacgagguggccaagaaucugaacgagagccugaucgaccugcaagaacuggggaaguacgagcaguacaucaaguggcccugguacaucuggcugggcuuuaucgccggacugauugccaucgugauggucacaaucaugcuguguugcaugaccagcugcuguagcugccugaagggcuguuguagcuguggcagcugcugcaaguucgacgaggacgauucugagcccgugcugaagggcgugaaacugcacuacaccugaggacuaguuauaagacugacuagcccgaugggccucccaacgggcccuccuccccuccuugcaccgagauuaaucaaaggcucuuuucagagccaccaaaaaaaaaaaaaaaaaaaaaaaaaaaaaaaaaaaaaaaaaaaaaaaaaaaaaaaaaaaaaaaaaaaaaaaaaaaaaaaaaaaaaaaaaaaaaaaaaaaaa

SEQ ID NO: 24262 - RNA, 4035 nt, Artificial Sequence
  SARS-CoV-2/Wuhan/WIV05/2019__EPI_ISL_402128 spike protein mRNA gc mod (1-1273)(K986P_V987P_K986P_V987P_K417N_E484K_N501Y_D614G)
aggagaaagcuuaccauguucguguuucuggugcugcugccccugguguccagccagugugugaaccugaccaccagaacacagcugccuccagccuacaccaacagcuucaccagaggcguguacuaccccgacaagguguucagauccagcgugcugcacucuacccaggaccuguuccugccuuucuucagcaacgugaccugguuccacgccauccacguguccggcaccaauggcaccaagagauucgacaaccccgugcugcccuucaacgacgggguguacuuugccagcaccgagaaguccaacaucaucagaggcuggaucuucggcaccacacuggacagcaagacccagagccugcugaucgugaacaacgccaccaacguggucaucaaagugugcgaguuccaguucugcaacgaccccuuccugggcgucuacuaccacaagaacaacaagagcuggauggaaagcgaguuccggguguacagcagcgccaacaacugcaccuucgaguacgugucccagccuuuccugauggaccuggaaggcaagcagggcaacuucaagaaccugcgcgaguucguguucaagaacaucgacggcuacuucaaaaucuacagcaagcacaccccuaucaaccucgugcgggaucugccucagggcuucucugcucuggaaccccugguggaucugcccaucggcaucaacaucacccgguuucagacacugcuggcccugcacagaagcuaccugacaccuggcgauagcagcagcggauggacagcuggugccgccgcuuacuaugugggcuaccugcagccuagaaccuuccugcugaaguacaacgagaacggcaccaucaccgacgccguggauugugcucuggauccucugagcgagacaaagugcacccugaaguccuucaccguggaaaagggcaucuaccagaccagcaacuuccgggugcagcccaccgaauccaucgugcgguuccccaauaucaccaaucugugccccuucggcgagguguucaaugccaccagauucgccucuguguacgccuggaaccggaagcggaucagcaauugcguggccgacuacuccgugcuguacaacuccgccagcuucagcaccuucaagugcuacggcguguccccuaccaagcugaacgaccugugcuucacaaacguguacgccgacagcuucgugauccggggagaugaagugcggcagauugccccuggacagacaggcaacaucgccgacuacaacuacaagcugcccgacgacuucaccggcugugugauugccuggaacagcaacaaccuggacuccaaagucggcggcaacuacaauuaccuguaccggcuguuccggaaguccaaucugaagcccuucgagcgggacaucagcaccgaaaucuaucaggccggcagcaccccuugcaacggcgugaagggcuucaacugcuacuucccacugcaguccuacggcuuucagcccacauacggcgugggcuaucagcccuacagagugguggugcugagcuucgaacugcugcaugcuccugccacagugugcggcccuaagaaaagcaccaaucucgugaagaacaaaugcgugaacuucaacuucaacggccugaccggcaccggcgugcugacagagagcaacaagaaguuccugccauuccagcaguuuggccgggauaucgccgauaccacagacgccguuagagauccccagacacuggaaauccuggacaucaccccaugcagcuucggcggagugucugugaucaccccuggcaccaacaccagcaaucagguggcagugcuguaccagggcgugaacuguaccgaagugcccguggccauucacgccgaucagcugacaccuacauggcggguguacuccaccggcagcaauguguuucagaccagagccggcugucugaucggagccgagcacgugaacaauagcuacgagugcgacauccccaucggcgcuggcaucugugccagcuaccagacacagacaaacagccccagacgggcuagaagcguggccagccagagcaucauugccuacacaaugucucugggcgccgagaacagcguggccuacuccaacaacucuaucgcuauccccaccaacuucaccaucagcgugaccaccgagauccugccuguguccaugaccaagaccagcguggacugcaccauguacaucugcggcgauuccaccgagugcuccaaccugcugcugcaguacggcagcuucugcacccagcugaauagagcccugacagggaucgccguggaacaggacaagaacacccaagagguguucgcccaagugaagcaaaucuacaagaccccuccuaucaaggacuucggcggcuucaauuucagccagauucugcccgauccuagcaagcccagcaagcggagcuucaucgaggaccugcuguucaacaaagugacacuggccgacgccggcuucaucaagcaguauggcgauugucugggcgacauugccgccagggaucugauuugcgcccagaaguuuaacggacugacagugcugccuccucugcugaccgaugagaugaucgcccaguacacaucugcccugcuggccggcacaaucacaagcggcuggacauuuggagcuggcgccgcucugcagauccccuuugcuaugcagauggccuaccgguucaacggcaucggagugacccagaaugugcuguacgagaaccagaagcugaucgccaaccaguucaacagcgccaucggcaagauccaggacagccugagcagcacagcaagcgcccugggaaagcugcaggacguggucaaccagaaugcccaggcacugaacacccuggucaagcagcuguccuccaacuucggcgccaucagcucugugcugaacgauauccugagcagacuggacccuccugaggccgaggugcagaucgacagacugaucacaggcagacugcagagccuccagacauacgugacccagcagcugaucagagccgccgagauuagagccucugccaaucuggccgccaccaagaugucugagugugugcugggccagagcaagagaguggacuuuugcggcaagggcuaccaccugaugagcuucccucagucugccccucacggcgugguguuucugcacgugacauaugugcccgcucaagagaagaauuucaccaccgcuccagccaucugccacgacggcaaagcccacuuuccuagagaaggcguguucguguccaacggcacccauugguucgugacacagcggaacuucuacgagccccagaucaucaccaccgacaacaccuucgugucuggcaacugcgacguugugaucggcauugugaacaauaccguguacgacccucugcagcccgagcuggacagcuucaaagaggaacuggacaaguacuuuaagaaccacacaagccccgacguggaccugggcgauaucagcggaaucaaugccagcgucgugaacauccagaaagagaucgaccggcugaacgagguggccaagaaucugaacgagagccugaucgaccugcaagaacuggggaaguacgagcaguacaucaaguggcccugguacaucuggcugggcuuuaucgccggacugauugccaucgugauggucacaaucaugcuguguugcaugaccagcugcuguagcugccugaagggcuguuguagcuguggcagcugcugcaaguucgacgaggacgauucugagcccgugcugaagggcgugaaacugcacuacaccugaggacuaguuauaagacugacuagcccgaugggccucccaacgggcccuccuccccuccuugcaccgagauuaaucaaaggcucuuuucagagccaccaaaaaaaaaaaaaaaaaaaaaaaaaaaaaaaaaaaaaaaaaaaaaaaaaaaaaaaaaaaaaaaaaaaaaaaaaaaaaaaaaaaaaaaaaaaaaaaaaaaaa

SEQ ID NO: 24263 - RNA, 4026 nt, Artificial Sequence
  SARS-CoV-2/Wuhan/WIV05/2019__EPI_ISL_402128 spike protein mRNA gc mod (1-1273)(K986P_V987P_K986P_V987P_L18F_D80A_D215G_L242del_A243del_ L244del_R246I_K417N_E484K_N501Y_D614G_A701V)
aggagaaagcuuaccauguucguguuucuggugcugcugccccugguguccagccagugugugaacuucaccaccagaacacagcugccuccagccuacaccaacagcuucaccagaggcguguacuaccccgacaagguguucagauccagcgugcugcacucuacccaggaccuguuccugccuuucuucagcaacgugaccugguuccacgccauccacguguccggcaccaauggcaccaagagauucgccaaccccgugcugcccuucaacgacgggguguacuuugccagcaccgagaaguccaacaucaucagaggcuggaucuucggcaccacacuggacagcaagacccagagccugcugaucgugaacaacgccaccaacguggucaucaaagugugcgaguuccaguucugcaacgaccccuuccugggcgucuacuaccacaagaacaacaagagcuggauggaaagcgaguuccggguguacagcagcgccaacaacugcaccuucgaguacgugucccagccuuuccugauggaccuggaaggcaagcagggcaacuucaagaaccugcgcgaguucguguucaagaacaucgacggcuacuucaaaaucuacagcaagcacaccccuaucaaccucgugcggggccugccucagggcuucucugcucuggaaccccugguggaucugcccaucggcaucaacaucacccgguuucagacacugcacaucagcuaccugacaccuggcgauagcagcagcggauggacagcuggugccgccgcuuacuaugugggcuaccugcagccuagaaccuuccugcugaaguacaacgagaacggcaccaucaccgacgccguggauugugcucuggauccucugagcgagacaaagugcacccugaaguccuucaccguggaaaagggcaucuaccagaccagcaacuuccgggugcagcccaccgaauccaucgugcgguuccccaauaucaccaaucugugccccuucggcgagguguucaaugccaccagauucgccucuguguacgccuggaaccggaagcggaucagcaauugcguggccgacuacuccgugcuguacaacuccgccagcuucagcaccuucaagugcuacggcguguccccuaccaagcugaacgaccugugcuucacaaacguguacgccgacagcuucgugauccggggagaugaagugcggcagauugccccuggacagacaggcaacaucgccgacuacaacuacaagcugcccgacgacuucaccggcugugugauugccuggaacagcaacaaccuggacuccaaagucggcggcaacuacaauuaccuguaccggcuguuccggaaguccaaucugaagcccuucgagcgggacaucagcaccgaaaucuaucaggccggcagcaccccuugcaacggcgugaagggcuucaacugcuacuucccacugcaguccuacggcuuucagcccacauacggcgugggcuaucagcccuacagagugguggugcugagcuucgaacugcugcaugcuccugccacagugugcggcccuaagaaaagcaccaaucucgugaagaacaaaugcgugaacuucaacuucaacggccugaccggcaccggcgugcugacagagagcaacaagaaguuccugccauuccagcaguuuggccgggauaucgccgauaccacagacgccguuagagauccccagacacuggaaauccuggacaucaccccaugcagcuucggcggagugucugugaucaccccuggcaccaacaccagcaaucagguggcagugcuguaccagggcgugaacuguaccgaagugcccguggccauucacgccgaucagcugacaccuacauggcggguguacuccaccggcagcaauguguuucagaccagagccggcugucugaucggagccgagcacgugaacaauagcuacgagugcgacauccccaucggcgcuggcaucugugccagcuaccagacacagacaaacagccccagacgggcuagaagcguggccagccagagcaucauugccuacacaaugucucugggcguggagaacagcguggccuacuccaacaacucuaucgcuauccccaccaacuucaccaucagcgugaccaccgagauccugccuguguccaugaccaagaccagcguggacugcaccauguacaucugcggcgauuccaccgagugcuccaaccugcugcugcaguacggcagcuucugcacccagcugaauagagcccugacagggaucgccguggaacaggacaagaacacccaagagguguucgcccaagugaagcaaaucuacaagaccccuccuaucaaggacuucggcggcuucaauuucagccagauucugcccgauccuagcaagcccagcaagcggagcuucaucgaggaccugcuguucaacaaagugacacuggccgacgccggcuucaucaagcaguauggcgauugucugggcgacauugccgccagggaucugauuugcgcccagaaguuuaacggacugacagugcugccuccucugcugaccgaugagaugaucgcccaguacacaucugcccugcuggccggcacaaucacaagcggcuggacauuuggagcuggcgccgcucugcagauccccuuugcuaugcagauggccuaccgguucaacggcaucggagugacccagaaugugcuguacgagaaccagaagcugaucgccaaccaguucaacagcgccaucggcaagauccaggacagccugagcagcacagcaagcgcccugggaaagcugcaggacguggucaaccagaaugcccaggcacugaacacccuggucaagcagcuguccuccaacuucggcgccaucagcucugugcugaacgauauccugagcagacuggacccuccugaggccgaggugcagaucgacagacugaucacaggcagacugcagagccuccagacauacgugacccagcagcugaucagagccgccgagauuagagccucugccaaucuggccgccaccaagaugucugagugugugcugggccagagcaagagaguggacuuuugcggcaagggcuaccaccugaugagcuucccucagucugccccucacggcgugguguuucugcacgugacauaugugcccgcucaagagaagaauuucaccaccgcuccagccaucugccacgacggcaaagcccacuuuccuagagaaggcguguucguguccaacggcacccauugguucgugacacagcggaacuucuacgagccccagaucaucaccaccgacaacaccuucgugucuggcaacugcgacguugugaucggcauugugaacaauaccguguacgacccucugcagcccgagcuggacagcuucaaagaggaacuggacaaguacuuuaagaaccacacaagccccgacguggaccugggcgauaucagcggaaucaaugccagcgucgugaacauccagaaagagaucgaccggcugaacgagguggccaagaaucugaacgagagccugaucgaccugcaagaacuggggaaguacgagcaguacaucaaguggcccugguacaucuggcugggcuuuaucgccggacugauugccaucgugauggucacaaucaugcuguguugcaugaccagcugcuguagcugccugaagggcuguuguagcuguggcagcugcugcaaguucgacgaggacgauucugagcccgugcugaagggcgugaaacugcacuacaccugaggacuaguuauaagacugacuagcccgaugggccucccaacgggcccuccuccccuccuugcaccgagauuaaucaaaggcucuuuucagagccaccaaaaaaaaaaaaaaaaaaaaaaaaaaaaaaaaaaaaaaaaaaaaaaaaaaaaaaaaaaaaaaaaaaaaaaaaaaaaaaaaaaaaaaaaaaaaaaaaaaaaa

SEQ ID NO: 24264 - RNA, 4035 nt, Artificial Sequence
  SARS-CoV-2/Wuhan/WIV05/2019__EPI_ISL_402128 spike protein mRNA gc mod (1-1273)(K986P_V987P_K986P_V987P_E484K_D614G)
aggagaaagcuuaccauguucguguuucuggugcugcugccccugguguccagccagugugugaaccugaccaccagaacacagcugccuccagccuacaccaacagcuucaccagaggcguguacuaccccgacaagguguucagauccagcgugcugcacucuacccaggaccuguuccugccuuucuucagcaacgugaccugguuccacgccauccacguguccggcaccaauggcaccaagagauucgacaaccccgugcugcccuucaacgacgggguguacuuugccagcaccgagaaguccaacaucaucagaggcuggaucuucggcaccacacuggacagcaagacccagagccugcugaucgugaacaacgccaccaacguggucaucaaagugugcgaguuccaguucugcaacgaccccuuccugggcgucuacuaccacaagaacaacaagagcuggauggaaagcgaguuccggguguacagcagcgccaacaacugcaccuucgaguacgugucccagccuuuccugauggaccuggaaggcaagcagggcaacuucaagaaccugcgcgaguucguguucaagaacaucgacggcuacuucaaaaucuacagcaagcacaccccuaucaaccucgugcgggaucugccucagggcuucucugcucuggaaccccugguggaucugcccaucggcaucaacaucacccgguuucagacacugcuggcccugcacagaagcuaccugacaccuggcgauagcagcagcggauggacagcuggugccgccgcuuacuaugugggcuaccugcagccuagaaccuuccugcugaaguacaacgagaacggcaccaucaccgacgccguggauugugcucuggauccucugagcgagacaaagugcacccugaaguccuucaccguggaaaagggcaucuaccagaccagcaacuuccgggugcagcccaccgaauccaucgugcgguuccccaauaucaccaaucugugccccuucggcgagguguucaaugccaccagauucgccucuguguacgccuggaaccggaagcggaucagcaauugcguggccgacuacuccgugcuguacaacuccgccagcuucagcaccuucaagugcuacggcguguccccuaccaagcugaacgaccugugcuucacaaacguguacgccgacagcuucgugauccggggagaugaagugcggcagauugccccuggacagacaggcaagaucgccgacuacaacuacaagcugcccgacgacuucaccggcugugugauugccuggaacagcaacaaccuggacuccaaagucggcggcaacuacaauuaccuguaccggcuguuccggaaguccaaucugaagcccuucgagcgggacaucagcaccgaaaucuaucaggccggcagcaccccuugcaacggcgugaagggcuucaacugcuacuucccacugcaguccuacggcuuucagcccacaaauggcgugggcuaucagcccuacagagugguggugcugagcuucgaacugcugcaugcuccugccacagugugcggcccuaagaaaagcaccaaucucgugaagaacaaaugcgugaacuucaacuucaacggccugaccggcaccggcgugcugacagagagcaacaagaaguuccugccauuccagcaguuuggccgggauaucgccgauaccacagacgccguuagagauccccagacacuggaaauccuggacaucaccccaugcagcuucggcggagugucugugaucaccccuggcaccaacaccagcaaucagguggcagugcuguaccagggcgugaacuguaccgaagugcccguggccauucacgccgaucagcugacaccuacauggcggguguacuccaccggcagcaauguguuucagaccagagccggcugucugaucggagccgagcacgugaacaauagcuacgagugcgacauccccaucggcgcuggcaucugugccagcuaccagacacagacaaacagccccagacgggcuagaagcguggccagccagagcaucauugccuacacaaugucucugggcgccgagaacagcguggccuacuccaacaacucuaucgcuauccccaccaacuucaccaucagcgugaccaccgagauccugccuguguccaugaccaagaccagcguggacugcaccauguacaucugcggcgauuccaccgagugcuccaaccugcugcugcaguacggcagcuucugcacccagcugaauagagcccugacagggaucgccguggaacaggacaagaacacccaagagguguucgcccaagugaagcaaaucuacaagaccccuccuaucaaggacuucggcggcuucaauuucagccagauucugcccgauccuagcaagcccagcaagcggagcuucaucgaggaccugcuguucaacaaagugacacuggccgacgccggcuucaucaagcaguauggcgauugucugggcgacauugccgccagggaucugauuugcgcccagaaguuuaacggacugacagugcugccuccucugcugaccgaugagaugaucgcccaguacacaucugcccugcuggccggcacaaucacaagcggcuggacauuuggagcuggcgccgcucugcagauccccuuugcuaugcagauggccuaccgguucaacggcaucggagugacccagaaugugcuguacgagaaccagaagcugaucgccaaccaguucaacagcgccaucggcaagauccaggacagccugagcagcacagcaagcgcccugggaaagcugcaggacguggucaaccagaaugcccaggcacugaacacccuggucaagcagcuguccuccaacuucggcgccaucagcucugugcugaacgauauccugagcagacuggacccuccugaggccgaggugcagaucgacagacugaucacaggcagacugcagagccuccagacauacgugacccagcagcugaucagagccgccgagauuagagccucugccaaucuggccgccaccaagaugucugagugugugcugggccagagcaagagaguggacuuuugcggcaagggcuaccaccugaugagcuucccucagucugccccucacggcgugguguuucugcacgugacauaugugcccgcucaagagaagaauuucaccaccgcuccagccaucugccacgacggcaaagcccacuuuccuagagaaggcguguucguguccaacggcacccauugguucgugacacagcggaacuucuacgagccccagaucaucaccaccgacaacaccuucgugucuggcaacugcgacguugugaucggcauugugaacaauaccguguacgacccucugcagcccgagcuggacagcuucaaagaggaacuggacaaguacuuuaagaaccacacaagccccgacguggaccugggcgauaucagcggaaucaaugccagcgucgugaacauccagaaagagaucgaccggcugaacgagguggccaagaaucugaacgagagccugaucgaccugcaagaacuggggaaguacgagcaguacaucaaguggcccugguacaucuggcugggcuuuaucgccggacugauugccaucgugauggucacaaucaugcuguguugcaugaccagcugcuguagcugccugaagggcuguuguagcuguggcagcugcugcaaguucgacgaggacgauucugagcccgugcugaagggcgugaaacugcacuacaccugaggacuaguuauaagacugacuagcccgaugggccucccaacgggcccuccuccccuccuugcaccgagauuaaucaaaggcucuuuucagagccaccaaaaaaaaaaaaaaaaaaaaaaaaaaaaaaaaaaaaaaaaaaaaaaaaaaaaaaaaaaaaaaaaaaaaaaaaaaaaaaaaaaaaaaaaaaaaaaaaaaaaa

SEQ ID NO: 24265 - RNA, 4035 nt, Artificial Sequence
  SARS-CoV-2/Wuhan/WIV05/2019__EPI_ISL_402128 spike protein mRNA gc mod (1-1273)(K986P_V987P_K986P_V987P_L18F_T20N_P26S_D138Y_R190S_K417T _E484K_N501Y_D614G_H655Y_T1027I)
aggagaaagcuuaccauguucguguuucuggugcugcugccccugguguccagccagugugugaacuucaccaacagaacacagcugccuagcgccuacaccaacagcuucaccagaggcguguacuaccccgacaagguguucagauccagcgugcugcacucuacccaggaccuguuccugccuuucuucagcaacgugaccugguuccacgccauccacguguccggcaccaauggcaccaagagauucgacaaccccgugcugcccuucaacgacgggguguacuuugccagcaccgagaaguccaacaucaucagaggcuggaucuucggcaccacacuggacagcaagacccagagccugcugaucgugaacaacgccaccaacguggucaucaaagugugcgaguuccaguucugcaacuaccccuuccugggcgucuacuaccacaagaacaacaagagcuggauggaaagcgaguuccggguguacagcagcgccaacaacugcaccuucgaguacgugucccagccuuuccugauggaccuggaaggcaagcagggcaacuucaagaaccugagcgaguucguguucaagaacaucgacggcuacuucaaaaucuacagcaagcacaccccuaucaaccucgugcgggaucugccucagggcuucucugcucuggaaccccugguggaucugcccaucggcaucaacaucacccgguuucagacacugcuggcccugcacagaagcuaccugacaccuggcgauagcagcagcggauggacagcuggugccgccgcuuacuaugugggcuaccugcagccuagaaccuuccugcugaaguacaacgagaacggcaccaucaccgacgccguggauugugcucuggauccucugagcgagacaaagugcacccugaaguccuucaccguggaaaagggcaucuaccagaccagcaacuuccgggugcagcccaccgaauccaucgugcgguuccccaauaucaccaaucugugccccuucggcgagguguucaaugccaccagauucgccucuguguacgccuggaaccggaagcggaucagcaauugcguggccgacuacuccgugcuguacaacuccgccagcuucagcaccuucaagugcuacggcguguccccuaccaagcugaacgaccugugcuucacaaacguguacgccgacagcuucgugauccggggagaugaagugcggcagauugccccuggacagacaggcaccaucgccgacuacaacuacaagcugcccgacgacuucaccggcugugugauugccuggaacagcaacaaccuggacuccaaagucggcggcaacuacaauuaccuguaccggcuguuccggaaguccaaucugaagcccuucgagcgggacaucagcaccgaaaucuaucaggccggcagcaccccuugcaacggcgugaagggcuucaacugcuacuucccacugcaguccuacggcuuucagcccacauacggcgugggcuaucagcccuacagagugguggugcugagcuucgaacugcugcaugcuccugccacagugugcggcccuaagaaaagcaccaaucucgugaagaacaaaugcgugaacuucaacuucaacggccugaccggcaccggcgugcugacagagagcaacaagaaguuccugccauuccagcaguuuggccgggauaucgccgauaccacagacgccguuagagauccccagacacuggaaauccuggacaucaccccaugcagcuucggcggagugucugugaucaccccuggcaccaacaccagcaaucagguggcagugcuguaccagggcgugaacuguaccgaagugcccguggccauucacgccgaucagcugacaccuacauggcggguguacuccaccggcagcaauguguuucagaccagagccggcugucugaucggagccgaguacgugaacaauagcuacgagugcgacauccccaucggcgcuggcaucugugccagcuaccagacacagacaaacagccccagacgggcuagaagcguggccagccagagcaucauugccuacacaaugucucugggcgccgagaacagcguggccuacuccaacaacucuaucgcuauccccaccaacuucaccaucagcgugaccaccgagauccugccuguguccaugaccaagaccagcguggacugcaccauguacaucugcggcgauuccaccgagugcuccaaccugcugcugcaguacggcagcuucugcacccagcugaauagagcccugacagggaucgccguggaacaggacaagaacacccaagagguguucgcccaagugaagcaaaucuacaagaccccuccuaucaaggacuucggcggcuucaauuucagccagauucugcccgauccuagcaagcccagcaagcggagcuucaucgaggaccugcuguucaacaaagugacacuggccgacgccggcuucaucaagcaguauggcgauugucugggcgacauugccgccagggaucugauuugcgcccagaaguuuaacggacugacagugcugccuccucugcugaccgaugagaugaucgcccaguacacaucugcccugcuggccggcacaaucacaagcggcuggacauuuggagcuggcgccgcucugcagauccccuuugcuaugcagauggccuaccgguucaacggcaucggagugacccagaaugugcuguacgagaaccagaagcugaucgccaaccaguucaacagcgccaucggcaagauccaggacagccugagcagcacagcaagcgcccugggaaagcugcaggacguggucaaccagaaugcccaggcacugaacacccuggucaagcagcuguccuccaacuucggcgccaucagcucugugcugaacgauauccugagcagacuggacccuccugaggccgaggugcagaucgacagacugaucacaggcagacugcagagccuccagacauacgugacccagcagcugaucagagccgccgagauuagagccucugccaaucuggccgccaucaagaugucugagugugugcugggccagagcaagagaguggacuuuugcggcaagggcuaccaccugaugagcuucccucagucugccccucacggcgugguguuucugcacgugacauaugugcccgcucaagagaagaauuucaccaccgcuccagccaucugccacgacggcaaagcccacuuuccuagagaaggcguguucguguccaacggcacccauugguucgugacacagcggaacuucuacgagccccagaucaucaccaccgacaacaccuucgugucuggcaacugcgacguugugaucggcauugugaacaauaccguguacgacccucugcagcccgagcuggacagcuucaaagaggaacuggacaaguacuuuaagaaccacacaagccccgacguggaccugggcgauaucagcggaaucaaugccagcgucgugaacauccagaaagagaucgaccggcugaacgagguggccaagaaucugaacgagagccugaucgaccugcaagaacuggggaaguacgagcaguacaucaaguggcccugguacaucuggcugggcuuuaucgccggacugauugccaucgugauggucacaaucaugcuguguugcaugaccagcugcuguagcugccugaagggcuguuguagcuguggcagcugcugcaaguucgacgaggacgauucugagcccgugcugaagggcgugaaacugcacuacaccugaggacuaguuauaagacugacuagcccgaugggccucccaacgggcccuccuccccuccuugcaccgagauuaaucaaaggcucuuuucagagccaccaaaaaaaaaaaaaaaaaaaaaaaaaaaaaaaaaaaaaaaaaaaaaaaaaaaaaaaaaaaaaaaaaaaaaaaaaaaaaaaaaaaaaaaaaaaaaaaaaaaaa

SEQ ID NO: 24266 - RNA, 4035 nt, Artificial Sequence
  SARS-CoV-2/Wuhan/WIV05/2019__EPI_ISL_402128 spike protein mRNA gc mod (1-1273)(K986P_V987P_K986P_V987P_S13I_W152C_L452R_D614G)
aggagaaagcuuaccauguucguguuucuggugcugcugccccugguguccauccagugugugaaccugaccaccagaacacagcugccuccagccuacaccaacagcuucaccagaggcguguacuaccccgacaagguguucagauccagcgugcugcacucuacccaggaccuguuccugccuuucuucagcaacgugaccugguuccacgccauccacguguccggcaccaauggcaccaagagauucgacaaccccgugcugcccuucaacgacgggguguacuuugccagcaccgagaaguccaacaucaucagaggcuggaucuucggcaccacacuggacagcaagacccagagccugcugaucgugaacaacgccaccaacguggucaucaaagugugcgaguuccaguucugcaacgaccccuuccugggcgucuacuaccacaagaacaacaagagcugcauggaaagcgaguuccggguguacagcagcgccaacaacugcaccuucgaguacgugucccagccuuuccugauggaccuggaaggcaagcagggcaacuucaagaaccugcgcgaguucguguucaagaacaucgacggcuacuucaaaaucuacagcaagcacaccccuaucaaccucgugcgggaucugccucagggcuucucugcucuggaaccccugguggaucugcccaucggcaucaacaucacccgguuucagacacugcuggcccugcacagaagcuaccugacaccuggcgauagcagcagcggauggacagcuggugccgccgcuuacuaugugggcuaccugcagccuagaaccuuccugcugaaguacaacgagaacggcaccaucaccgacgccguggauugugcucuggauccucugagcgagacaaagugcacccugaaguccuucaccguggaaaagggcaucuaccagaccagcaacuuccgggugcagcccaccgaauccaucgugcgguuccccaauaucaccaaucugugccccuucggcgagguguucaaugccaccagauucgccucuguguacgccuggaaccggaagcggaucagcaauugcguggccgacuacuccgugcuguacaacuccgccagcuucagcaccuucaagugcuacggcguguccccuaccaagcugaacgaccugugcuucacaaacguguacgccgacagcuucgugauccggggagaugaagugcggcagauugccccuggacagacaggcaagaucgccgacuacaacuacaagcugcccgacgacuucaccggcugugugauugccuggaacagcaacaaccuggacuccaaagucggcggcaacuacaauuaccgcuaccggcuguuccggaaguccaaucugaagcccuucgagcgggacaucagcaccgaaaucuaucaggccggcagcaccccuugcaacggcguggaaggcuucaacugcuacuucccacugcaguccuacggcuuucagcccacaaauggcgugggcuaucagcccuacagagugguggugcugagcuucgaacugcugcaugcuccugccacagugugcggcccuaagaaaagcaccaaucucgugaagaacaaaugcgugaacuucaacuucaacggccugaccggcaccggcgugcugacagagagcaacaagaaguuccugccauuccagcaguuuggccgggauaucgccgauaccacagacgccguuagagauccccagacacuggaaauccuggacaucaccccaugcagcuucggcggagugucugugaucaccccuggcaccaacaccagcaaucagguggcagugcuguaccagggcgugaacuguaccgaagugcccguggccauucacgccgaucagcugacaccuacauggcggguguacuccaccggcagcaauguguuucagaccagagccggcugucugaucggagccgagcacgugaacaauagcuacgagugcgacauccccaucggcgcuggcaucugugccagcuaccagacacagacaaacagccccagacgggcuagaagcguggccagccagagcaucauugccuacacaaugucucugggcgccgagaacagcguggccuacuccaacaacucuaucgcuauccccaccaacuucaccaucagcgugaccaccgagauccugccuguguccaugaccaagaccagcguggacugcaccauguacaucugcggcgauuccaccgagugcuccaaccugcugcugcaguacggcagcuucugcacccagcugaauagagcccugacagggaucgccguggaacaggacaagaacacccaagagguguucgcccaagugaagcaaaucuacaagaccccuccuaucaaggacuucggcggcuucaauuucagccagauucugcccgauccuagcaagcccagcaagcggagcuucaucgaggaccugcuguucaacaaagugacacuggccgacgccggcuucaucaagcaguauggcgauugucugggcgacauugccgccagggaucugauuugcgcccagaaguuuaacggacugacagugcugccuccucugcugaccgaugagaugaucgcccaguacacaucugcccugcuggccggcacaaucacaagcggcuggacauuuggagcuggcgccgcucugcagauccccuuugcuaugcagauggccuaccgguucaacggcaucggagugacccagaaugugcuguacgagaaccagaagcugaucgccaaccaguucaacagcgccaucggcaagauccaggacagccugagcagcacagcaagcgcccugggaaagcugcaggacguggucaaccagaaugcccaggcacugaacacccuggucaagcagcuguccuccaacuucggcgccaucagcucugugcugaacgauauccugagcagacuggacccuccugaggccgaggugcagaucgacagacugaucacaggcagacugcagagccuccagacauacgugacccagcagcugaucagagccgccgagauuagagccucugccaaucuggccgccaccaagaugucugagugugugcugggccagagcaagagaguggacuuuugcggcaagggcuaccaccugaugagcuucccucagucugccccucacggcgugguguuucugcacgugacauaugugcccgcucaagagaagaauuucaccaccgcuccagccaucugccacgacggcaaagcccacuuuccuagagaaggcguguucguguccaacggcacccauugguucgugacacagcggaacuucuacgagccccagaucaucaccaccgacaacaccuucgugucuggcaacugcgacguugugaucggcauugugaacaauaccguguacgacccucugcagcccgagcuggacagcuucaaagaggaacuggacaaguacuuuaagaaccacacaagccccgacguggaccugggcgauaucagcggaaucaaugccagcgucgugaacauccagaaagagaucgaccggcugaacgagguggccaagaaucugaacgagagccugaucgaccugcaagaacuggggaaguacgagcaguacaucaaguggcccugguacaucuggcugggcuuuaucgccggacugauugccaucgugauggucacaaucaugcuguguugcaugaccagcugcuguagcugccugaagggcuguuguagcuguggcagcugcugcaaguucgacgaggacgauucugagcccgugcugaagggcgugaaacugcacuacaccugaggacuaguuauaagacugacuagcccgaugggccucccaacgggcccuccuccccuccuugcaccgagauuaaucaaaggcucuuuucagagccaccaaaaaaaaaaaaaaaaaaaaaaaaaaaaaaaaaaaaaaaaaaaaaaaaaaaaaaaaaaaaaaaaaaaaaaaaaaaaaaaaaaaaaaaaaaaaaaaaaaaaa

SEQ ID NO: 24267 - RNA, 4035 nt, Artificial Sequence
  SARS-CoV-2/Wuhan/WIV05/2019__EPI_ISL_402128 spike protein mRNA gc mod (1-1273)(K986P_V987P)
aggagaaagcuuaccauguucguguuccuggugcugcugccucugguguccagccagugugugaaccugaccaccagaacacagcugccuccagccuacaccaacagcuuuaccagaggcguguacuaccccgacaagguguucagauccagcgugcugcacucuacccaggaccuguuccugccuuucuucagcaacgugaccugguuccacgccauccacguguccggcaccaauggcaccaagagauucgacaaccccgugcugcccuucaacgacgggguguacuuugccagcaccgagaaguccaacaucaucagaggcuggaucuucggcaccacacuggacagcaagacccagagccugcugaucgugaacaacgccaccaacguggucaucaaagugugcgaguuccaguucugcaacgaccccuuccugggcgucuacuaccacaagaacaacaagagcuggauggaaagcgaguuccggguguacagcagcgccaacaacugcaccuucgaguacgugucccagccuuuccugauggaccuggaaggcaagcagggcaacuucaagaaccugcgcgaguucguguuuaagaacaucgacggcuacuucaagaucuacagcaagcacaccccuaucaaccucgugcgggaucugccucagggcuucucugcucuggaaccccugguggaucugcccaucggcaucaacaucacccgguuucagacacugcuggcccugcacagaagcuaccugacaccuggcgauagcagcagcggauggacagcuggugccgccgcuuacuaugugggcuaccugcagccuagaaccuuccugcugaaguacaacgagaacggcaccaucaccgacgccguggauugugcucuggauccucugagcgagacaaagugcacccugaaguccuucaccguggaaaagggcaucuaccagaccagcaacuuccgggugcagcccaccgaauccaucgugcgguuccccaauaucaccaaucugugccccuucggcgagguguucaaugccaccagauucgccucuguguacgccuggaaccggaagcggaucagcaauugcguggccgacuacuccgugcuguacaacuccgccagcuucagcaccuucaagugcuacggcguguccccuaccaagcugaacgaccugugcuucacaaacguguacgccgacagcuucgugauccggggagaugaagugcggcagauugccccuggacagacaggcaagaucgccgacuacaacuacaagcugcccgacgacuucaccggcugugugauugccuggaacagcaacaaccuggacuccaaagucggcggcaacuacaauuaccuguaccggcuguuccggaaguccaaucugaagcccuucgagcgggacaucuccaccgagaucuaucaggccggcagcaccccuuguaacggcguggaaggcuucaacugcuacuucccacugcaguccuacggcuuucagcccacaaauggcgugggcuaucagcccuacagagugguggugcugagcuucgaacugcugcaugccccugccacagugugcggcccuaagaaaagcaccaaucucgugaagaacaaaugcgugaacuucaacuucaacggccugaccggcaccggcgugcugacagagagcaacaagaaguuccugccauuccagcaguuuggccgggauaucgccgauaccacagacgccguuagagauccccagacacuggaaauccuggacaucaccccuugcagcuucggcggagugucugugaucaccccuggcaccaacaccagcaaucagguggcagugcuguaccaggacgugaacuguaccgaagugcccguggccauucacgccgaucagcugacaccuacauggcggguguacuccaccggcagcaauguguuucagaccagagccggcugucugaucggagccgagcacgugaacaauagcuacgagugcgacauccccaucggcgcuggaaucugcgccagcuaccagacacagacaaacagcccucggagagccagaagcguggccagccagagcaucauugccuacacaaugucucugggcgccgagaacagcguggccuacuccaacaacucuaucgcuauccccaccaacuucaccaucagcgugaccacagagauccugccuguguccaugaccaagaccagcguggacugcaccauguacaucugcggcgauuccaccgagugcuccaaccugcugcugcaguacggcagcuucugcacccagcugaauagagcccugacagggaucgccguggaacaggacaagaacacccaagagguguucgcccaagugaagcagaucuacaagaccccuccuaucaaggacuucggcggcuucaauuucagccagauucugcccgauccuagcaagcccagcaagcggagcuucaucgaggaccugcuguucaacaaagugacacuggccgacgccggcuucaucaagcaguauggcgauugucugggcgacauugccgccagggaucugauuugcgcccagaaguuuaacggacugacagugcugccuccucugcugaccgaugagaugaucgcccaguacacaucugcccugcuggccggcacaaucacaagcggcuggacauuuggagcaggcgccgcucugcagauccccuuugcuaugcagauggccuaccgguucaacggcaucggagugacccagaaugugcuguacgagaaccagaagcugaucgccaaccaguucaacagcgccaucggcaagauccaggacagccugagcagcacagcaagcgcccugggaaagcugcaggacguggucaaccagaaugcccaggcacugaacacccuggucaagcagcuguccuccaacuucggcgccaucagcucugugcugaacgauauccugagcagacuggacccuccugaggccgaggugcagaucgacagacugaucacaggcagacugcagagccuccagacauacgugacccagcagcugaucagagccgccgagauuagagccucugccaaucuggccgccaccaagaugucugagugugugcugggccagagcaagagaguggacuuuugcggcaagggcuaccaccugaugagcuucccucagucugccccucacggcgugguguuucugcacgugacauaugugcccgcucaagagaagaauuucaccaccgcuccagccaucugccacgacggcaaagcccacuuuccuagagaaggcguguucguguccaacggcacccauugguucgugacacagcggaacuucuacgagccccagaucaucaccaccgacaacaccuucgugucuggcaacugcgacgucgugaucggcauugugaacaauaccguguacgacccucugcagcccgagcuggacagcuucaaagaggaacuggacaaguacuuuaagaaccacacaagccccgacguggaccugggcgauaucagcggaaucaaugccagcgucgugaacauccagaaagagaucgaccggcugaacgagguggccaagaaucugaacgagagccugaucgaccugcaagaacuggggaaguacgagcaguacaucaaguggcccugguacaucuggcugggcuuuaucgccggacugauugccaucgugauggucacaaucaugcuguguugcaugaccagcugcuguagcugccugaagggcuguuguagcuguggcagcugcugcaaguucgacgaggacgauucugagcccgugcugaagggcgugaaacugcacuacacaugaggacuaguuauaagacugacuagcccgaugggccucccaacgggcccuccuccccuccuugcaccgagauuaaucaaaggcucuuuucagagccaccaaaaaaaaaaaaaaaaaaaaaaaaaaaaaaaaaaaaaaaaaaaaaaaaaaaaaaaaaaaaaaaaaaaaaaaaaaaaaaaaaaaaaaaaaaaaaaaaaaaaa

SEQ ID NO: 24268 - RNA, 4035 nt, Artificial Sequence
  SARS-CoV-2/Wuhan/WIV05/2019__EPI_ISL_402128 spike protein mRNA gc mod (1-1273)(K986P_V987P_ D614G)
aggagaaagcuuaccauguucguguuccuggugcugcugccucugguguccagccagugugugaaccugaccaccagaacacagcugccuccagccuacaccaacagcuuuaccagaggcguguacuaccccgacaagguguucagauccagcgugcugcacucuacccaggaccuguuccugccuuucuucagcaacgugaccugguuccacgccauccacguguccggcaccaauggcaccaagagauucgacaaccccgugcugcccuucaacgacgggguguacuuugccagcaccgagaaguccaacaucaucagaggcuggaucuucggcaccacacuggacagcaagacccagagccugcugaucgugaacaacgccaccaacguggucaucaaagugugcgaguuccaguucugcaacgaccccuuccugggcgucuacuaccacaagaacaacaagagcuggauggaaagcgaguuccggguguacagcagcgccaacaacugcaccuucgaguacgugucccagccuuuccugauggaccuggaaggcaagcagggcaacuucaagaaccugcgcgaguucguguuuaagaacaucgacggcuacuucaagaucuacagcaagcacaccccuaucaaccucgugcgggaucugccucagggcuucucugcucuggaaccccugguggaucugcccaucggcaucaacaucacccgguuucagacacugcuggcccugcacagaagcuaccugacaccuggcgauagcagcagcggauggacagcuggugccgccgcuuacuaugugggcuaccugcagccuagaaccuuccugcugaaguacaacgagaacggcaccaucaccgacgccguggauugugcucuggauccucugagcgagacaaagugcacccugaaguccuucaccguggaaaagggcaucuaccagaccagcaacuuccgggugcagcccaccgaauccaucgugcgguuccccaauaucaccaaucugugccccuucggcgagguguucaaugccaccagauucgccucuguguacgccuggaaccggaagcggaucagcaauugcguggccgacuacuccgugcuguacaacuccgccagcuucagcaccuucaagugcuacggcguguccccuaccaagcugaacgaccugugcuucacaaacguguacgccgacagcuucgugauccggggagaugaagugcggcagauugccccuggacagacaggcaagaucgccgacuacaacuacaagcugcccgacgacuucaccggcugugugauugccuggaacagcaacaaccuggacuccaaagucggcggcaacuacaauuaccuguaccggcuguuccggaaguccaaucugaagcccuucgagcgggacaucuccaccgagaucuaucaggccggcagcaccccuuguaacggcguggaaggcuucaacugcuacuucccacugcaguccuacggcuuucagcccacaaauggcgugggcuaucagcccuacagagugguggugcugagcuucgaacugcugcaugccccugccacagugugcggcccuaagaaaagcaccaaucucgugaagaacaaaugcgugaacuucaacuucaacggccugaccggcaccggcgugcugacagagagcaacaagaaguuccugccauuccagcaguuuggccgggauaucgccgauaccacagacgccguuagagauccccagacacuggaaauccuggacaucaccccuugcagcuucggcggagugucugugaucaccccuggcaccaacaccagcaaucagguggcagugcuguaccagggcgugaacuguaccgaagugcccguggccauucacgccgaucagcugacaccuacauggcggguguacuccaccggcagcaauguguuucagaccagagccggcugucugaucggagccgagcacgugaacaauagcuacgagugcgacauccccaucggcgcuggaaucugcgccagcuaccagacacagacaaacagcccucggagagccagaagcguggccagccagagcaucauugccuacacaaugucucugggcgccgagaacagcguggccuacuccaacaacucuaucgcuauccccaccaacuucaccaucagcgugaccacagagauccugccuguguccaugaccaagaccagcguggacugcaccauguacaucugcggcgauuccaccgagugcuccaaccugcugcugcaguacggcagcuucugcacccagcugaauagagcccugacagggaucgccguggaacaggacaagaacacccaagagguguucgcccaagugaagcagaucuacaagaccccuccuaucaaggacuucggcggcuucaauuucagccagauucugcccgauccuagcaagcccagcaagcggagcuucaucgaggaccugcuguucaacaaagugacacuggccgacgccggcuucaucaagcaguauggcgauugucugggcgacauugccgccagggaucugauuugcgcccagaaguuuaacggacugacagugcugccuccucugcugaccgaugagaugaucgcccaguacacaucugcccugcuggccggcacaaucacaagcggcuggacauuuggagcaggcgccgcucugcagauccccuuugcuaugcagauggccuaccgguucaacggcaucggagugacccagaaugugcuguacgagaaccagaagcugaucgccaaccaguucaacagcgccaucggcaagauccaggacagccugagcagcacagcaagcgcccugggaaagcugcaggacguggucaaccagaaugcccaggcacugaacacccuggucaagcagcuguccuccaacuucggcgccaucagcucugugcugaacgauauccugagcagacuggacccuccugaggccgaggugcagaucgacagacugaucacaggcagacugcagagccuccagacauacgugacccagcagcugaucagagccgccgagauuagagccucugccaaucuggccgccaccaagaugucugagugugugcugggccagagcaagagaguggacuuuugcggcaagggcuaccaccugaugagcuucccucagucugccccucacggcgugguguuucugcacgugacauaugugcccgcucaagagaagaauuucaccaccgcuccagccaucugccacgacggcaaagcccacuuuccuagagaaggcguguucguguccaacggcacccauugguucgugacacagcggaacuucuacgagccccagaucaucaccaccgacaacaccuucgugucuggcaacugcgacgucgugaucggcauugugaacaauaccguguacgacccucugcagcccgagcuggacagcuucaaagaggaacuggacaaguacuuuaagaaccacacaagccccgacguggaccugggcgauaucagcggaaucaaugccagcgucgugaacauccagaaagagaucgaccggcugaacgagguggccaagaaucugaacgagagccugaucgaccugcaagaacuggggaaguacgagcaguacaucaaguggcccugguacaucuggcugggcuuuaucgccggacugauugccaucgugauggucacaaucaugcuguguugcaugaccagcugcuguagcugccugaagggcuguuguagcuguggcagcugcugcaaguucgacgaggacgauucugagcccgugcugaagggcgugaaacugcacuacacaugaggacuaguuauaagacugacuagcccgaugggccucccaacgggcccuccuccccuccuugcaccgagauuaaucaaaggcucuuuucagagccaccaaaaaaaaaaaaaaaaaaaaaaaaaaaaaaaaaaaaaaaaaaaaaaaaaaaaaaaaaaaaaaaaaaaaaaaaaaaaaaaaaaaaaaaaaaaaaaaaaaaaa

SEQ ID NO: 24269 - RNA, 4035 nt, Artificial Sequence
  SARS-CoV-2/Wuhan/WIV05/2019__EPI_ISL_402128 spike protein mRNA gc mod (1-1273)(K986P_V987P_A222V_D614G)
aggagaaagcuuaccauguucguguuccuggugcugcugccucugguguccagccagugugugaaccugaccaccagaacacagcugccuccagccuacaccaacagcuuuaccagaggcguguacuaccccgacaagguguucagauccagcgugcugcacucuacccaggaccuguuccugccuuucuucagcaacgugaccugguuccacgccauccacguguccggcaccaauggcaccaagagauucgacaaccccgugcugcccuucaacgacgggguguacuuugccagcaccgagaaguccaacaucaucagaggcuggaucuucggcaccacacuggacagcaagacccagagccugcugaucgugaacaacgccaccaacguggucaucaaagugugcgaguuccaguucugcaacgaccccuuccugggcgucuacuaccacaagaacaacaagagcuggauggaaagcgaguuccggguguacagcagcgccaacaacugcaccuucgaguacgugucccagccuuuccugauggaccuggaaggcaagcagggcaacuucaagaaccugcgcgaguucguguuuaagaacaucgacggcuacuucaagaucuacagcaagcacaccccuaucaaccucgugcgggaucugccucagggcuucucugugcuggaaccccugguggaucugcccaucggcaucaacaucacccgguuucagacacugcuggcccugcacagaagcuaccugacaccuggcgauagcagcagcggauggacagcuggugccgccgcuuacuaugugggcuaccugcagccuagaaccuuccugcugaaguacaacgagaacggcaccaucaccgacgccguggauugugcucuggauccucugagcgagacaaagugcacccugaaguccuucaccguggaaaagggcaucuaccagaccagcaacuuccgggugcagcccaccgaauccaucgugcgguuccccaauaucaccaaucugugccccuucggcgagguguucaaugccaccagauucgccucuguguacgccuggaaccggaagcggaucagcaauugcguggccgacuacuccgugcuguacaacuccgccagcuucagcaccuucaagugcuacggcguguccccuaccaagcugaacgaccugugcuucacaaacguguacgccgacagcuucgugauccggggagaugaagugcggcagauugccccuggacagacaggcaagaucgccgacuacaacuacaagcugcccgacgacuucaccggcugugugauugccuggaacagcaacaaccuggacuccaaagucggcggcaacuacaauuaccuguaccggcuguuccggaaguccaaucugaagcccuucgagcgggacaucuccaccgagaucuaucaggccggcagcaccccuuguaacggcguggaaggcuucaacugcuacuucccacugcaguccuacggcuuucagcccacaaauggcgugggcuaucagcccuacagagugguggugcugagcuucgaacugcugcaugccccugccacagugugcggcccuaagaaaagcaccaaucucgugaagaacaaaugcgugaacuucaacuucaacggccugaccggcaccggcgugcugacagagagcaacaagaaguuccugccauuccagcaguuuggccgggauaucgccgauaccacagacgccguuagagauccccagacacuggaaauccuggacaucaccccuugcagcuucggcggagugucugugaucaccccuggcaccaacaccagcaaucagguggcagugcuguaccagggcgugaacuguaccgaagugcccguggccauucacgccgaucagcugacaccuacauggcggguguacuccaccggcagcaauguguuucagaccagagccggcugucugaucggagccgagcacgugaacaauagcuacgagugcgacauccccaucggcgcuggaaucugcgccagcuaccagacacagacaaacagcccucggagagccagaagcguggccagccagagcaucauugccuacacaaugucucugggcgccgagaacagcguggccuacuccaacaacucuaucgcuauccccaccaacuucaccaucagcgugaccacagagauccugccuguguccaugaccaagaccagcguggacugcaccauguacaucugcggcgauuccaccgagugcuccaaccugcugcugcaguacggcagcuucugcacccagcugaauagagcccugacagggaucgccguggaacaggacaagaacacccaagagguguucgcccaagugaagcagaucuacaagaccccuccuaucaaggacuucggcggcuucaauuucagccagauucugcccgauccuagcaagcccagcaagcggagcuucaucgaggaccugcuguucaacaaagugacacuggccgacgccggcuucaucaagcaguauggcgauugucugggcgacauugccgccagggaucugauuugcgcccagaaguuuaacggacugacagugcugccuccucugcugaccgaugagaugaucgcccaguacacaucugcccugcuggccggcacaaucacaagcggcuggacauuuggagcaggcgccgcucugcagauccccuuugcuaugcagauggccuaccgguucaacggcaucggagugacccagaaugugcuguacgagaaccagaagcugaucgccaaccaguucaacagcgccaucggcaagauccaggacagccugagcagcacagcaagcgcccugggaaagcugcaggacguggucaaccagaaugcccaggcacugaacacccuggucaagcagcuguccuccaacuucggcgccaucagcucugugcugaacgauauccugagcagacuggacccuccugaggccgaggugcagaucgacagacugaucacaggcagacugcagagccuccagacauacgugacccagcagcugaucagagccgccgagauuagagccucugccaaucuggccgccaccaagaugucugagugugugcugggccagagcaagagaguggacuuuugcggcaagggcuaccaccugaugagcuucccucagucugccccucacggcgugguguuucugcacgugacauaugugcccgcucaagagaagaauuucaccaccgcuccagccaucugccacgacggcaaagcccacuuuccuagagaaggcguguucguguccaacggcacccauugguucgugacacagcggaacuucuacgagccccagaucaucaccaccgacaacaccuucgugucuggcaacugcgacgucgugaucggcauugugaacaauaccguguacgacccucugcagcccgagcuggacagcuucaaagaggaacuggacaaguacuuuaagaaccacacaagccccgacguggaccugggcgauaucagcggaaucaaugccagcgucgugaacauccagaaagagaucgaccggcugaacgagguggccaagaaucugaacgagagccugaucgaccugcaagaacuggggaaguacgagcaguacaucaaguggcccugguacaucuggcugggcuuuaucgccggacugauugccaucgugauggucacaaucaugcuguguugcaugaccagcugcuguagcugccugaagggcuguuguagcuguggcagcugcugcaaguucgacgaggacgauucugagcccgugcugaagggcgugaaacugcacuacacaugaggacuaguuauaagacugacuagcccgaugggccucccaacgggcccuccuccccuccuugcaccgagauuaaucaaaggcucuuuucagagccaccaaaaaaaaaaaaaaaaaaaaaaaaaaaaaaaaaaaaaaaaaaaaaaaaaaaaaaaaaaaaaaaaaaaaaaaaaaaaaaaaaaaaaaaaaaaaaaaaaaaaa

SEQ ID NO: 24270 - RNA, 4035 nt, Artificial Sequence
  SARS-CoV-2/Wuhan/WIV05/2019__EPI_ISL_402128 spike protein mRNA gc mod (1-1273)(K986P_V987P_N439K_D614G)
aggagaaagcuuaccauguucguguuccuggugcugcugccucugguguccagccagugugugaaccugaccaccagaacacagcugccuccagccuacaccaacagcuuuaccagaggcguguacuaccccgacaagguguucagauccagcgugcugcacucuacccaggaccuguuccugccuuucuucagcaacgugaccugguuccacgccauccacguguccggcaccaauggcaccaagagauucgacaaccccgugcugcccuucaacgacgggguguacuuugccagcaccgagaaguccaacaucaucagaggcuggaucuucggcaccacacuggacagcaagacccagagccugcugaucgugaacaacgccaccaacguggucaucaaagugugcgaguuccaguucugcaacgaccccuuccugggcgucuacuaccacaagaacaacaagagcuggauggaaagcgaguuccggguguacagcagcgccaacaacugcaccuucgaguacgugucccagccuuuccugauggaccuggaaggcaagcagggcaacuucaagaaccugcgcgaguucguguuuaagaacaucgacggcuacuucaagaucuacagcaagcacaccccuaucaaccucgugcgggaucugccucagggcuucucugcucuggaaccccugguggaucugcccaucggcaucaacaucacccgguuucagacacugcuggcccugcacagaagcuaccugacaccuggcgauagcagcagcggauggacagcuggugccgccgcuuacuaugugggcuaccugcagccuagaaccuuccugcugaaguacaacgagaacggcaccaucaccgacgccguggauugugcucuggauccucugagcgagacaaagugcacccugaaguccuucaccguggaaaagggcaucuaccagaccagcaacuuccgggugcagcccaccgaauccaucgugcgguuccccaauaucaccaaucugugccccuucggcgagguguucaaugccaccagauucgccucuguguacgccuggaaccggaagcggaucagcaauugcguggccgacuacuccgugcuguacaacuccgccagcuucagcaccuucaagugcuacggcguguccccuaccaagcugaacgaccugugcuucacaaacguguacgccgacagcuucgugauccggggagaugaagugcggcagauugccccuggacagacaggcaagaucgccgacuacaacuacaagcugcccgacgacuucaccggcugugugauugccuggaacagcaagaaccuggacuccaaagucggcggcaacuacaauuaccuguaccggcuguuccggaaguccaaucugaagcccuucgagcgggacaucuccaccgagaucuaucaggccggcagcaccccuuguaacggcguggaaggcuucaacugcuacuucccacugcaguccuacggcuuucagcccacaaauggcgugggcuaucagcccuacagagugguggugcugagcuucgaacugcugcaugccccugccacagugugcggcccuaagaaaagcaccaaucucgugaagaacaaaugcgugaacuucaacuucaacggccugaccggcaccggcgugcugacagagagcaacaagaaguuccugccauuccagcaguuuggccgggauaucgccgauaccacagacgccguuagagauccccagacacuggaaauccuggacaucaccccuugcagcuucggcggagugucugugaucaccccuggcaccaacaccagcaaucagguggcagugcuguaccagggcgugaacuguaccgaagugcccguggccauucacgccgaucagcugacaccuacauggcggguguacuccaccggcagcaauguguuucagaccagagccggcugucugaucggagccgagcacgugaacaauagcuacgagugcgacauccccaucggcgcuggaaucugcgccagcuaccagacacagacaaacagcccucggagagccagaagcguggccagccagagcaucauugccuacacaaugucucugggcgccgagaacagcguggccuacuccaacaacucuaucgcuauccccaccaacuucaccaucagcgugaccacagagauccugccuguguccaugaccaagaccagcguggacugcaccauguacaucugcggcgauuccaccgagugcuccaaccugcugcugcaguacggcagcuucugcacccagcugaauagagcccugacagggaucgccguggaacaggacaagaacacccaagagguguucgcccaagugaagcagaucuacaagaccccuccuaucaaggacuucggcggcuucaauuucagccagauucugcccgauccuagcaagcccagcaagcggagcuucaucgaggaccugcuguucaacaaagugacacuggccgacgccggcuucaucaagcaguauggcgauugucugggcgacauugccgccagggaucugauuugcgcccagaaguuuaacggacugacagugcugccuccucugcugaccgaugagaugaucgcccaguacacaucugcccugcuggccggcacaaucacaagcggcuggacauuuggagcaggcgccgcucugcagauccccuuugcuaugcagauggccuaccgguucaacggcaucggagugacccagaaugugcuguacgagaaccagaagcugaucgccaaccaguucaacagcgccaucggcaagauccaggacagccugagcagcacagcaagcgcccugggaaagcugcaggacguggucaaccagaaugcccaggcacugaacacccuggucaagcagcuguccuccaacuucggcgccaucagcucugugcugaacgauauccugagcagacuggacccuccugaggccgaggugcagaucgacagacugaucacaggcagacugcagagccuccagacauacgugacccagcagcugaucagagccgccgagauuagagccucugccaaucuggccgccaccaagaugucugagugugugcugggccagagcaagagaguggacuuuugcggcaagggcuaccaccugaugagcuucccucagucugccccucacggcgugguguuucugcacgugacauaugugcccgcucaagagaagaauuucaccaccgcuccagccaucugccacgacggcaaagcccacuuuccuagagaaggcguguucguguccaacggcacccauugguucgugacacagcggaacuucuacgagccccagaucaucaccaccgacaacaccuucgugucuggcaacugcgacgucgugaucggcauugugaacaauaccguguacgacccucugcagcccgagcuggacagcuucaaagaggaacuggacaaguacuuuaagaaccacacaagccccgacguggaccugggcgauaucagcggaaucaaugccagcgucgugaacauccagaaagagaucgaccggcugaacgagguggccaagaaucugaacgagagccugaucgaccugcaagaacuggggaaguacgagcaguacaucaaguggcccugguacaucuggcugggcuuuaucgccggacugauugccaucgugauggucacaaucaugcuguguugcaugaccagcugcuguagcugccugaagggcuguuguagcuguggcagcugcugcaaguucgacgaggacgauucugagcccgugcugaagggcgugaaacugcacuacacaugaggacuaguuauaagacugacuagcccgaugggccucccaacgggcccuccuccccuccuugcaccgagauuaaucaaaggcucuuuucagagccaccaaaaaaaaaaaaaaaaaaaaaaaaaaaaaaaaaaaaaaaaaaaaaaaaaaaaaaaaaaaaaaaaaaaaaaaaaaaaaaaaaaaaaaaaaaaaaaaaaaaaa

SEQ ID NO: 24271 - RNA, 4035 nt, Artificial Sequence
  SARS-CoV-2/Wuhan/WIV05/2019__EPI_ISL_402128 spike protein mRNA gc mod (1-1273)(K986P_V987P_S477N_D614G)
aggagaaagcuuaccauguucguguuccuggugcugcugccucugguguccagccagugugugaaccugaccaccagaacacagcugccuccagccuacaccaacagcuuuaccagaggcguguacuaccccgacaagguguucagauccagcgugcugcacucuacccaggaccuguuccugccuuucuucagcaacgugaccugguuccacgccauccacguguccggcaccaauggcaccaagagauucgacaaccccgugcugcccuucaacgacgggguguacuuugccagcaccgagaaguccaacaucaucagaggcuggaucuucggcaccacacuggacagcaagacccagagccugcugaucgugaacaacgccaccaacguggucaucaaagugugcgaguuccaguucugcaacgaccccuuccugggcgucuacuaccacaagaacaacaagagcuggauggaaagcgaguuccggguguacagcagcgccaacaacugcaccuucgaguacgugucccagccuuuccugauggaccuggaaggcaagcagggcaacuucaagaaccugcgcgaguucguguuuaagaacaucgacggcuacuucaagaucuacagcaagcacaccccuaucaaccucgugcgggaucugccucagggcuucucugcucuggaaccccugguggaucugcccaucggcaucaacaucacccgguuucagacacugcuggcccugcacagaagcuaccugacaccuggcgauagcagcagcggauggacagcuggugccgccgcuuacuaugugggcuaccugcagccuagaaccuuccugcugaaguacaacgagaacggcaccaucaccgacgccguggauugugcucuggauccucugagcgagacaaagugcacccugaaguccuucaccguggaaaagggcaucuaccagaccagcaacuuccgggugcagcccaccgaauccaucgugcgguuccccaauaucaccaaucugugccccuucggcgagguguucaaugccaccagauucgccucuguguacgccuggaaccggaagcggaucagcaauugcguggccgacuacuccgugcuguacaacuccgccagcuucagcaccuucaagugcuacggcguguccccuaccaagcugaacgaccugugcuucacaaacguguacgccgacagcuucgugauccggggagaugaagugcggcagauugccccuggacagacaggcaagaucgccgacuacaacuacaagcugcccgacgacuucaccggcugugugauugccuggaacagcaacaaccuggacuccaaagucggcggcaacuacaauuaccuguaccggcuguuccggaaguccaaucugaagcccuucgagcgggacaucuccaccgagaucuaucaggccggcaacaccccuuguaacggcguggaaggcuucaacugcuacuucccacugcaguccuacggcuuucagcccacaaauggcgugggcuaucagcccuacagagugguggugcugagcuucgaacugcugcaugccccugccacagugugcggcccuaagaaaagcaccaaucucgugaagaacaaaugcgugaacuucaacuucaacggccugaccggcaccggcgugcugacagagagcaacaagaaguuccugccauuccagcaguuuggccgggauaucgccgauaccacagacgccguuagagauccccagacacuggaaauccuggacaucaccccuugcagcuucggcggagugucugugaucaccccuggcaccaacaccagcaaucagguggcagugcuguaccagggcgugaacuguaccgaagugcccguggccauucacgccgaucagcugacaccuacauggcggguguacuccaccggcagcaauguguuucagaccagagccggcugucugaucggagccgagcacgugaacaauagcuacgagugcgacauccccaucggcgcuggaaucugcgccagcuaccagacacagacaaacagcccucggagagccagaagcguggccagccagagcaucauugccuacacaaugucucugggcgccgagaacagcguggccuacuccaacaacucuaucgcuauccccaccaacuucaccaucagcgugaccacagagauccugccuguguccaugaccaagaccagcguggacugcaccauguacaucugcggcgauuccaccgagugcuccaaccugcugcugcaguacggcagcuucugcacccagcugaauagagcccugacagggaucgccguggaacaggacaagaacacccaagagguguucgcccaagugaagcagaucuacaagaccccuccuaucaaggacuucggcggcuucaauuucagccagauucugcccgauccuagcaagcccagcaagcggagcuucaucgaggaccugcuguucaacaaagugacacuggccgacgccggcuucaucaagcaguauggcgauugucugggcgacauugccgccagggaucugauuugcgcccagaaguuuaacggacugacagugcugccuccucugcugaccgaugagaugaucgcccaguacacaucugcccugcuggccggcacaaucacaagcggcuggacauuuggagcaggcgccgcucugcagauccccuuugcuaugcagauggccuaccgguucaacggcaucggagugacccagaaugugcuguacgagaaccagaagcugaucgccaaccaguucaacagcgccaucggcaagauccaggacagccugagcagcacagcaagcgcccugggaaagcugcaggacguggucaaccagaaugcccaggcacugaacacccuggucaagcagcuguccuccaacuucggcgccaucagcucugugcugaacgauauccugagcagacuggacccuccugaggccgaggugcagaucgacagacugaucacaggcagacugcagagccuccagacauacgugacccagcagcugaucagagccgccgagauuagagccucugccaaucuggccgccaccaagaugucugagugugugcugggccagagcaagagaguggacuuuugcggcaagggcuaccaccugaugagcuucccucagucugccccucacggcgugguguuucugcacgugacauaugugcccgcucaagagaagaauuucaccaccgcuccagccaucugccacgacggcaaagcccacuuuccuagagaaggcguguucguguccaacggcacccauugguucgugacacagcggaacuucuacgagccccagaucaucaccaccgacaacaccuucgugucuggcaacugcgacgucgugaucggcauugugaacaauaccguguacgacccucugcagcccgagcuggacagcuucaaagaggaacuggacaaguacuuuaagaaccacacaagccccgacguggaccugggcgauaucagcggaaucaaugccagcgucgugaacauccagaaagagaucgaccggcugaacgagguggccaagaaucugaacgagagccugaucgaccugcaagaacuggggaaguacgagcaguacaucaaguggcccugguacaucuggcugggcuuuaucgccggacugauugccaucgugauggucacaaucaugcuguguugcaugaccagcugcuguagcugccugaagggcuguuguagcuguggcagcugcugcaaguucgacgaggacgauucugagcccgugcugaagggcgugaaacugcacuacacaugaggacuaguuauaagacugacuagcccgaugggccucccaacgggcccuccuccccuccuugcaccgagauuaaucaaaggcucuuuucagagccaccaaaaaaaaaaaaaaaaaaaaaaaaaaaaaaaaaaaaaaaaaaaaaaaaaaaaaaaaaaaaaaaaaaaaaaaaaaaaaaaaaaaaaaaaaaaaaaaaaaaaa

SEQ ID NO: 24272 - RNA, 4035 nt, Artificial Sequence
  SARS-CoV-2/Wuhan/WIV05/2019__EPI_ISL_402128 spike protein mRNA gc mod (1-1273)(K986P_V987P_N501Y_D614G)
aggagaaagcuuaccauguucguguuccuggugcugcugccucugguguccagccagugugugaaccugaccaccagaacacagcugccuccagccuacaccaacagcuuuaccagaggcguguacuaccccgacaagguguucagauccagcgugcugcacucuacccaggaccuguuccugccuuucuucagcaacgugaccugguuccacgccauccacguguccggcaccaauggcaccaagagauucgacaaccccgugcugcccuucaacgacgggguguacuuugccagcaccgagaaguccaacaucaucagaggcuggaucuucggcaccacacuggacagcaagacccagagccugcugaucgugaacaacgccaccaacguggucaucaaagugugcgaguuccaguucugcaacgaccccuuccugggcgucuacuaccacaagaacaacaagagcuggauggaaagcgaguuccggguguacagcagcgccaacaacugcaccuucgaguacgugucccagccuuuccugauggaccuggaaggcaagcagggcaacuucaagaaccugcgcgaguucguguuuaagaacaucgacggcuacuucaagaucuacagcaagcacaccccuaucaaccucgugcgggaucugccucagggcuucucugcucuggaaccccugguggaucugcccaucggcaucaacaucacccgguuucagacacugcuggcccugcacagaagcuaccugacaccuggcgauagcagcagcggauggacagcuggugccgccgcuuacuaugugggcuaccugcagccuagaaccuuccugcugaaguacaacgagaacggcaccaucaccgacgccguggauugugcucuggauccucugagcgagacaaagugcacccugaaguccuucaccguggaaaagggcaucuaccagaccagcaacuuccgggugcagcccaccgaauccaucgugcgguuccccaauaucaccaaucugugccccuucggcgagguguucaaugccaccagauucgccucuguguacgccuggaaccggaagcggaucagcaauugcguggccgacuacuccgugcuguacaacuccgccagcuucagcaccuucaagugcuacggcguguccccuaccaagcugaacgaccugugcuucacaaacguguacgccgacagcuucgugauccggggagaugaagugcggcagauugccccuggacagacaggcaagaucgccgacuacaacuacaagcugcccgacgacuucaccggcugugugauugccuggaacagcaacaaccuggacuccaaagucggcggcaacuacaauuaccuguaccggcuguuccggaaguccaaucugaagcccuucgagcgggacaucuccaccgagaucuaucaggccggcagcaccccuuguaacggcguggaaggcuucaacugcuacuucccacugcaguccuacggcuuucagcccacauacggcgugggcuaucagcccuacagagugguggugcugagcuucgaacugcugcaugccccugccacagugugcggcccuaagaaaagcaccaaucucgugaagaacaaaugcgugaacuucaacuucaacggccugaccggcaccggcgugcugacagagagcaacaagaaguuccugccauuccagcaguuuggccgggauaucgccgauaccacagacgccguuagagauccccagacacuggaaauccuggacaucaccccuugcagcuucggcggagugucugugaucaccccuggcaccaacaccagcaaucagguggcagugcuguaccagggcgugaacuguaccgaagugcccguggccauucacgccgaucagcugacaccuacauggcggguguacuccaccggcagcaauguguuucagaccagagccggcugucugaucggagccgagcacgugaacaauagcuacgagugcgacauccccaucggcgcuggaaucugcgccagcuaccagacacagacaaacagcccucggagagccagaagcguggccagccagagcaucauugccuacacaaugucucugggcgccgagaacagcguggccuacuccaacaacucuaucgcuauccccaccaacuucaccaucagcgugaccacagagauccugccuguguccaugaccaagaccagcguggacugcaccauguacaucugcggcgauuccaccgagugcuccaaccugcugcugcaguacggcagcuucugcacccagcugaauagagcccugacagggaucgccguggaacaggacaagaacacccaagagguguucgcccaagugaagcagaucuacaagaccccuccuaucaaggacuucggcggcuucaauuucagccagauucugcccgauccuagcaagcccagcaagcggagcuucaucgaggaccugcuguucaacaaagugacacuggccgacgccggcuucaucaagcaguauggcgauugucugggcgacauugccgccagggaucugauuugcgcccagaaguuuaacggacugacagugcugccuccucugcugaccgaugagaugaucgcccaguacacaucugcccugcuggccggcacaaucacaagcggcuggacauuuggagcaggcgccgcucugcagauccccuuugcuaugcagauggccuaccgguucaacggcaucggagugacccagaaugugcuguacgagaaccagaagcugaucgccaaccaguucaacagcgccaucggcaagauccaggacagccugagcagcacagcaagcgcccugggaaagcugcaggacguggucaaccagaaugcccaggcacugaacacccuggucaagcagcuguccuccaacuucggcgccaucagcucugugcugaacgauauccugagcagacuggacccuccugaggccgaggugcagaucgacagacugaucacaggcagacugcagagccuccagacauacgugacccagcagcugaucagagccgccgagauuagagccucugccaaucuggccgccaccaagaugucugagugugugcugggccagagcaagagaguggacuuuugcggcaagggcuaccaccugaugagcuucccucagucugccccucacggcgugguguuucugcacgugacauaugugcccgcucaagagaagaauuucaccaccgcuccagccaucugccacgacggcaaagcccacuuuccuagagaaggcguguucguguccaacggcacccauugguucgugacacagcggaacuucuacgagccccagaucaucaccaccgacaacaccuucgugucuggcaacugcgacgucgugaucggcauugugaacaauaccguguacgacccucugcagcccgagcuggacagcuucaaagaggaacuggacaaguacuuuaagaaccacacaagccccgacguggaccugggcgauaucagcggaaucaaugccagcgucgugaacauccagaaagagaucgaccggcugaacgagguggccaagaaucugaacgagagccugaucgaccugcaagaacuggggaaguacgagcaguacaucaaguggcccugguacaucuggcugggcuuuaucgccggacugauugccaucgugauggucacaaucaugcuguguugcaugaccagcugcuguagcugccugaagggcuguuguagcuguggcagcugcugcaaguucgacgaggacgauucugagcccgugcugaagggcgugaaacugcacuacacaugaggacuaguuauaagacugacuagcccgaugggccucccaacgggcccuccuccccuccuugcaccgagauuaaucaaaggcucuuuucagagccaccaaaaaaaaaaaaaaaaaaaaaaaaaaaaaaaaaaaaaaaaaaaaaaaaaaaaaaaaaaaaaaaaaaaaaaaaaaaaaaaaaaaaaaaaaaaaaaaaaaaaa

SEQ ID NO: 24273 - RNA, 4029 nt, Artificial Sequence
  SARS-CoV-2/Wuhan/WIV05/2019__EPI_ISL_402128 spike protein mRNA gc mod (1-1273)(K986P_V987P_H69del_V70del_D614G)
aggagaaagcuuaccauguucguguuccuggugcugcugccucugguguccagccagugugugaaccugaccaccagaacacagcugccuccagccuacaccaacagcuuuaccagaggcguguacuaccccgacaagguguucagauccagcgugcugcacucuacccaggaccuguuccugccuuucuucagcaacgugaccugguuccacgccaucuccggcaccaauggcaccaagagauucgacaaccccgugcugcccuucaacgacgggguguacuuugccagcaccgagaaguccaacaucaucagaggcuggaucuucggcaccacacuggacagcaagacccagagccugcugaucgugaacaacgccaccaacguggucaucaaagugugcgaguuccaguucugcaacgaccccuuccugggcgucuacuaccacaagaacaacaagagcuggauggaaagcgaguuccggguguacagcagcgccaacaacugcaccuucgaguacgugucccagccuuuccugauggaccuggaaggcaagcagggcaacuucaagaaccugcgcgaguucguguuuaagaacaucgacggcuacuucaagaucuacagcaagcacaccccuaucaaccucgugcgggaucugccucagggcuucucugcucuggaaccccugguggaucugcccaucggcaucaacaucacccgguuucagacacugcuggcccugcacagaagcuaccugacaccuggcgauagcagcagcggauggacagcuggugccgccgcuuacuaugugggcuaccugcagccuagaaccuuccugcugaaguacaacgagaacggcaccaucaccgacgccguggauugugcucuggauccucugagcgagacaaagugcacccugaaguccuucaccguggaaaagggcaucuaccagaccagcaacuuccgggugcagcccaccgaauccaucgugcgguuccccaauaucaccaaucugugccccuucggcgagguguucaaugccaccagauucgccucuguguacgccuggaaccggaagcggaucagcaauugcguggccgacuacuccgugcuguacaacuccgccagcuucagcaccuucaagugcuacggcguguccccuaccaagcugaacgaccugugcuucacaaacguguacgccgacagcuucgugauccggggagaugaagugcggcagauugccccuggacagacaggcaagaucgccgacuacaacuacaagcugcccgacgacuucaccggcugugugauugccuggaacagcaacaaccuggacuccaaagucggcggcaacuacaauuaccuguaccggcuguuccggaaguccaaucugaagcccuucgagcgggacaucuccaccgagaucuaucaggccggcagcaccccuuguaacggcguggaaggcuucaacugcuacuucccacugcaguccuacggcuuucagcccacaaauggcgugggcuaucagcccuacagagugguggugcugagcuucgaacugcugcaugccccugccacagugugcggcccuaagaaaagcaccaaucucgugaagaacaaaugcgugaacuucaacuucaacggccugaccggcaccggcgugcugacagagagcaacaagaaguuccugccauuccagcaguuuggccgggauaucgccgauaccacagacgccguuagagauccccagacacuggaaauccuggacaucaccccuugcagcuucggcggagugucugugaucaccccuggcaccaacaccagcaaucagguggcagugcuguaccagggcgugaacuguaccgaagugcccguggccauucacgccgaucagcugacaccuacauggcggguguacuccaccggcagcaauguguuucagaccagagccggcugucugaucggagccgagcacgugaacaauagcuacgagugcgacauccccaucggcgcuggaaucugcgccagcuaccagacacagacaaacagcccucggagagccagaagcguggccagccagagcaucauugccuacacaaugucucugggcgccgagaacagcguggccuacuccaacaacucuaucgcuauccccaccaacuucaccaucagcgugaccacagagauccugccuguguccaugaccaagaccagcguggacugcaccauguacaucugcggcgauuccaccgagugcuccaaccugcugcugcaguacggcagcuucugcacccagcugaauagagcccugacagggaucgccguggaacaggacaagaacacccaagagguguucgcccaagugaagcagaucuacaagaccccuccuaucaaggacuucggcggcuucaauuucagccagauucugcccgauccuagcaagcccagcaagcggagcuucaucgaggaccugcuguucaacaaagugacacuggccgacgccggcuucaucaagcaguauggcgauugucugggcgacauugccgccagggaucugauuugcgcccagaaguuuaacggacugacagugcugccuccucugcugaccgaugagaugaucgcccaguacacaucugcccugcuggccggcacaaucacaagcggcuggacauuuggagcaggcgccgcucugcagauccccuuugcuaugcagauggccuaccgguucaacggcaucggagugacccagaaugugcuguacgagaaccagaagcugaucgccaaccaguucaacagcgccaucggcaagauccaggacagccugagcagcacagcaagcgcccugggaaagcugcaggacguggucaaccagaaugcccaggcacugaacacccuggucaagcagcuguccuccaacuucggcgccaucagcucugugcugaacgauauccugagcagacuggacccuccugaggccgaggugcagaucgacagacugaucacaggcagacugcagagccuccagacauacgugacccagcagcugaucagagccgccgagauuagagccucugccaaucuggccgccaccaagaugucugagugugugcugggccagagcaagagaguggacuuuugcggcaagggcuaccaccugaugagcuucccucagucugccccucacggcgugguguuucugcacgugacauaugugcccgcucaagagaagaauuucaccaccgcuccagccaucugccacgacggcaaagcccacuuuccuagagaaggcguguucguguccaacggcacccauugguucgugacacagcggaacuucuacgagccccagaucaucaccaccgacaacaccuucgugucuggcaacugcgacgucgugaucggcauugugaacaauaccguguacgacccucugcagcccgagcuggacagcuucaaagaggaacuggacaaguacuuuaagaaccacacaagccccgacguggaccugggcgauaucagcggaaucaaugccagcgucgugaacauccagaaagagaucgaccggcugaacgagguggccaagaaucugaacgagagccugaucgaccugcaagaacuggggaaguacgagcaguacaucaaguggcccugguacaucuggcugggcuuuaucgccggacugauugccaucgugauggucacaaucaugcuguguugcaugaccagcugcuguagcugccugaagggcuguuguagcuguggcagcugcugcaaguucgacgaggacgauucugagcccgugcugaagggcgugaaacugcacuacacaugaggacuaguuauaagacugacuagcccgaugggccucccaacgggcccuccuccccuccuugcaccgagauuaaucaaaggcucuuuucagagccaccaaaaaaaaaaaaaaaaaaaaaaaaaaaaaaaaaaaaaaaaaaaaaaaaaaaaaaaaaaaaaaaaaaaaaaaaaaaaaaaaaaaaaaaaaaaaaaaaaaaaa

SEQ ID NO: 24274 - RNA, 4035 nt, Artificial Sequence
  SARS-CoV-2/Wuhan/WIV05/2019__EPI_ISL_402128 spike protein mRNA gc mod (1-1273)(K986P_V987P_Y453F_D614G)
aggagaaagcuuaccauguucguguuccuggugcugcugccucugguguccagccagugugugaaccugaccaccagaacacagcugccuccagccuacaccaacagcuuuaccagaggcguguacuaccccgacaagguguucagauccagcgugcugcacucuacccaggaccuguuccugccuuucuucagcaacgugaccugguuccacgccauccacguguccggcaccaauggcaccaagagauucgacaaccccgugcugcccuucaacgacgggguguacuuugccagcaccgagaaguccaacaucaucagaggcuggaucuucggcaccacacuggacagcaagacccagagccugcugaucgugaacaacgccaccaacguggucaucaaagugugcgaguuccaguucugcaacgaccccuuccugggcgucuacuaccacaagaacaacaagagcuggauggaaagcgaguuccggguguacagcagcgccaacaacugcaccuucgaguacgugucccagccuuuccugauggaccuggaaggcaagcagggcaacuucaagaaccugcgcgaguucguguuuaagaacaucgacggcuacuucaagaucuacagcaagcacaccccuaucaaccucgugcgggaucugccucagggcuucucugcucuggaaccccugguggaucugcccaucggcaucaacaucacccgguuucagacacugcuggcccugcacagaagcuaccugacaccuggcgauagcagcagcggauggacagcuggugccgccgcuuacuaugugggcuaccugcagccuagaaccuuccugcugaaguacaacgagaacggcaccaucaccgacgccguggauugugcucuggauccucugagcgagacaaagugcacccugaaguccuucaccguggaaaagggcaucuaccagaccagcaacuuccgggugcagcccaccgaauccaucgugcgguuccccaauaucaccaaucugugccccuucggcgagguguucaaugccaccagauucgccucuguguacgccuggaaccggaagcggaucagcaauugcguggccgacuacuccgugcuguacaacuccgccagcuucagcaccuucaagugcuacggcguguccccuaccaagcugaacgaccugugcuucacaaacguguacgccgacagcuucgugauccggggagaugaagugcggcagauugccccuggacagacaggcaagaucgccgacuacaacuacaagcugcccgacgacuucaccggcugugugauugccuggaacagcaacaaccuggacuccaaagucggcggcaacuacaauuaccuguuccggcuguuccggaaguccaaucugaagcccuucgagcgggacaucuccaccgagaucuaucaggccggcagcaccccuuguaacggcguggaaggcuucaacugcuacuucccacugcaguccuacggcuuucagcccacaaauggcgugggcuaucagcccuacagagugguggugcugagcuucgaacugcugcaugccccugccacagugugcggcccuaagaaaagcaccaaucucgugaagaacaaaugcgugaacuucaacuucaacggccugaccggcaccggcgugcugacagagagcaacaagaaguuccugccauuccagcaguuuggccgggauaucgccgauaccacagacgccguuagagauccccagacacuggaaauccuggacaucaccccuugcagcuucggcggagugucugugaucaccccuggcaccaacaccagcaaucagguggcagugcuguaccagggcgugaacuguaccgaagugcccguggccauucacgccgaucagcugacaccuacauggcggguguacuccaccggcagcaauguguuucagaccagagccggcugucugaucggagccgagcacgugaacaauagcuacgagugcgacauccccaucggcgcuggaaucugcgccagcuaccagacacagacaaacagcccucggagagccagaagcguggccagccagagcaucauugccuacacaaugucucugggcgccgagaacagcguggccuacuccaacaacucuaucgcuauccccaccaacuucaccaucagcgugaccacagagauccugccuguguccaugaccaagaccagcguggacugcaccauguacaucugcggcgauuccaccgagugcuccaaccugcugcugcaguacggcagcuucugcacccagcugaauagagcccugacagggaucgccguggaacaggacaagaacacccaagagguguucgcccaagugaagcagaucuacaagaccccuccuaucaaggacuucggcggcuucaauuucagccagauucugcccgauccuagcaagcccagcaagcggagcuucaucgaggaccugcuguucaacaaagugacacuggccgacgccggcuucaucaagcaguauggcgauugucugggcgacauugccgccagggaucugauuugcgcccagaaguuuaacggacugacagugcugccuccucugcugaccgaugagaugaucgcccaguacacaucugcccugcuggccggcacaaucacaagcggcuggacauuuggagcaggcgccgcucugcagauccccuuugcuaugcagauggccuaccgguucaacggcaucggagugacccagaaugugcuguacgagaaccagaagcugaucgccaaccaguucaacagcgccaucggcaagauccaggacagccugagcagcacagcaagcgcccugggaaagcugcaggacguggucaaccagaaugcccaggcacugaacacccuggucaagcagcuguccuccaacuucggcgccaucagcucugugcugaacgauauccugagcagacuggacccuccugaggccgaggugcagaucgacagacugaucacaggcagacugcagagccuccagacauacgugacccagcagcugaucagagccgccgagauuagagccucugccaaucuggccgccaccaagaugucugagugugugcugggccagagcaagagaguggacuuuugcggcaagggcuaccaccugaugagcuucccucagucugccccucacggcgugguguuucugcacgugacauaugugcccgcucaagagaagaauuucaccaccgcuccagccaucugccacgacggcaaagcccacuuuccuagagaaggcguguucguguccaacggcacccauugguucgugacacagcggaacuucuacgagccccagaucaucaccaccgacaacaccuucgugucuggcaacugcgacgucgugaucggcauugugaacaauaccguguacgacccucugcagcccgagcuggacagcuucaaagaggaacuggacaaguacuuuaagaaccacacaagccccgacguggaccugggcgauaucagcggaaucaaugccagcgucgugaacauccagaaagagaucgaccggcugaacgagguggccaagaaucugaacgagagccugaucgaccugcaagaacuggggaaguacgagcaguacaucaaguggcccugguacaucuggcugggcuuuaucgccggacugauugccaucgugauggucacaaucaugcuguguugcaugaccagcugcuguagcugccugaagggcuguuguagcuguggcagcugcugcaaguucgacgaggacgauucugagcccgugcugaagggcgugaaacugcacuacacaugaggacuaguuauaagacugacuagcccgaugggccucccaacgggcccuccuccccuccuugcaccgagauuaaucaaaggcucuuuucagagccaccaaaaaaaaaaaaaaaaaaaaaaaaaaaaaaaaaaaaaaaaaaaaaaaaaaaaaaaaaaaaaaaaaaaaaaaaaaaaaaaaaaaaaaaaaaaaaaaaaaaaa

SEQ ID NO: 24275 - RNA, 4035 nt, Artificial Sequence
  SARS-CoV-2/Wuhan/WIV05/2019__EPI_ISL_402128 spike protein mRNA gc mod (1-1273)(K986P_V987P_D614G_I692V)
aggagaaagcuuaccauguucguguuccuggugcugcugccucugguguccagccagugugugaaccugaccaccagaacacagcugccuccagccuacaccaacagcuuuaccagaggcguguacuaccccgacaagguguucagauccagcgugcugcacucuacccaggaccuguuccugccuuucuucagcaacgugaccugguuccacgccauccacguguccggcaccaauggcaccaagagauucgacaaccccgugcugcccuucaacgacgggguguacuuugccagcaccgagaaguccaacaucaucagaggcuggaucuucggcaccacacuggacagcaagacccagagccugcugaucgugaacaacgccaccaacguggucaucaaagugugcgaguuccaguucugcaacgaccccuuccugggcgucuacuaccacaagaacaacaagagcuggauggaaagcgaguuccggguguacagcagcgccaacaacugcaccuucgaguacgugucccagccuuuccugauggaccuggaaggcaagcagggcaacuucaagaaccugcgcgaguucguguuuaagaacaucgacggcuacuucaagaucuacagcaagcacaccccuaucaaccucgugcgggaucugccucagggcuucucugcucuggaaccccugguggaucugcccaucggcaucaacaucacccgguuucagacacugcuggcccugcacagaagcuaccugacaccuggcgauagcagcagcggauggacagcuggugccgccgcuuacuaugugggcuaccugcagccuagaaccuuccugcugaaguacaacgagaacggcaccaucaccgacgccguggauugugcucuggauccucugagcgagacaaagugcacccugaaguccuucaccguggaaaagggcaucuaccagaccagcaacuuccgggugcagcccaccgaauccaucgugcgguuccccaauaucaccaaucugugccccuucggcgagguguucaaugccaccagauucgccucuguguacgccuggaaccggaagcggaucagcaauugcguggccgacuacuccgugcuguacaacuccgccagcuucagcaccuucaagugcuacggcguguccccuaccaagcugaacgaccugugcuucacaaacguguacgccgacagcuucgugauccggggagaugaagugcggcagauugccccuggacagacaggcaagaucgccgacuacaacuacaagcugcccgacgacuucaccggcugugugauugccuggaacagcaacaaccuggacuccaaagucggcggcaacuacaauuaccuguaccggcuguuccggaaguccaaucugaagcccuucgagcgggacaucuccaccgagaucuaucaggccggcagcaccccuuguaacggcguggaaggcuucaacugcuacuucccacugcaguccuacggcuuucagcccacaaauggcgugggcuaucagcccuacagagugguggugcugagcuucgaacugcugcaugccccugccacagugugcggcccuaagaaaagcaccaaucucgugaagaacaaaugcgugaacuucaacuucaacggccugaccggcaccggcgugcugacagagagcaacaagaaguuccugccauuccagcaguuuggccgggauaucgccgauaccacagacgccguuagagauccccagacacuggaaauccuggacaucaccccuugcagcuucggcggagugucugugaucaccccuggcaccaacaccagcaaucagguggcagugcuguaccagggcgugaacuguaccgaagugcccguggccauucacgccgaucagcugacaccuacauggcggguguacuccaccggcagcaauguguuucagaccagagccggcugucugaucggagccgagcacgugaacaauagcuacgagugcgacauccccaucggcgcuggaaucugcgccagcuaccagacacagacaaacagcccucggagagccagaagcguggccagccagagcgugauugccuacacaaugucucugggcgccgagaacagcguggccuacuccaacaacucuaucgcuauccccaccaacuucaccaucagcgugaccacagagauccugccuguguccaugaccaagaccagcguggacugcaccauguacaucugcggcgauuccaccgagugcuccaaccugcugcugcaguacggcagcuucugcacccagcugaauagagcccugacagggaucgccguggaacaggacaagaacacccaagagguguucgcccaagugaagcagaucuacaagaccccuccuaucaaggacuucggcggcuucaauuucagccagauucugcccgauccuagcaagcccagcaagcggagcuucaucgaggaccugcuguucaacaaagugacacuggccgacgccggcuucaucaagcaguauggcgauugucugggcgacauugccgccagggaucugauuugcgcccagaaguuuaacggacugacagugcugccuccucugcugaccgaugagaugaucgcccaguacacaucugcccugcuggccggcacaaucacaagcggcuggacauuuggagcaggcgccgcucugcagauccccuuugcuaugcagauggccuaccgguucaacggcaucggagugacccagaaugugcuguacgagaaccagaagcugaucgccaaccaguucaacagcgccaucggcaagauccaggacagccugagcagcacagcaagcgcccugggaaagcugcaggacguggucaaccagaaugcccaggcacugaacacccuggucaagcagcuguccuccaacuucggcgccaucagcucugugcugaacgauauccugagcagacuggacccuccugaggccgaggugcagaucgacagacugaucacaggcagacugcagagccuccagacauacgugacccagcagcugaucagagccgccgagauuagagccucugccaaucuggccgccaccaagaugucugagugugugcugggccagagcaagagaguggacuuuugcggcaagggcuaccaccugaugagcuucccucagucugccccucacggcgugguguuucugcacgugacauaugugcccgcucaagagaagaauuucaccaccgcuccagccaucugccacgacggcaaagcccacuuuccuagagaaggcguguucguguccaacggcacccauugguucgugacacagcggaacuucuacgagccccagaucaucaccaccgacaacaccuucgugucuggcaacugcgacgucgugaucggcauugugaacaauaccguguacgacccucugcagcccgagcuggacagcuucaaagaggaacuggacaaguacuuuaagaaccacacaagccccgacguggaccugggcgauaucagcggaaucaaugccagcgucgugaacauccagaaagagaucgaccggcugaacgagguggccaagaaucugaacgagagccugaucgaccugcaagaacuggggaaguacgagcaguacaucaaguggcccugguacaucuggcugggcuuuaucgccggacugauugccaucgugauggucacaaucaugcuguguugcaugaccagcugcuguagcugccugaagggcuguuguagcuguggcagcugcugcaaguucgacgaggacgauucugagcccgugcugaagggcgugaaacugcacuacacaugaggacuaguuauaagacugacuagcccgaugggccucccaacgggcccuccuccccuccuugcaccgagauuaaucaaaggcucuuuucagagccaccaaaaaaaaaaaaaaaaaaaaaaaaaaaaaaaaaaaaaaaaaaaaaaaaaaaaaaaaaaaaaaaaaaaaaaaaaaaaaaaaaaaaaaaaaaaaaaaaaaaaa

SEQ ID NO: 24276 - RNA, 4035 nt, Artificial Sequence
  SARS-CoV-2/Wuhan/WIV05/2019__EPI_ISL_402128 spike protein mRNA gc mod (1-1273)(K986P_V987P_D614G_M1229I)
aggagaaagcuuaccauguucguguuccuggugcugcugccucugguguccagccagugugugaaccugaccaccagaacacagcugccuccagccuacaccaacagcuuuaccagaggcguguacuaccccgacaagguguucagauccagcgugcugcacucuacccaggaccuguuccugccuuucuucagcaacgugaccugguuccacgccauccacguguccggcaccaauggcaccaagagauucgacaaccccgugcugcccuucaacgacgggguguacuuugccagcaccgagaaguccaacaucaucagaggcuggaucuucggcaccacacuggacagcaagacccagagccugcugaucgugaacaacgccaccaacguggucaucaaagugugcgaguuccaguucugcaacgaccccuuccugggcgucuacuaccacaagaacaacaagagcuggauggaaagcgaguuccggguguacagcagcgccaacaacugcaccuucgaguacgugucccagccuuuccugauggaccuggaaggcaagcagggcaacuucaagaaccugcgcgaguucguguuuaagaacaucgacggcuacuucaagaucuacagcaagcacaccccuaucaaccucgugcgggaucugccucagggcuucucugcucuggaaccccugguggaucugcccaucggcaucaacaucacccgguuucagacacugcuggcccugcacagaagcuaccugacaccuggcgauagcagcagcggauggacagcuggugccgccgcuuacuaugugggcuaccugcagccuagaaccuuccugcugaaguacaacgagaacggcaccaucaccgacgccguggauugugcucuggauccucugagcgagacaaagugcacccugaaguccuucaccguggaaaagggcaucuaccagaccagcaacuuccgggugcagcccaccgaauccaucgugcgguuccccaauaucaccaaucugugccccuucggcgagguguucaaugccaccagauucgccucuguguacgccuggaaccggaagcggaucagcaauugcguggccgacuacuccgugcuguacaacuccgccagcuucagcaccuucaagugcuacggcguguccccuaccaagcugaacgaccugugcuucacaaacguguacgccgacagcuucgugauccggggagaugaagugcggcagauugccccuggacagacaggcaagaucgccgacuacaacuacaagcugcccgacgacuucaccggcugugugauugccuggaacagcaacaaccuggacuccaaagucggcggcaacuacaauuaccuguaccggcuguuccggaaguccaaucugaagcccuucgagcgggacaucuccaccgagaucuaucaggccggcagcaccccuuguaacggcguggaaggcuucaacugcuacuucccacugcaguccuacggcuuucagcccacaaauggcgugggcuaucagcccuacagagugguggugcugagcuucgaacugcugcaugccccugccacagugugcggcccuaagaaaagcaccaaucucgugaagaacaaaugcgugaacuucaacuucaacggccugaccggcaccggcgugcugacagagagcaacaagaaguuccugccauuccagcaguuuggccgggauaucgccgauaccacagacgccguuagagauccccagacacuggaaauccuggacaucaccccuugcagcuucggcggagugucugugaucaccccuggcaccaacaccagcaaucagguggcagugcuguaccagggcgugaacuguaccgaagugcccguggccauucacgccgaucagcugacaccuacauggcggguguacuccaccggcagcaauguguuucagaccagagccggcugucugaucggagccgagcacgugaacaauagcuacgagugcgacauccccaucggcgcuggaaucugcgccagcuaccagacacagacaaacagcccucggagagccagaagcguggccagccagagcaucauugccuacacaaugucucugggcgccgagaacagcguggccuacuccaacaacucuaucgcuauccccaccaacuucaccaucagcgugaccacagagauccugccuguguccaugaccaagaccagcguggacugcaccauguacaucugcggcgauuccaccgagugcuccaaccugcugcugcaguacggcagcuucugcacccagcugaauagagcccugacagggaucgccguggaacaggacaagaacacccaagagguguucgcccaagugaagcagaucuacaagaccccuccuaucaaggacuucggcggcuucaauuucagccagauucugcccgauccuagcaagcccagcaagcggagcuucaucgaggaccugcuguucaacaaagugacacuggccgacgccggcuucaucaagcaguauggcgauugucugggcgacauugccgccagggaucugauuugcgcccagaaguuuaacggacugacagugcugccuccucugcugaccgaugagaugaucgcccaguacacaucugcccugcuggccggcacaaucacaagcggcuggacauuuggagcaggcgccgcucugcagauccccuuugcuaugcagauggccuaccgguucaacggcaucggagugacccagaaugugcuguacgagaaccagaagcugaucgccaaccaguucaacagcgccaucggcaagauccaggacagccugagcagcacagcaagcgcccugggaaagcugcaggacguggucaaccagaaugcccaggcacugaacacccuggucaagcagcuguccuccaacuucggcgccaucagcucugugcugaacgauauccugagcagacuggacccuccugaggccgaggugcagaucgacagacugaucacaggcagacugcagagccuccagacauacgugacccagcagcugaucagagccgccgagauuagagccucugccaaucuggccgccaccaagaugucugagugugugcugggccagagcaagagaguggacuuuugcggcaagggcuaccaccugaugagcuucccucagucugccccucacggcgugguguuucugcacgugacauaugugcccgcucaagagaagaauuucaccaccgcuccagccaucugccacgacggcaaagcccacuuuccuagagaaggcguguucguguccaacggcacccauugguucgugacacagcggaacuucuacgagccccagaucaucaccaccgacaacaccuucgugucuggcaacugcgacgucgugaucggcauugugaacaauaccguguacgacccucugcagcccgagcuggacagcuucaaagaggaacuggacaaguacuuuaagaaccacacaagccccgacguggaccugggcgauaucagcggaaucaaugccagcgucgugaacauccagaaagagaucgaccggcugaacgagguggccaagaaucugaacgagagccugaucgaccugcaagaacuggggaaguacgagcaguacaucaaguggcccugguacaucuggcugggcuuuaucgccggacugauugccaucgugaucgucacaaucaugcuguguugcaugaccagcugcuguagcugccugaagggcuguuguagcuguggcagcugcugcaaguucgacgaggacgauucugagcccgugcugaagggcgugaaacugcacuacacaugaggacuaguuauaagacugacuagcccgaugggccucccaacgggcccuccuccccuccuugcaccgagauuaaucaaaggcucuuuucagagccaccaaaaaaaaaaaaaaaaaaaaaaaaaaaaaaaaaaaaaaaaaaaaaaaaaaaaaaaaaaaaaaaaaaaaaaaaaaaaaaaaaaaaaaaaaaaaaaaaaaaaa

SEQ ID NO: 24277 - RNA, 4029 nt, Artificial Sequence
  SARS-CoV-2/Wuhan/WIV05/2019__EPI_ISL_402128 spike protein mRNA gc mod (1-1273)(K986P_V987P_H69del_V70del_A222V_Y453F_S477N_D614G_I692V)
aggagaaagcuuaccauguucguguuccuggugcugcugccucugguguccagccagugugugaaccugaccaccagaacacagcugccuccagccuacaccaacagcuuuaccagaggcguguacuaccccgacaagguguucagauccagcgugcugcacucuacccaggaccuguuccugccuuucuucagcaacgugaccugguuccacgccaucuccggcaccaauggcaccaagagauucgacaaccccgugcugcccuucaacgacgggguguacuuugccagcaccgagaaguccaacaucaucagaggcuggaucuucggcaccacacuggacagcaagacccagagccugcugaucgugaacaacgccaccaacguggucaucaaagugugcgaguuccaguucugcaacgaccccuuccugggcgucuacuaccacaagaacaacaagagcuggauggaaagcgaguuccggguguacagcagcgccaacaacugcaccuucgaguacgugucccagccuuuccugauggaccuggaaggcaagcagggcaacuucaagaaccugcgcgaguucguguuuaagaacaucgacggcuacuucaagaucuacagcaagcacaccccuaucaaccucgugcgggaucugccucagggcuucucugugcuggaaccccugguggaucugcccaucggcaucaacaucacccgguuucagacacugcuggcccugcacagaagcuaccugacaccuggcgauagcagcagcggauggacagcuggugccgccgcuuacuaugugggcuaccugcagccuagaaccuuccugcugaaguacaacgagaacggcaccaucaccgacgccguggauugugcucuggauccucugagcgagacaaagugcacccugaaguccuucaccguggaaaagggcaucuaccagaccagcaacuuccgggugcagcccaccgaauccaucgugcgguuccccaauaucaccaaucugugccccuucggcgagguguucaaugccaccagauucgccucuguguacgccuggaaccggaagcggaucagcaauugcguggccgacuacuccgugcuguacaacuccgccagcuucagcaccuucaagugcuacggcguguccccuaccaagcugaacgaccugugcuucacaaacguguacgccgacagcuucgugauccggggagaugaagugcggcagauugccccuggacagacaggcaagaucgccgacuacaacuacaagcugcccgacgacuucaccggcugugugauugccuggaacagcaacaaccuggacuccaaagucggcggcaacuacaauuaccuguuccggcuguuccggaaguccaaucugaagcccuucgagcgggacaucuccaccgagaucuaucaggccggcaacaccccuuguaacggcguggaaggcuucaacugcuacuucccacugcaguccuacggcuuucagcccacaaauggcgugggcuaucagcccuacagagugguggugcugagcuucgaacugcugcaugccccugccacagugugcggcccuaagaaaagcaccaaucucgugaagaacaaaugcgugaacuucaacuucaacggccugaccggcaccggcgugcugacagagagcaacaagaaguuccugccauuccagcaguuuggccgggauaucgccgauaccacagacgccguuagagauccccagacacuggaaauccuggacaucaccccuugcagcuucggcggagugucugugaucaccccuggcaccaacaccagcaaucagguggcagugcuguaccagggcgugaacuguaccgaagugcccguggccauucacgccgaucagcugacaccuacauggcggguguacuccaccggcagcaauguguuucagaccagagccggcugucugaucggagccgagcacgugaacaauagcuacgagugcgacauccccaucggcgcuggaaucugcgccagcuaccagacacagacaaacagcccucggagagccagaagcguggccagccagagcgugauugccuacacaaugucucugggcgccgagaacagcguggccuacuccaacaacucuaucgcuauccccaccaacuucaccaucagcgugaccacagagauccugccuguguccaugaccaagaccagcguggacugcaccauguacaucugcggcgauuccaccgagugcuccaaccugcugcugcaguacggcagcuucugcacccagcugaauagagcccugacagggaucgccguggaacaggacaagaacacccaagagguguucgcccaagugaagcagaucuacaagaccccuccuaucaaggacuucggcggcuucaauuucagccagauucugcccgauccuagcaagcccagcaagcggagcuucaucgaggaccugcuguucaacaaagugacacuggccgacgccggcuucaucaagcaguauggcgauugucugggcgacauugccgccagggaucugauuugcgcccagaaguuuaacggacugacagugcugccuccucugcugaccgaugagaugaucgcccaguacacaucugcccugcuggccggcacaaucacaagcggcuggacauuuggagcaggcgccgcucugcagauccccuuugcuaugcagauggccuaccgguucaacggcaucggagugacccagaaugugcuguacgagaaccagaagcugaucgccaaccaguucaacagcgccaucggcaagauccaggacagccugagcagcacagcaagcgcccugggaaagcugcaggacguggucaaccagaaugcccaggcacugaacacccuggucaagcagcuguccuccaacuucggcgccaucagcucugugcugaacgauauccugagcagacuggacccuccugaggccgaggugcagaucgacagacugaucacaggcagacugcagagccuccagacauacgugacccagcagcugaucagagccgccgagauuagagccucugccaaucuggccgccaccaagaugucugagugugugcugggccagagcaagagaguggacuuuugcggcaagggcuaccaccugaugagcuucccucagucugccccucacggcgugguguuucugcacgugacauaugugcccgcucaagagaagaauuucaccaccgcuccagccaucugccacgacggcaaagcccacuuuccuagagaaggcguguucguguccaacggcacccauugguucgugacacagcggaacuucuacgagccccagaucaucaccaccgacaacaccuucgugucuggcaacugcgacgucgugaucggcauugugaacaauaccguguacgacccucugcagcccgagcuggacagcuucaaagaggaacuggacaaguacuuuaagaaccacacaagccccgacguggaccugggcgauaucagcggaaucaaugccagcgucgugaacauccagaaagagaucgaccggcugaacgagguggccaagaaucugaacgagagccugaucgaccugcaagaacuggggaaguacgagcaguacaucaaguggcccugguacaucuggcugggcuuuaucgccggacugauugccaucgugauggucacaaucaugcuguguugcaugaccagcugcuguagcugccugaagggcuguuguagcuguggcagcugcugcaaguucgacgaggacgauucugagcccgugcugaagggcgugaaacugcacuacacaugaggacuaguuauaagacugacuagcccgaugggccucccaacgggcccuccuccccuccuugcaccgagauuaaucaaaggcucuuuucagagccaccaaaaaaaaaaaaaaaaaaaaaaaaaaaaaaaaaaaaaaaaaaaaaaaaaaaaaaaaaaaaaaaaaaaaaaaaaaaaaaaaaaaaaaaaaaaaaaaaaaaaa

SEQ ID NO: 24278 - RNA, 4029 nt, Artificial Sequence
  SARS-CoV-2/Wuhan/WIV05/2019__EPI_ISL_402128 spike protein mRNA gc mod (1-1273)(K986P_V987P_H69del_V70del_Y453F_D614G_I692V_M1229I)
aggagaaagcuuaccauguucguguuccuggugcugcugccucugguguccagccagugugugaaccugaccaccagaacacagcugccuccagccuacaccaacagcuuuaccagaggcguguacuaccccgacaagguguucagauccagcgugcugcacucuacccaggaccuguuccugccuuucuucagcaacgugaccugguuccacgccaucuccggcaccaauggcaccaagagauucgacaaccccgugcugcccuucaacgacgggguguacuuugccagcaccgagaaguccaacaucaucagaggcuggaucuucggcaccacacuggacagcaagacccagagccugcugaucgugaacaacgccaccaacguggucaucaaagugugcgaguuccaguucugcaacgaccccuuccugggcgucuacuaccacaagaacaacaagagcuggauggaaagcgaguuccggguguacagcagcgccaacaacugcaccuucgaguacgugucccagccuuuccugauggaccuggaaggcaagcagggcaacuucaagaaccugcgcgaguucguguuuaagaacaucgacggcuacuucaagaucuacagcaagcacaccccuaucaaccucgugcgggaucugccucagggcuucucugcucuggaaccccugguggaucugcccaucggcaucaacaucacccgguuucagacacugcuggcccugcacagaagcuaccugacaccuggcgauagcagcagcggauggacagcuggugccgccgcuuacuaugugggcuaccugcagccuagaaccuuccugcugaaguacaacgagaacggcaccaucaccgacgccguggauugugcucuggauccucugagcgagacaaagugcacccugaaguccuucaccguggaaaagggcaucuaccagaccagcaacuuccgggugcagcccaccgaauccaucgugcgguuccccaauaucaccaaucugugccccuucggcgagguguucaaugccaccagauucgccucuguguacgccuggaaccggaagcggaucagcaauugcguggccgacuacuccgugcuguacaacuccgccagcuucagcaccuucaagugcuacggcguguccccuaccaagcugaacgaccugugcuucacaaacguguacgccgacagcuucgugauccggggagaugaagugcggcagauugccccuggacagacaggcaagaucgccgacuacaacuacaagcugcccgacgacuucaccggcugugugauugccuggaacagcaacaaccuggacuccaaagucggcggcaacuacaauuaccuguuccggcuguuccggaaguccaaucugaagcccuucgagcgggacaucuccaccgagaucuaucaggccggcagcaccccuuguaacggcguggaaggcuucaacugcuacuucccacugcaguccuacggcuuucagcccacaaauggcgugggcuaucagcccuacagagugguggugcugagcuucgaacugcugcaugccccugccacagugugcggcccuaagaaaagcaccaaucucgugaagaacaaaugcgugaacuucaacuucaacggccugaccggcaccggcgugcugacagagagcaacaagaaguuccugccauuccagcaguuuggccgggauaucgccgauaccacagacgccguuagagauccccagacacuggaaauccuggacaucaccccuugcagcuucggcggagugucugugaucaccccuggcaccaacaccagcaaucagguggcagugcuguaccagggcgugaacuguaccgaagugcccguggccauucacgccgaucagcugacaccuacauggcggguguacuccaccggcagcaauguguuucagaccagagccggcugucugaucggagccgagcacgugaacaauagcuacgagugcgacauccccaucggcgcuggaaucugcgccagcuaccagacacagacaaacagcccucggagagccagaagcguggccagccagagcgugauugccuacacaaugucucugggcgccgagaacagcguggccuacuccaacaacucuaucgcuauccccaccaacuucaccaucagcgugaccacagagauccugccuguguccaugaccaagaccagcguggacugcaccauguacaucugcggcgauuccaccgagugcuccaaccugcugcugcaguacggcagcuucugcacccagcugaauagagcccugacagggaucgccguggaacaggacaagaacacccaagagguguucgcccaagugaagcagaucuacaagaccccuccuaucaaggacuucggcggcuucaauuucagccagauucugcccgauccuagcaagcccagcaagcggagcuucaucgaggaccugcuguucaacaaagugacacuggccgacgccggcuucaucaagcaguauggcgauugucugggcgacauugccgccagggaucugauuugcgcccagaaguuuaacggacugacagugcugccuccucugcugaccgaugagaugaucgcccaguacacaucugcccugcuggccggcacaaucacaagcggcuggacauuuggagcaggcgccgcucugcagauccccuuugcuaugcagauggccuaccgguucaacggcaucggagugacccagaaugugcuguacgagaaccagaagcugaucgccaaccaguucaacagcgccaucggcaagauccaggacagccugagcagcacagcaagcgcccugggaaagcugcaggacguggucaaccagaaugcccaggcacugaacacccuggucaagcagcuguccuccaacuucggcgccaucagcucugugcugaacgauauccugagcagacuggacccuccugaggccgaggugcagaucgacagacugaucacaggcagacugcagagccuccagacauacgugacccagcagcugaucagagccgccgagauuagagccucugccaaucuggccgccaccaagaugucugagugugugcugggccagagcaagagaguggacuuuugcggcaagggcuaccaccugaugagcuucccucagucugccccucacggcgugguguuucugcacgugacauaugugcccgcucaagagaagaauuucaccaccgcuccagccaucugccacgacggcaaagcccacuuuccuagagaaggcguguucguguccaacggcacccauugguucgugacacagcggaacuucuacgagccccagaucaucaccaccgacaacaccuucgugucuggcaacugcgacgucgugaucggcauugugaacaauaccguguacgacccucugcagcccgagcuggacagcuucaaagaggaacuggacaaguacuuuaagaaccacacaagccccgacguggaccugggcgauaucagcggaaucaaugccagcgucgugaacauccagaaagagaucgaccggcugaacgagguggccaagaaucugaacgagagccugaucgaccugcaagaacuggggaaguacgagcaguacaucaaguggcccugguacaucuggcugggcuuuaucgccggacugauugccaucgugaucgucacaaucaugcuguguugcaugaccagcugcuguagcugccugaagggcuguuguagcuguggcagcugcugcaaguucgacgaggacgauucugagcccgugcugaagggcgugaaacugcacuacacaugaggacuaguuauaagacugacuagcccgaugggccucccaacgggcccuccuccccuccuugcaccgagauuaaucaaaggcucuuuucagagccaccaaaaaaaaaaaaaaaaaaaaaaaaaaaaaaaaaaaaaaaaaaaaaaaaaaaaaaaaaaaaaaaaaaaaaaaaaaaaaaaaaaaaaaaaaaaaaaaaaaaaa

SEQ ID NO: 24279 - RNA, 4026 nt, Artificial Sequence
  SARS-CoV-2/Wuhan/WIV05/2019__EPI_ISL_402128 spike protein mRNA gc mod (1-1273)(K986P_V987P_K986P_V987P_H69del_V70del_Y144del_N501Y_A570 D_D614G_P681H_T716I_S982A_D1118H)
aggagaaagcuuaccauguucguguuccuggugcugcugccucugguguccagccagugugugaaccugaccaccagaacacagcugccuccagccuacaccaacagcuuuaccagaggcguguacuaccccgacaagguguucagauccagcgugcugcacucuacccaggaccuguuccugccuuucuucagcaacgugaccugguuccacgccaucuccggcaccaauggcaccaagagauucgacaaccccgugcugcccuucaacgacgggguguacuuugccagcaccgagaaguccaacaucaucagaggcuggaucuucggcaccacacuggacagcaagacccagagccugcugaucgugaacaacgccaccaacguggucaucaaagugugcgaguuccaguucugcaacgaccccuuccugggcgucuaccacaagaacaacaagagcuggauggaaagcgaguuccggguguacagcagcgccaacaacugcaccuucgaguacgugucccagccuuuccugauggaccuggaaggcaagcagggcaacuucaagaaccugcgcgaguucguguuuaagaacaucgacggcuacuucaagaucuacagcaagcacaccccuaucaaccucgugcgggaucugccucagggcuucucugcucuggaaccccugguggaucugcccaucggcaucaacaucacccgguuucagacacugcuggcccugcacagaagcuaccugacaccuggcgauagcagcagcggauggacagcuggugccgccgcuuacuaugugggcuaccugcagccuagaaccuuccugcugaaguacaacgagaacggcaccaucaccgacgccguggauugugcucuggauccucugagcgagacaaagugcacccugaaguccuucaccguggaaaagggcaucuaccagaccagcaacuuccgggugcagcccaccgaauccaucgugcgguuccccaauaucaccaaucugugccccuucggcgagguguucaaugccaccagauucgccucuguguacgccuggaaccggaagcggaucagcaauugcguggccgacuacuccgugcuguacaacuccgccagcuucagcaccuucaagugcuacggcguguccccuaccaagcugaacgaccugugcuucacaaacguguacgccgacagcuucgugauccggggagaugaagugcggcagauugccccuggacagacaggcaagaucgccgacuacaacuacaagcugcccgacgacuucaccggcugugugauugccuggaacagcaacaaccuggacuccaaagucggcggcaacuacaauuaccuguaccggcuguuccggaaguccaaucugaagcccuucgagcgggacaucuccaccgagaucuaucaggccggcagcaccccuuguaacggcguggaaggcuucaacugcuacuucccacugcaguccuacggcuuucagcccacauacggcgugggcuaucagcccuacagagugguggugcugagcuucgaacugcugcaugccccugccacagugugcggcccuaagaaaagcaccaaucucgugaagaacaaaugcgugaacuucaacuucaacggccugaccggcaccggcgugcugacagagagcaacaagaaguuccugccauuccagcaguuuggccgggauaucgacgauaccacagacgccguuagagauccccagacacuggaaauccuggacaucaccccuugcagcuucggcggagugucugugaucaccccuggcaccaacaccagcaaucagguggcagugcuguaccagggcgugaacuguaccgaagugcccguggccauucacgccgaucagcugacaccuacauggcggguguacuccaccggcagcaauguguuucagaccagagccggcugucugaucggagccgagcacgugaacaauagcuacgagugcgacauccccaucggcgcuggaaucugcgccagcuaccagacacagacaaacagccaccggagagccagaagcguggccagccagagcaucauugccuacacaaugucucugggcgccgagaacagcguggccuacuccaacaacucuaucgcuauccccaucaacuucaccaucagcgugaccacagagauccugccuguguccaugaccaagaccagcguggacugcaccauguacaucugcggcgauuccaccgagugcuccaaccugcugcugcaguacggcagcuucugcacccagcugaauagagcccugacagggaucgccguggaacaggacaagaacacccaagagguguucgcccaagugaagcagaucuacaagaccccuccuaucaaggacuucggcggcuucaauuucagccagauucugcccgauccuagcaagcccagcaagcggagcuucaucgaggaccugcuguucaacaaagugacacuggccgacgccggcuucaucaagcaguauggcgauugucugggcgacauugccgccagggaucugauuugcgcccagaaguuuaacggacugacagugcugccuccucugcugaccgaugagaugaucgcccaguacacaucugcccugcuggccggcacaaucacaagcggcuggacauuuggagcaggcgccgcucugcagauccccuuugcuaugcagauggccuaccgguucaacggcaucggagugacccagaaugugcuguacgagaaccagaagcugaucgccaaccaguucaacagcgccaucggcaagauccaggacagccugagcagcacagcaagcgcccugggaaagcugcaggacguggucaaccagaaugcccaggcacugaacacccuggucaagcagcuguccuccaacuucggcgccaucagcucugugcugaacgauauccuggccagacuggacccuccugaggccgaggugcagaucgacagacugaucacaggcagacugcagagccuccagacauacgugacccagcagcugaucagagccgccgagauuagagccucugccaaucuggccgccaccaagaugucugagugugugcugggccagagcaagagaguggacuuuugcggcaagggcuaccaccugaugagcuucccucagucugccccucacggcgugguguuucugcacgugacauaugugcccgcucaagagaagaauuucaccaccgcuccagccaucugccacgacggcaaagcccacuuuccuagagaaggcguguucguguccaacggcacccauugguucgugacacagcggaacuucuacgagccccagaucaucaccacccacaacaccuucgugucuggcaacugcgacgucgugaucggcauugugaacaauaccguguacgacccucugcagcccgagcuggacagcuucaaagaggaacuggacaaguacuuuaagaaccacacaagccccgacguggaccugggcgauaucagcggaaucaaugccagcgucgugaacauccagaaagagaucgaccggcugaacgagguggccaagaaucugaacgagagccugaucgaccugcaagaacuggggaaguacgagcaguacaucaaguggcccugguacaucuggcugggcuuuaucgccggacugauugccaucgugauggucacaaucaugcuguguugcaugaccagcugcuguagcugccugaagggcuguuguagcuguggcagcugcugcaaguucgacgaggacgauucugagcccgugcugaagggcgugaaacugcacuacacaugaggacuaguuauaagacugacuagcccgaugggccucccaacgggcccuccuccccuccuugcaccgagauuaaucaaaggcucuuuucagagccaccaaaaaaaaaaaaaaaaaaaaaaaaaaaaaaaaaaaaaaaaaaaaaaaaaaaaaaaaaaaaaaaaaaaaaaaaaaaaaaaaaaaaaaaaaaaaaaaaaaaaa

SEQ ID NO: 24280 - RNA, 4035 nt, Artificial Sequence
  SARS-CoV-2/Wuhan/WIV05/2019__EPI_ISL_402128 spike protein mRNA gc mod (1-1273)(K986P_V987P_K986P_V987P_K417N_E484K_N501Y_D614G)
aggagaaagcuuaccauguucguguuccuggugcugcugccucugguguccagccagugugugaaccugaccaccagaacacagcugccuccagccuacaccaacagcuuuaccagaggcguguacuaccccgacaagguguucagauccagcgugcugcacucuacccaggaccuguuccugccuuucuucagcaacgugaccugguuccacgccauccacguguccggcaccaauggcaccaagagauucgacaaccccgugcugcccuucaacgacgggguguacuuugccagcaccgagaaguccaacaucaucagaggcuggaucuucggcaccacacuggacagcaagacccagagccugcugaucgugaacaacgccaccaacguggucaucaaagugugcgaguuccaguucugcaacgaccccuuccugggcgucuacuaccacaagaacaacaagagcuggauggaaagcgaguuccggguguacagcagcgccaacaacugcaccuucgaguacgugucccagccuuuccugauggaccuggaaggcaagcagggcaacuucaagaaccugcgcgaguucguguuuaagaacaucgacggcuacuucaagaucuacagcaagcacaccccuaucaaccucgugcgggaucugccucagggcuucucugcucuggaaccccugguggaucugcccaucggcaucaacaucacccgguuucagacacugcuggcccugcacagaagcuaccugacaccuggcgauagcagcagcggauggacagcuggugccgccgcuuacuaugugggcuaccugcagccuagaaccuuccugcugaaguacaacgagaacggcaccaucaccgacgccguggauugugcucuggauccucugagcgagacaaagugcacccugaaguccuucaccguggaaaagggcaucuaccagaccagcaacuuccgggugcagcccaccgaauccaucgugcgguuccccaauaucaccaaucugugccccuucggcgagguguucaaugccaccagauucgccucuguguacgccuggaaccggaagcggaucagcaauugcguggccgacuacuccgugcuguacaacuccgccagcuucagcaccuucaagugcuacggcguguccccuaccaagcugaacgaccugugcuucacaaacguguacgccgacagcuucgugauccggggagaugaagugcggcagauugccccuggacagacaggcaacaucgccgacuacaacuacaagcugcccgacgacuucaccggcugugugauugccuggaacagcaacaaccuggacuccaaagucggcggcaacuacaauuaccuguaccggcuguuccggaaguccaaucugaagcccuucgagcgggacaucuccaccgagaucuaucaggccggcagcaccccuuguaacggcgugaagggcuucaacugcuacuucccacugcaguccuacggcuuucagcccacauacggcgugggcuaucagcccuacagagugguggugcugagcuucgaacugcugcaugccccugccacagugugcggcccuaagaaaagcaccaaucucgugaagaacaaaugcgugaacuucaacuucaacggccugaccggcaccggcgugcugacagagagcaacaagaaguuccugccauuccagcaguuuggccgggauaucgccgauaccacagacgccguuagagauccccagacacuggaaauccuggacaucaccccuugcagcuucggcggagugucugugaucaccccuggcaccaacaccagcaaucagguggcagugcuguaccagggcgugaacuguaccgaagugcccguggccauucacgccgaucagcugacaccuacauggcggguguacuccaccggcagcaauguguuucagaccagagccggcugucugaucggagccgagcacgugaacaauagcuacgagugcgacauccccaucggcgcuggaaucugcgccagcuaccagacacagacaaacagcccucggagagccagaagcguggccagccagagcaucauugccuacacaaugucucugggcgccgagaacagcguggccuacuccaacaacucuaucgcuauccccaccaacuucaccaucagcgugaccacagagauccugccuguguccaugaccaagaccagcguggacugcaccauguacaucugcggcgauuccaccgagugcuccaaccugcugcugcaguacggcagcuucugcacccagcugaauagagcccugacagggaucgccguggaacaggacaagaacacccaagagguguucgcccaagugaagcagaucuacaagaccccuccuaucaaggacuucggcggcuucaauuucagccagauucugcccgauccuagcaagcccagcaagcggagcuucaucgaggaccugcuguucaacaaagugacacuggccgacgccggcuucaucaagcaguauggcgauugucugggcgacauugccgccagggaucugauuugcgcccagaaguuuaacggacugacagugcugccuccucugcugaccgaugagaugaucgcccaguacacaucugcccugcuggccggcacaaucacaagcggcuggacauuuggagcaggcgccgcucugcagauccccuuugcuaugcagauggccuaccgguucaacggcaucggagugacccagaaugugcuguacgagaaccagaagcugaucgccaaccaguucaacagcgccaucggcaagauccaggacagccugagcagcacagcaagcgcccugggaaagcugcaggacguggucaaccagaaugcccaggcacugaacacccuggucaagcagcuguccuccaacuucggcgccaucagcucugugcugaacgauauccugagcagacuggacccuccugaggccgaggugcagaucgacagacugaucacaggcagacugcagagccuccagacauacgugacccagcagcugaucagagccgccgagauuagagccucugccaaucuggccgccaccaagaugucugagugugugcugggccagagcaagagaguggacuuuugcggcaagggcuaccaccugaugagcuucccucagucugccccucacggcgugguguuucugcacgugacauaugugcccgcucaagagaagaauuucaccaccgcuccagccaucugccacgacggcaaagcccacuuuccuagagaaggcguguucguguccaacggcacccauugguucgugacacagcggaacuucuacgagccccagaucaucaccaccgacaacaccuucgugucuggcaacugcgacgucgugaucggcauugugaacaauaccguguacgacccucugcagcccgagcuggacagcuucaaagaggaacuggacaaguacuuuaagaaccacacaagccccgacguggaccugggcgauaucagcggaaucaaugccagcgucgugaacauccagaaagagaucgaccggcugaacgagguggccaagaaucugaacgagagccugaucgaccugcaagaacuggggaaguacgagcaguacaucaaguggcccugguacaucuggcugggcuuuaucgccggacugauugccaucgugauggucacaaucaugcuguguugcaugaccagcugcuguagcugccugaagggcuguuguagcuguggcagcugcugcaaguucgacgaggacgauucugagcccgugcugaagggcgugaaacugcacuacacaugaggacuaguuauaagacugacuagcccgaugggccucccaacgggcccuccuccccuccuugcaccgagauuaaucaaaggcucuuuucagagccaccaaaaaaaaaaaaaaaaaaaaaaaaaaaaaaaaaaaaaaaaaaaaaaaaaaaaaaaaaaaaaaaaaaaaaaaaaaaaaaaaaaaaaaaaaaaaaaaaaaaaa

SEQ ID NO: 24281 - RNA, 4026 nt, Artificial Sequence
  SARS-CoV-2/Wuhan/WIV05/2019__EPI_ISL_402128 spike protein mRNA gc mod (1-1273)(K986P_V987P_K986P_V987P_L18F_D80A_D215G_L242del_A243del_ L244del_R246I_K417N_E484K_N501Y_D614G_A701V)
aggagaaagcuuaccauguucguguuccuggugcugcugccucugguguccagccagugugugaacuucaccaccagaacacagcugccuccagccuacaccaacagcuuuaccagaggcguguacuaccccgacaagguguucagauccagcgugcugcacucuacccaggaccuguuccugccuuucuucagcaacgugaccugguuccacgccauccacguguccggcaccaauggcaccaagagauucgccaaccccgugcugcccuucaacgacgggguguacuuugccagcaccgagaaguccaacaucaucagaggcuggaucuucggcaccacacuggacagcaagacccagagccugcugaucgugaacaacgccaccaacguggucaucaaagugugcgaguuccaguucugcaacgaccccuuccugggcgucuacuaccacaagaacaacaagagcuggauggaaagcgaguuccggguguacagcagcgccaacaacugcaccuucgaguacgugucccagccuuuccugauggaccuggaaggcaagcagggcaacuucaagaaccugcgcgaguucguguuuaagaacaucgacggcuacuucaagaucuacagcaagcacaccccuaucaaccucgugcggggccugccucagggcuucucugcucuggaaccccugguggaucugcccaucggcaucaacaucacccgguuucagacacugcacaucagcuaccugacaccuggcgauagcagcagcggauggacagcuggugccgccgcuuacuaugugggcuaccugcagccuagaaccuuccugcugaaguacaacgagaacggcaccaucaccgacgccguggauugugcucuggauccucugagcgagacaaagugcacccugaaguccuucaccguggaaaagggcaucuaccagaccagcaacuuccgggugcagcccaccgaauccaucgugcgguuccccaauaucaccaaucugugccccuucggcgagguguucaaugccaccagauucgccucuguguacgccuggaaccggaagcggaucagcaauugcguggccgacuacuccgugcuguacaacuccgccagcuucagcaccuucaagugcuacggcguguccccuaccaagcugaacgaccugugcuucacaaacguguacgccgacagcuucgugauccggggagaugaagugcggcagauugccccuggacagacaggcaacaucgccgacuacaacuacaagcugcccgacgacuucaccggcugugugauugccuggaacagcaacaaccuggacuccaaagucggcggcaacuacaauuaccuguaccggcuguuccggaaguccaaucugaagcccuucgagcgggacaucuccaccgagaucuaucaggccggcagcaccccuuguaacggcgugaagggcuucaacugcuacuucccacugcaguccuacggcuuucagcccacauacggcgugggcuaucagcccuacagagugguggugcugagcuucgaacugcugcaugccccugccacagugugcggcccuaagaaaagcaccaaucucgugaagaacaaaugcgugaacuucaacuucaacggccugaccggcaccggcgugcugacagagagcaacaagaaguuccugccauuccagcaguuuggccgggauaucgccgauaccacagacgccguuagagauccccagacacuggaaauccuggacaucaccccuugcagcuucggcggagugucugugaucaccccuggcaccaacaccagcaaucagguggcagugcuguaccagggcgugaacuguaccgaagugcccguggccauucacgccgaucagcugacaccuacauggcggguguacuccaccggcagcaauguguuucagaccagagccggcugucugaucggagccgagcacgugaacaauagcuacgagugcgacauccccaucggcgcuggaaucugcgccagcuaccagacacagacaaacagcccucggagagccagaagcguggccagccagagcaucauugccuacacaaugucucugggcguggagaacagcguggccuacuccaacaacucuaucgcuauccccaccaacuucaccaucagcgugaccacagagauccugccuguguccaugaccaagaccagcguggacugcaccauguacaucugcggcgauuccaccgagugcuccaaccugcugcugcaguacggcagcuucugcacccagcugaauagagcccugacagggaucgccguggaacaggacaagaacacccaagagguguucgcccaagugaagcagaucuacaagaccccuccuaucaaggacuucggcggcuucaauuucagccagauucugcccgauccuagcaagcccagcaagcggagcuucaucgaggaccugcuguucaacaaagugacacuggccgacgccggcuucaucaagcaguauggcgauugucugggcgacauugccgccagggaucugauuugcgcccagaaguuuaacggacugacagugcugccuccucugcugaccgaugagaugaucgcccaguacacaucugcccugcuggccggcacaaucacaagcggcuggacauuuggagcaggcgccgcucugcagauccccuuugcuaugcagauggccuaccgguucaacggcaucggagugacccagaaugugcuguacgagaaccagaagcugaucgccaaccaguucaacagcgccaucggcaagauccaggacagccugagcagcacagcaagcgcccugggaaagcugcaggacguggucaaccagaaugcccaggcacugaacacccuggucaagcagcuguccuccaacuucggcgccaucagcucugugcugaacgauauccugagcagacuggacccuccugaggccgaggugcagaucgacagacugaucacaggcagacugcagagccuccagacauacgugacccagcagcugaucagagccgccgagauuagagccucugccaaucuggccgccaccaagaugucugagugugugcugggccagagcaagagaguggacuuuugcggcaagggcuaccaccugaugagcuucccucagucugccccucacggcgugguguuucugcacgugacauaugugcccgcucaagagaagaauuucaccaccgcuccagccaucugccacgacggcaaagcccacuuuccuagagaaggcguguucguguccaacggcacccauugguucgugacacagcggaacuucuacgagccccagaucaucaccaccgacaacaccuucgugucuggcaacugcgacgucgugaucggcauugugaacaauaccguguacgacccucugcagcccgagcuggacagcuucaaagaggaacuggacaaguacuuuaagaaccacacaagccccgacguggaccugggcgauaucagcggaaucaaugccagcgucgugaacauccagaaagagaucgaccggcugaacgagguggccaagaaucugaacgagagccugaucgaccugcaagaacuggggaaguacgagcaguacaucaaguggcccugguacaucuggcugggcuuuaucgccggacugauugccaucgugauggucacaaucaugcuguguugcaugaccagcugcuguagcugccugaagggcuguuguagcuguggcagcugcugcaaguucgacgaggacgauucugagcccgugcugaagggcgugaaacugcacuacacaugaggacuaguuauaagacugacuagcccgaugggccucccaacgggcccuccuccccuccuugcaccgagauuaaucaaaggcucuuuucagagccaccaaaaaaaaaaaaaaaaaaaaaaaaaaaaaaaaaaaaaaaaaaaaaaaaaaaaaaaaaaaaaaaaaaaaaaaaaaaaaaaaaaaaaaaaaaaaaaaaaaaaa

SEQ ID NO: 24282 - RNA, 4035 nt, Artificial Sequence
  SARS-CoV-2/Wuhan/WIV05/2019__EPI_ISL_402128 spike protein mRNA gc mod (1-1273)(K986P_V987P_K986P_V987P_E484K_D614G)
aggagaaagcuuaccauguucguguuccuggugcugcugccucugguguccagccagugugugaaccugaccaccagaacacagcugccuccagccuacaccaacagcuuuaccagaggcguguacuaccccgacaagguguucagauccagcgugcugcacucuacccaggaccuguuccugccuuucuucagcaacgugaccugguuccacgccauccacguguccggcaccaauggcaccaagagauucgacaaccccgugcugcccuucaacgacgggguguacuuugccagcaccgagaaguccaacaucaucagaggcuggaucuucggcaccacacuggacagcaagacccagagccugcugaucgugaacaacgccaccaacguggucaucaaagugugcgaguuccaguucugcaacgaccccuuccugggcgucuacuaccacaagaacaacaagagcuggauggaaagcgaguuccggguguacagcagcgccaacaacugcaccuucgaguacgugucccagccuuuccugauggaccuggaaggcaagcagggcaacuucaagaaccugcgcgaguucguguuuaagaacaucgacggcuacuucaagaucuacagcaagcacaccccuaucaaccucgugcgggaucugccucagggcuucucugcucuggaaccccugguggaucugcccaucggcaucaacaucacccgguuucagacacugcuggcccugcacagaagcuaccugacaccuggcgauagcagcagcggauggacagcuggugccgccgcuuacuaugugggcuaccugcagccuagaaccuuccugcugaaguacaacgagaacggcaccaucaccgacgccguggauugugcucuggauccucugagcgagacaaagugcacccugaaguccuucaccguggaaaagggcaucuaccagaccagcaacuuccgggugcagcccaccgaauccaucgugcgguuccccaauaucaccaaucugugccccuucggcgagguguucaaugccaccagauucgccucuguguacgccuggaaccggaagcggaucagcaauugcguggccgacuacuccgugcuguacaacuccgccagcuucagcaccuucaagugcuacggcguguccccuaccaagcugaacgaccugugcuucacaaacguguacgccgacagcuucgugauccggggagaugaagugcggcagauugccccuggacagacaggcaagaucgccgacuacaacuacaagcugcccgacgacuucaccggcugugugauugccuggaacagcaacaaccuggacuccaaagucggcggcaacuacaauuaccuguaccggcuguuccggaaguccaaucugaagcccuucgagcgggacaucuccaccgagaucuaucaggccggcagcaccccuuguaacggcgugaagggcuucaacugcuacuucccacugcaguccuacggcuuucagcccacaaauggcgugggcuaucagcccuacagagugguggugcugagcuucgaacugcugcaugccccugccacagugugcggcccuaagaaaagcaccaaucucgugaagaacaaaugcgugaacuucaacuucaacggccugaccggcaccggcgugcugacagagagcaacaagaaguuccugccauuccagcaguuuggccgggauaucgccgauaccacagacgccguuagagauccccagacacuggaaauccuggacaucaccccuugcagcuucggcggagugucugugaucaccccuggcaccaacaccagcaaucagguggcagugcuguaccagggcgugaacuguaccgaagugcccguggccauucacgccgaucagcugacaccuacauggcggguguacuccaccggcagcaauguguuucagaccagagccggcugucugaucggagccgagcacgugaacaauagcuacgagugcgacauccccaucggcgcuggaaucugcgccagcuaccagacacagacaaacagcccucggagagccagaagcguggccagccagagcaucauugccuacacaaugucucugggcgccgagaacagcguggccuacuccaacaacucuaucgcuauccccaccaacuucaccaucagcgugaccacagagauccugccuguguccaugaccaagaccagcguggacugcaccauguacaucugcggcgauuccaccgagugcuccaaccugcugcugcaguacggcagcuucugcacccagcugaauagagcccugacagggaucgccguggaacaggacaagaacacccaagagguguucgcccaagugaagcagaucuacaagaccccuccuaucaaggacuucggcggcuucaauuucagccagauucugcccgauccuagcaagcccagcaagcggagcuucaucgaggaccugcuguucaacaaagugacacuggccgacgccggcuucaucaagcaguauggcgauugucugggcgacauugccgccagggaucugauuugcgcccagaaguuuaacggacugacagugcugccuccucugcugaccgaugagaugaucgcccaguacacaucugcccugcuggccggcacaaucacaagcggcuggacauuuggagcaggcgccgcucugcagauccccuuugcuaugcagauggccuaccgguucaacggcaucggagugacccagaaugugcuguacgagaaccagaagcugaucgccaaccaguucaacagcgccaucggcaagauccaggacagccugagcagcacagcaagcgcccugggaaagcugcaggacguggucaaccagaaugcccaggcacugaacacccuggucaagcagcuguccuccaacuucggcgccaucagcucugugcugaacgauauccugagcagacuggacccuccugaggccgaggugcagaucgacagacugaucacaggcagacugcagagccuccagacauacgugacccagcagcugaucagagccgccgagauuagagccucugccaaucuggccgccaccaagaugucugagugugugcugggccagagcaagagaguggacuuuugcggcaagggcuaccaccugaugagcuucccucagucugccccucacggcgugguguuucugcacgugacauaugugcccgcucaagagaagaauuucaccaccgcuccagccaucugccacgacggcaaagcccacuuuccuagagaaggcguguucguguccaacggcacccauugguucgugacacagcggaacuucuacgagccccagaucaucaccaccgacaacaccuucgugucuggcaacugcgacgucgugaucggcauugugaacaauaccguguacgacccucugcagcccgagcuggacagcuucaaagaggaacuggacaaguacuuuaagaaccacacaagccccgacguggaccugggcgauaucagcggaaucaaugccagcgucgugaacauccagaaagagaucgaccggcugaacgagguggccaagaaucugaacgagagccugaucgaccugcaagaacuggggaaguacgagcaguacaucaaguggcccugguacaucuggcugggcuuuaucgccggacugauugccaucgugauggucacaaucaugcuguguugcaugaccagcugcuguagcugccugaagggcuguuguagcuguggcagcugcugcaaguucgacgaggacgauucugagcccgugcugaagggcgugaaacugcacuacacaugaggacuaguuauaagacugacuagcccgaugggccucccaacgggcccuccuccccuccuugcaccgagauuaaucaaaggcucuuuucagagccaccaaaaaaaaaaaaaaaaaaaaaaaaaaaaaaaaaaaaaaaaaaaaaaaaaaaaaaaaaaaaaaaaaaaaaaaaaaaaaaaaaaaaaaaaaaaaaaaaaaaaa

SEQ ID NO: 24283 - RNA, 4035 nt, Artificial Sequence
  SARS-CoV-2/Wuhan/WIV05/2019__EPI_ISL_402128 spike protein mRNA gc mod (1-1273)(K986P_V987P_K986P_V987P_L18F_T20N_P26S_D138Y_R190S_K417T _E484K_N501Y_D614G_H655Y_T1027I)
aggagaaagcuuaccauguucguguuccuggugcugcugccucugguguccagccagugugugaacuucaccaacagaacacagcugccuagcgccuacaccaacagcuuuaccagaggcguguacuaccccgacaagguguucagauccagcgugcugcacucuacccaggaccuguuccugccuuucuucagcaacgugaccugguuccacgccauccacguguccggcaccaauggcaccaagagauucgacaaccccgugcugcccuucaacgacgggguguacuuugccagcaccgagaaguccaacaucaucagaggcuggaucuucggcaccacacuggacagcaagacccagagccugcugaucgugaacaacgccaccaacguggucaucaaagugugcgaguuccaguucugcaacuaccccuuccugggcgucuacuaccacaagaacaacaagagcuggauggaaagcgaguuccggguguacagcagcgccaacaacugcaccuucgaguacgugucccagccuuuccugauggaccuggaaggcaagcagggcaacuucaagaaccugagcgaguucguguuuaagaacaucgacggcuacuucaagaucuacagcaagcacaccccuaucaaccucgugcgggaucugccucagggcuucucugcucuggaaccccugguggaucugcccaucggcaucaacaucacccgguuucagacacugcuggcccugcacagaagcuaccugacaccuggcgauagcagcagcggauggacagcuggugccgccgcuuacuaugugggcuaccugcagccuagaaccuuccugcugaaguacaacgagaacggcaccaucaccgacgccguggauugugcucuggauccucugagcgagacaaagugcacccugaaguccuucaccguggaaaagggcaucuaccagaccagcaacuuccgggugcagcccaccgaauccaucgugcgguuccccaauaucaccaaucugugccccuucggcgagguguucaaugccaccagauucgccucuguguacgccuggaaccggaagcggaucagcaauugcguggccgacuacuccgugcuguacaacuccgccagcuucagcaccuucaagugcuacggcguguccccuaccaagcugaacgaccugugcuucacaaacguguacgccgacagcuucgugauccggggagaugaagugcggcagauugccccuggacagacaggcaccaucgccgacuacaacuacaagcugcccgacgacuucaccggcugugugauugccuggaacagcaacaaccuggacuccaaagucggcggcaacuacaauuaccuguaccggcuguuccggaaguccaaucugaagcccuucgagcgggacaucuccaccgagaucuaucaggccggcagcaccccuuguaacggcgugaagggcuucaacugcuacuucccacugcaguccuacggcuuucagcccacauacggcgugggcuaucagcccuacagagugguggugcugagcuucgaacugcugcaugccccugccacagugugcggcccuaagaaaagcaccaaucucgugaagaacaaaugcgugaacuucaacuucaacggccugaccggcaccggcgugcugacagagagcaacaagaaguuccugccauuccagcaguuuggccgggauaucgccgauaccacagacgccguuagagauccccagacacuggaaauccuggacaucaccccuugcagcuucggcggagugucugugaucaccccuggcaccaacaccagcaaucagguggcagugcuguaccagggcgugaacuguaccgaagugcccguggccauucacgccgaucagcugacaccuacauggcggguguacuccaccggcagcaauguguuucagaccagagccggcugucugaucggagccgaguacgugaacaauagcuacgagugcgacauccccaucggcgcuggaaucugcgccagcuaccagacacagacaaacagcccucggagagccagaagcguggccagccagagcaucauugccuacacaaugucucugggcgccgagaacagcguggccuacuccaacaacucuaucgcuauccccaccaacuucaccaucagcgugaccacagagauccugccuguguccaugaccaagaccagcguggacugcaccauguacaucugcggcgauuccaccgagugcuccaaccugcugcugcaguacggcagcuucugcacccagcugaauagagcccugacagggaucgccguggaacaggacaagaacacccaagagguguucgcccaagugaagcagaucuacaagaccccuccuaucaaggacuucggcggcuucaauuucagccagauucugcccgauccuagcaagcccagcaagcggagcuucaucgaggaccugcuguucaacaaagugacacuggccgacgccggcuucaucaagcaguauggcgauugucugggcgacauugccgccagggaucugauuugcgcccagaaguuuaacggacugacagugcugccuccucugcugaccgaugagaugaucgcccaguacacaucugcccugcuggccggcacaaucacaagcggcuggacauuuggagcaggcgccgcucugcagauccccuuugcuaugcagauggccuaccgguucaacggcaucggagugacccagaaugugcuguacgagaaccagaagcugaucgccaaccaguucaacagcgccaucggcaagauccaggacagccugagcagcacagcaagcgcccugggaaagcugcaggacguggucaaccagaaugcccaggcacugaacacccuggucaagcagcuguccuccaacuucggcgccaucagcucugugcugaacgauauccugagcagacuggacccuccugaggccgaggugcagaucgacagacugaucacaggcagacugcagagccuccagacauacgugacccagcagcugaucagagccgccgagauuagagccucugccaaucuggccgccaucaagaugucugagugugugcugggccagagcaagagaguggacuuuugcggcaagggcuaccaccugaugagcuucccucagucugccccucacggcgugguguuucugcacgugacauaugugcccgcucaagagaagaauuucaccaccgcuccagccaucugccacgacggcaaagcccacuuuccuagagaaggcguguucguguccaacggcacccauugguucgugacacagcggaacuucuacgagccccagaucaucaccaccgacaacaccuucgugucuggcaacugcgacgucgugaucggcauugugaacaauaccguguacgacccucugcagcccgagcuggacagcuucaaagaggaacuggacaaguacuuuaagaaccacacaagccccgacguggaccugggcgauaucagcggaaucaaugccagcgucgugaacauccagaaagagaucgaccggcugaacgagguggccaagaaucugaacgagagccugaucgaccugcaagaacuggggaaguacgagcaguacaucaaguggcccugguacaucuggcugggcuuuaucgccggacugauugccaucgugauggucacaaucaugcuguguugcaugaccagcugcuguagcugccugaagggcuguuguagcuguggcagcugcugcaaguucgacgaggacgauucugagcccgugcugaagggcgugaaacugcacuacacaugaggacuaguuauaagacugacuagcccgaugggccucccaacgggcccuccuccccuccuugcaccgagauuaaucaaaggcucuuuucagagccaccaaaaaaaaaaaaaaaaaaaaaaaaaaaaaaaaaaaaaaaaaaaaaaaaaaaaaaaaaaaaaaaaaaaaaaaaaaaaaaaaaaaaaaaaaaaaaaaaaaaaa

SEQ ID NO: 24284 - RNA, 4035 nt, Artificial Sequence
  SARS-CoV-2/Wuhan/WIV05/2019__EPI_ISL_402128 spike protein mRNA gc mod (1-1273)(K986P_V987P_K986P_V987P_S13I_W152C_L452R_D614G)
aggagaaagcuuaccauguucguguuccuggugcugcugccucugguguccauccagugugugaaccugaccaccagaacacagcugccuccagccuacaccaacagcuuuaccagaggcguguacuaccccgacaagguguucagauccagcgugcugcacucuacccaggaccuguuccugccuuucuucagcaacgugaccugguuccacgccauccacguguccggcaccaauggcaccaagagauucgacaaccccgugcugcccuucaacgacgggguguacuuugccagcaccgagaaguccaacaucaucagaggcuggaucuucggcaccacacuggacagcaagacccagagccugcugaucgugaacaacgccaccaacguggucaucaaagugugcgaguuccaguucugcaacgaccccuuccugggcgucuacuaccacaagaacaacaagagcugcauggaaagcgaguuccggguguacagcagcgccaacaacugcaccuucgaguacgugucccagccuuuccugauggaccuggaaggcaagcagggcaacuucaagaaccugcgcgaguucguguuuaagaacaucgacggcuacuucaagaucuacagcaagcacaccccuaucaaccucgugcgggaucugccucagggcuucucugcucuggaaccccugguggaucugcccaucggcaucaacaucacccgguuucagacacugcuggcccugcacagaagcuaccugacaccuggcgauagcagcagcggauggacagcuggugccgccgcuuacuaugugggcuaccugcagccuagaaccuuccugcugaaguacaacgagaacggcaccaucaccgacgccguggauugugcucuggauccucugagcgagacaaagugcacccugaaguccuucaccguggaaaagggcaucuaccagaccagcaacuuccgggugcagcccaccgaauccaucgugcgguuccccaauaucaccaaucugugccccuucggcgagguguucaaugccaccagauucgccucuguguacgccuggaaccggaagcggaucagcaauugcguggccgacuacuccgugcuguacaacuccgccagcuucagcaccuucaagugcuacggcguguccccuaccaagcugaacgaccugugcuucacaaacguguacgccgacagcuucgugauccggggagaugaagugcggcagauugccccuggacagacaggcaagaucgccgacuacaacuacaagcugcccgacgacuucaccggcugugugauugccuggaacagcaacaaccuggacuccaaagucggcggcaacuacaauuaccgcuaccggcuguuccggaaguccaaucugaagcccuucgagcgggacaucuccaccgagaucuaucaggccggcagcaccccuuguaacggcguggaaggcuucaacugcuacuucccacugcaguccuacggcuuucagcccacaaauggcgugggcuaucagcccuacagagugguggugcugagcuucgaacugcugcaugccccugccacagugugcggcccuaagaaaagcaccaaucucgugaagaacaaaugcgugaacuucaacuucaacggccugaccggcaccggcgugcugacagagagcaacaagaaguuccugccauuccagcaguuuggccgggauaucgccgauaccacagacgccguuagagauccccagacacuggaaauccuggacaucaccccuugcagcuucggcggagugucugugaucaccccuggcaccaacaccagcaaucagguggcagugcuguaccagggcgugaacuguaccgaagugcccguggccauucacgccgaucagcugacaccuacauggcggguguacuccaccggcagcaauguguuucagaccagagccggcugucugaucggagccgagcacgugaacaauagcuacgagugcgacauccccaucggcgcuggaaucugcgccagcuaccagacacagacaaacagcccucggagagccagaagcguggccagccagagcaucauugccuacacaaugucucugggcgccgagaacagcguggccuacuccaacaacucuaucgcuauccccaccaacuucaccaucagcgugaccacagagauccugccuguguccaugaccaagaccagcguggacugcaccauguacaucugcggcgauuccaccgagugcuccaaccugcugcugcaguacggcagcuucugcacccagcugaauagagcccugacagggaucgccguggaacaggacaagaacacccaagagguguucgcccaagugaagcagaucuacaagaccccuccuaucaaggacuucggcggcuucaauuucagccagauucugcccgauccuagcaagcccagcaagcggagcuucaucgaggaccugcuguucaacaaagugacacuggccgacgccggcuucaucaagcaguauggcgauugucugggcgacauugccgccagggaucugauuugcgcccagaaguuuaacggacugacagugcugccuccucugcugaccgaugagaugaucgcccaguacacaucugcccugcuggccggcacaaucacaagcggcuggacauuuggagcaggcgccgcucugcagauccccuuugcuaugcagauggccuaccgguucaacggcaucggagugacccagaaugugcuguacgagaaccagaagcugaucgccaaccaguucaacagcgccaucggcaagauccaggacagccugagcagcacagcaagcgcccugggaaagcugcaggacguggucaaccagaaugcccaggcacugaacacccuggucaagcagcuguccuccaacuucggcgccaucagcucugugcugaacgauauccugagcagacuggacccuccugaggccgaggugcagaucgacagacugaucacaggcagacugcagagccuccagacauacgugacccagcagcugaucagagccgccgagauuagagccucugccaaucuggccgccaccaagaugucugagugugugcugggccagagcaagagaguggacuuuugcggcaagggcuaccaccugaugagcuucccucagucugccccucacggcgugguguuucugcacgugacauaugugcccgcucaagagaagaauuucaccaccgcuccagccaucugccacgacggcaaagcccacuuuccuagagaaggcguguucguguccaacggcacccauugguucgugacacagcggaacuucuacgagccccagaucaucaccaccgacaacaccuucgugucuggcaacugcgacgucgugaucggcauugugaacaauaccguguacgacccucugcagcccgagcuggacagcuucaaagaggaacuggacaaguacuuuaagaaccacacaagccccgacguggaccugggcgauaucagcggaaucaaugccagcgucgugaacauccagaaagagaucgaccggcugaacgagguggccaagaaucugaacgagagccugaucgaccugcaagaacuggggaaguacgagcaguacaucaaguggcccugguacaucuggcugggcuuuaucgccggacugauugccaucgugauggucacaaucaugcuguguugcaugaccagcugcuguagcugccugaagggcuguuguagcuguggcagcugcugcaaguucgacgaggacgauucugagcccgugcugaagggcgugaaacugcacuacacaugaggacuaguuauaagacugacuagcccgaugggccucccaacgggcccuccuccccuccuugcaccgagauuaaucaaaggcucuuuucagagccaccaaaaaaaaaaaaaaaaaaaaaaaaaaaaaaaaaaaaaaaaaaaaaaaaaaaaaaaaaaaaaaaaaaaaaaaaaaaaaaaaaaaaaaaaaaaaaaaaaaaaa

SEQ ID NO: 24285 - RNA, 1371 nt, Artificial Sequence
  SARS-CoV-2/Wuhan/WIV05/2019__EPI_ISL_402128 spike protein mRNA gc (1-15,334-528) Ferritin construct
aggagaaagcuuaccauguucguguuccugguccuccugccccuggugagcucccagugcaaccugugccccuucggcgagguguucaacgccacccgguucgccagcgucuacgccuggaaccgcaagcggaucuccaacugcguggcggacuacagcgugcuguacaacuccgccagcuucuccacguucaagugcuacggcgucagccccaccaagcucaacgaccugugcuucaccaacguguacgccgacuccuucgugauccgcggggacgagguccggcagaucgcccccggccagaccgggaagaucgccgacuacaacuacaagcugccggacgacuucacgggcugcgugaucgcguggaacagcaacaaccucgacuccaaggucgggggcaacuacaacuaccuguaccgccuguuccgcaagagcaaccucaagcccuucgagcgggacaucuccaccgagaucuaccaggccggcagcacccccugcaacgggguggagggcuucaacugcuacuucccccugcaguccuacggguuccagccgaccaacggcgugggguaccagcccuaccggguggucgugcugagcuucgagcuccugcacgcccccgccacggugugcggccccaagggcggggguggaagcggcggggguggaagugacaucaucaagcuccugaacgagcaggucaacaaggagaugcaguccagcaaccuguacauguccaugagcuccuggugcuacacccacagccucgacggcgccgggcuguuccuguucgaccacgccgcggaggaguacgagcacgccaagaagcucaucaucuuccugaacgagaacaacgugcccgugcagcugaccuccaucagcgccccggagcacaaguucgagggccucacgcagaucuuccagaaggccuacgagcacgagcagcacaucuccgagagcaucaacaacaucguggaccacgccaucaaguccaaggaccacgcgaccuucaacuuccugcagugguacgucgccgagcagcacgaggaggaggugcuguucaaggacauccucgacaagaucgagcugaucgggaacgagaaccacggccuguaccucgccgaccaguacgugaaggggaucgccaagagccgcaaguccugaggacuaguuauaagacugacuagcccgaugggccucccaacgggcccuccuccccuccuugcaccgagauuaauagaucucaaaggcucuuuucagagccaccaaaaaaaaaaaaaaaaaaaaaaaaaaaaaaaaaaaaaaaaaaaaaaaaaaaaaaaaaaaaaaaaaaaaaaaaaaaaaaaaaaaaaaaaaaaaaaaaaaaaa

SEQ ID NO: 24286 - RNA, 969 nt, Artificial Sequence
  SARS-CoV-2/Wuhan/WIV05/2019__EPI_ISL_402128 spike protein mRNA gc (334-528) Foldon construct
aggagaaagcuuaccaugcccaugggcagccugcagccgcucgccacccuguaccugcucgggaugcugguggccuccguccuggcgaaccugugccccuucggcgagguguucaacgccacccgguucgccagcgucuacgccuggaaccgcaagcggaucuccaacugcguggcggacuacagcgugcuguacaacuccgccagcuucuccacguucaagugcuacggcgucagccccaccaagcucaacgaccugugcuucaccaacguguacgccgacuccuucgugauccgcggggacgagguccggcagaucgcccccggccagaccgggaagaucgccgacuacaacuacaagcugccggacgacuucacgggcugcgugaucgcguggaacagcaacaaccucgacuccaaggucgggggcaacuacaacuaccuguaccgccuguuccgcaagagcaaccucaagcccuucgagcgggacaucuccaccgagaucuaccaggccggcagcacccccugcaacgggguggagggcuucaacugcuacuucccccugcaguccuacggguuccagccgaccaacggcgugggguaccagcccuaccggguggucgugcugagcuucgagcuccugcacgcccccgccacggugugcggccccaagggcagcggcggguacauccccgaggccccgcgcgacggccaggccuacgugcggaaggacggcgaguggguccugcugagcaccuuccucugaggacuaguuauaagacugacuagcccgaugggccucccaacgggcccuccuccccuccuugcaccgagauuaauagaucucaaaggcucuuuucagagccaccaaaaaaaaaaaaaaaaaaaaaaaaaaaaaaaaaaaaaaaaaaaaaaaaaaaaaaaaaaaaaaaaaaaaaaaaaaaaaaaaaaaaaaaaaaaaaaaaaaaaa

SEQ ID NO: 24287 - RNA, 1347 nt, Artificial Sequence
  SARS-CoV-2/Wuhan/WIV05/2019__EPI_ISL_402128 spike protein mRNA gc (1-15,334-528) LumSynth construct
aggagaaagcuuaccauguucguguuccugguccuccugccccuggugagcucccagugcaaccugugccccuucggcgagguguucaacgccacccgguucgccagcgucuacgccuggaaccgcaagcggaucuccaacugcguggcggacuacagcgugcuguacaacuccgccagcuucuccacguucaagugcuacggcgucagccccaccaagcucaacgaccugugcuucaccaacguguacgccgacuccuucgugauccgcggggacgagguccggcagaucgcccccggccagaccgggaagaucgccgacuacaacuacaagcugccggacgacuucacgggcugcgugaucgcguggaacagcaacaaccucgacuccaaggucgggggcaacuacaacuaccuguaccgccuguuccgcaagagcaaccucaagcccuucgagcgggacaucuccaccgagaucuaccaggccggcagcacccccugcaacgggguggagggcuucaacugcuacuucccccugcaguccuacggguuccagccgaccaacggcgugggguaccagcccuaccggguggucgugcugagcuucgagcuccugcacgcccccgccacggugugcggccccaagggcggcggcggcuccggaggcggagguagcgggggacagaucuacgagggcaagcugaccgccgaggggcuccgcuucggcaucguggccagccgguucaaccacgcgcuggucgaccgccugguggagggggccaucgacgccaucgugcggcacggcgggcgcgaggaggacaucacccucguccgggugcccggcuccugggagaucccgguggccgccggcgagcuggcccgcaaggaggacaucgacgcggucaucgccaucggggugcugauccggggcgccacgccccacuucgacuacaucgccagcgagguguccaaggggcucgcggaccugagccuggagcuccgcaagcccaucaccuucggcgucaucaccgccgacacccuggagcaggccaucgagcgggccgggacgaagcacggcaacaagggcugggaggccgcgcuguccgccaucgagauggccaaccucuucaagagccugcgcugaggacuaguuauaagacugacuagcccgaugggccucccaacgggcccuccuccccuccuugcaccgagauuaauagaucucaaaggcucuuuucagagccaccaaaaaaaaaaaaaaaaaaaaaaaaaaaaaaaaaaaaaaaaaaaaaaaaaaaaaaaaaaaaaaaaaaaaaaaaaaaaaaaaaaaaaaaaaaaaaaaaaaaaa

SEQ ID NO: 24288 - RNA, 1308 nt, Artificial Sequence
  SARS-CoV-2/Wuhan/WIV05/2019__EPI_ISL_402128 spike protein mRNA gc (334-528) LumSynth construct
aggagaaagcuuaccaugcagaucuacgagggcaagcugaccgccgaggggcuccgcuucggcaucguggccagccgguucaaccacgcgcuggucgaccgccugguggagggggccaucgacgccaucgugcggcacggcgggcgcgaggaggacaucacccucguccgggugcccggcuccugggagaucccgguggccgccggcgagcuggcccgcaaggaggacaucgacgcggucaucgccaucggggugcugauccggggcgccacgccccacuucgacuacaucgccagcgagguguccaaggggcucgcggaccugagccuggagcuccgcaagcccaucaccuucggcgucaucaccgccgacacccuggagcaggccaucgagcgggccgggacgaagcacggcaacaagggcugggaggccgcgcuguccgccaucgagauggccaaccucuucaagagccugcgcggcgggggcgggagcggcgggggcggcuccgggggcgggaaccugugccccuucggcgagguguucaacgccacccgguucgccagcgucuacgccuggaaccgcaagcggaucuccaacugcguggcggacuacagcgugcuguacaacuccgccagcuucuccacguucaagugcuacggcgucagccccaccaagcucaacgaccugugcuucaccaacguguacgccgacuccuucgugauccgcggggacgagguccggcagaucgcccccggccagaccgggaagaucgccgacuacaacuacaagcugccggacgacuucacgggcugcgugaucgcguggaacagcaacaaccucgacuccaaggucgggggcaacuacaacuaccuguaccgccuguuccgcaagagcaaccucaagcccuucgagcgggacaucuccaccgagaucuaccaggccggcagcacccccugcaacgggguggagggcuucaacugcuacuucccccugcaguccuacggguuccagccgaccaacggcgugggguaccagcccuaccggguggucgugcugagcuucgagcuccugcacgcccccgccacggugugcggccccaagugaggacuaguuauaagacugacuagcccgaugggccucccaacgggcccuccuccccuccuugcaccgagauuaauagaucucaaaggcucuuuucagagccaccaaaaaaaaaaaaaaaaaaaaaaaaaaaaaaaaaaaaaaaaaaaaaaaaaaaaaaaaaaaaaaaaaaaaaaaaaaaaaaaaaaaaaaaaaaaaaaaaaaaaa

SEQ ID NO: 24289 - RNA, 4041 nt, Artificial Sequence
  SARS-CoV-2/Wuhan/WIV05/2019__EPI_ISL_402128 spike protein mRNA gc (1-1273)
aggagaaagcuuaccauguucguguuccugguccuccugccccuggugagcucccagugcgugaaccucaccacccgcacgcagcugccgcccgccuacaccaacagcuucacccggggcgucuacuaccccgacaagguguuccgcuccagcgugcugcacuccacccaggaccucuuccugcccuucuucagcaacgucacgugguuccacgccauccacguguccgggaccaacggcaccaagcgguucgacaacccggugcugcccuucaacgacggggucuacuucgcgagcaccgagaaguccaacaucauccgcggcuggaucuucgggacgacccucgacagcaagacccagucccugcugaucgugaacaacgccaccaacguggucaucaaggugugcgaguuccaguucugcaacgaccccuuccucggcguguacuaccacaagaacaacaagagcuggauggaguccgaguuccgggucuacagcuccgccaacaacugcacguucgaguacgugagccagcccuuccugauggaccuggagggcaagcaggggaacuucaagaaccuccgcgaguucguguucaagaacaucgacggcuacuucaagaucuacuccaagcacaccccgaucaaccugguccgggaccugccccagggguucagcgcccucgagccccugguggaccugcccaucggcaucaacaucacccgcuuccagacccuccuggcccugcaccgguccuaccucacgccgggggacagcagcuccggcuggaccgcgggcgccgccgccuacuacgugggguaccugcagccccgcaccuuccugcucaaguacaacgagaacggcaccaucacggacgcggucgacugcgcccuggacccccugagcgagaccaagugcacccucaaguccuucaccguggagaaggggaucuaccagacgagcaacuuccgggugcagcccaccgaguccaucguccgcuucccgaacaucaccaaccugugccccuucggcgagguguucaacgccacccgguucgccagcgucuacgccuggaaccgcaagcggaucuccaacugcguggcggacuacagcgugcuguacaacuccgccagcuucuccacguucaagugcuacggcgucagccccaccaagcucaacgaccugugcuucaccaacguguacgccgacuccuucgugauccgcggggacgagguccggcagaucgcccccggccagaccgggaagaucgccgacuacaacuacaagcugccggacgacuucacgggcugcgugaucgcguggaacagcaacaaccucgacuccaaggucgggggcaacuacaacuaccuguaccgccuguuccgcaagagcaaccucaagcccuucgagcgggacaucuccaccgagaucuaccaggccggcagcacccccugcaacgggguggagggcuucaacugcuacuucccccugcaguccuacggguuccagccgaccaacggcgugggguaccagcccuaccggguggucgugcugagcuucgagcuccugcacgcccccgccacggugugcggccccaagaaguccaccaaccuggucaagaacaagugcgugaacuucaacuucaacggccucaccgggaccggcgugcugaccgagagcaacaagaaguuccugccguuccagcaguucgggcgcgacaucgccgacacgaccgacgcgguccgcgacccccagacccuggagauccucgacaucacccccugcagcuucggcgggguguccgugaucacgccgggcaccaacaccagcaaccaggucgccgugcuguaccaggacgugaacugcaccgagguccccguggccauccacgccgaccagcugacgcccaccuggcggguguacuccaccggcagcaacgucuuccagacccgcgccgggugccucaucggcgcggagcacgugaacaacuccuacgagugcgacauccccaucggggccggcaucugcgccagcuaccagacgcagaccaacuccccgcggcgcgcccggagcguggcgucccagagcaucaucgccuacaccaugucccugggcgccgagaacagcgucgccuacuccaacaacagcaucgccauccccaccaacuucacgaucuccgugaccaccgagauccugcccgugagcaugaccaagacgagcgucgacugcaccauguacaucugcggggacuccaccgagugcagcaaccuccugcugcaguacggcuccuucugcacccagcucaaccgcgcgcugacggggaucgccguggagcaggacaagaacacccaggagguguucgcccaggucaagcagaucuacaagacgcccccgaucaaggacuucggcggguucaacuucagccagauccugcccgaccccuccaagcccagcaagcgguccuucaucgaggaccuccuguucaacaaggugacccuggccgacgccggcuucaucaagcaguacggcgacugccucggggacaucgcggcccgcgaccugaucugcgcccagaaguucaacggccugaccgugcucccgccccugcugaccgacgagaugaucgcccaguacaccagcgcccuccuggcggggaccaucacguccggcuggaccuucggggccggcgccgcccugcagauccccuucgcgaugcagauggccuaccgguucaacggcaucggggucacccagaacgugcucuacgagaaccagaagcugaucgccaaccaguucaacagcgccaucggcaagauccaggacucccugagcuccaccgccagcgcgcucgggaagcugcaggacguggucaaccagaacgcccaggcccugaacacgcucgugaagcagcuguccagcaacuucggcgccaucuccagcgugcugaacgacauccucucccgccuggacaaggucgaggccgaggugcagaucgaccggcugaucaccgggcgccuccagagccugcagaccuacgugacccagcagcugauccgggcggccgagauccgcgccagcgccaaccucgccgcgaccaagauguccgagugcguccugggccagagcaagcggguggacuucugcggcaagggguaccaccugauguccuucccccagagcgccccgcacggcguggucuuccuccacgugacguacguccccgcccaggagaagaacuucaccaccgcccccgcgaucugccacgacgggaaggcccacuucccccgcgagggcguguucguguccaacgggacccacugguucgucacgcagcggaacuucuacgagccgcagaucaucaccaccgacaacaccuucgugagcggcaacugcgacguggucaucggcaucgugaacaacacgguguacgacccccugcagcccgagcuggacuccuucaaggaggagcucgacaaguacuucaagaaccacaccagccccgacgucgaccugggggacaucuccggcaucaacgccagcguggugaacauccagaaggagaucgaccgccugaacgaggucgccaagaaccucaacgagucccugaucgaccugcaggagcucgggaaguacgagcaguacaucaaguggccgugguacaucuggcugggcuucaucgccggccugaucgcgaucgugauggugaccaucaugcucugcugcaugaccagcugcugcuccugccugaaggggugcugcagcugcggcuccugcugcaaguucgacgaggacgacagcgagcccguccugaagggggugaagcuccacuacacgugaggacuaguuauaagacugacuagcccgaugggccucccaacgggcccuccuccccuccuugcaccgagauuaauagaucucaaaggcucuuuucagagccaccaaaaaaaaaaaaaaaaaaaaaaaaaaaaaaaaaaaaaaaaaaaaaaaaaaaaaaaaaaaaaaaaaaaaaaaaaaaaaaaaaaaaaaaaaaaaaaaaaaaaa

SEQ ID NO: 24290 - RNA, 4041 nt, Artificial Sequence
  SARS-CoV-2/Wuhan/WIV05/2019__EPI_ISL_402128 spike protein mRNA gc (1-1273)(D614G)
aggagaaagcuuaccauguucguguuccugguccuccugccccuggugagcucccagugcgugaaccucaccacccgcacgcagcugccgcccgccuacaccaacagcuucacccggggcgucuacuaccccgacaagguguuccgcuccagcgugcugcacuccacccaggaccucuuccugcccuucuucagcaacgucacgugguuccacgccauccacguguccgggaccaacggcaccaagcgguucgacaacccggugcugcccuucaacgacggggucuacuucgcgagcaccgagaaguccaacaucauccgcggcuggaucuucgggacgacccucgacagcaagacccagucccugcugaucgugaacaacgccaccaacguggucaucaaggugugcgaguuccaguucugcaacgaccccuuccucggcguguacuaccacaagaacaacaagagcuggauggaguccgaguuccgggucuacagcuccgccaacaacugcacguucgaguacgugagccagcccuuccugauggaccuggagggcaagcaggggaacuucaagaaccuccgcgaguucguguucaagaacaucgacggcuacuucaagaucuacuccaagcacaccccgaucaaccugguccgggaccugccccagggguucagcgcccucgagccccugguggaccugcccaucggcaucaacaucacccgcuuccagacccuccuggcccugcaccgguccuaccucacgccgggggacagcagcuccggcuggaccgcgggcgccgccgccuacuacgugggguaccugcagccccgcaccuuccugcucaaguacaacgagaacggcaccaucacggacgcggucgacugcgcccuggacccccugagcgagaccaagugcacccucaaguccuucaccguggagaaggggaucuaccagacgagcaacuuccgggugcagcccaccgaguccaucguccgcuucccgaacaucaccaaccugugccccuucggcgagguguucaacgccacccgguucgccagcgucuacgccuggaaccgcaagcggaucuccaacugcguggcggacuacagcgugcuguacaacuccgccagcuucuccacguucaagugcuacggcgucagccccaccaagcucaacgaccugugcuucaccaacguguacgccgacuccuucgugauccgcggggacgagguccggcagaucgcccccggccagaccgggaagaucgccgacuacaacuacaagcugccggacgacuucacgggcugcgugaucgcguggaacagcaacaaccucgacuccaaggucgggggcaacuacaacuaccuguaccgccuguuccgcaagagcaaccucaagcccuucgagcgggacaucuccaccgagaucuaccaggccggcagcacccccugcaacgggguggagggcuucaacugcuacuucccccugcaguccuacggguuccagccgaccaacggcgugggguaccagcccuaccggguggucgugcugagcuucgagcuccugcacgcccccgccacggugugcggccccaagaaguccaccaaccuggucaagaacaagugcgugaacuucaacuucaacggccucaccgggaccggcgugcugaccgagagcaacaagaaguuccugccguuccagcaguucgggcgcgacaucgccgacacgaccgacgcgguccgcgacccccagacccuggagauccucgacaucacccccugcagcuucggcgggguguccgugaucacgccgggcaccaacaccagcaaccaggucgccgugcuguaccagggcgugaacugcaccgagguccccguggccauccacgccgaccagcugacgcccaccuggcggguguacuccaccggcagcaacgucuuccagacccgcgccgggugccucaucggcgcggagcacgugaacaacuccuacgagugcgacauccccaucggggccggcaucugcgccagcuaccagacgcagaccaacuccccgcggcgcgcccggagcguggcgucccagagcaucaucgccuacaccaugucccugggcgccgagaacagcgucgccuacuccaacaacagcaucgccauccccaccaacuucacgaucuccgugaccaccgagauccugcccgugagcaugaccaagacgagcgucgacugcaccauguacaucugcggggacuccaccgagugcagcaaccuccugcugcaguacggcuccuucugcacccagcucaaccgcgcgcugacggggaucgccguggagcaggacaagaacacccaggagguguucgcccaggucaagcagaucuacaagacgcccccgaucaaggacuucggcggguucaacuucagccagauccugcccgaccccuccaagcccagcaagcgguccuucaucgaggaccuccuguucaacaaggugacccuggccgacgccggcuucaucaagcaguacggcgacugccucggggacaucgcggcccgcgaccugaucugcgcccagaaguucaacggccugaccgugcucccgccccugcugaccgacgagaugaucgcccaguacaccagcgcccuccuggcggggaccaucacguccggcuggaccuucggggccggcgccgcccugcagauccccuucgcgaugcagauggccuaccgguucaacggcaucggggucacccagaacgugcucuacgagaaccagaagcugaucgccaaccaguucaacagcgccaucggcaagauccaggacucccugagcuccaccgccagcgcgcucgggaagcugcaggacguggucaaccagaacgcccaggcccugaacacgcucgugaagcagcuguccagcaacuucggcgccaucuccagcgugcugaacgacauccucucccgccuggacaaggucgaggccgaggugcagaucgaccggcugaucaccgggcgccuccagagccugcagaccuacgugacccagcagcugauccgggcggccgagauccgcgccagcgccaaccucgccgcgaccaagauguccgagugcguccugggccagagcaagcggguggacuucugcggcaagggguaccaccugauguccuucccccagagcgccccgcacggcguggucuuccuccacgugacguacguccccgcccaggagaagaacuucaccaccgcccccgcgaucugccacgacgggaaggcccacuucccccgcgagggcguguucguguccaacgggacccacugguucgucacgcagcggaacuucuacgagccgcagaucaucaccaccgacaacaccuucgugagcggcaacugcgacguggucaucggcaucgugaacaacacgguguacgacccccugcagcccgagcuggacuccuucaaggaggagcucgacaaguacuucaagaaccacaccagccccgacgucgaccugggggacaucuccggcaucaacgccagcguggugaacauccagaaggagaucgaccgccugaacgaggucgccaagaaccucaacgagucccugaucgaccugcaggagcucgggaaguacgagcaguacaucaaguggccgugguacaucuggcugggcuucaucgccggccugaucgcgaucgugauggugaccaucaugcucugcugcaugaccagcugcugcuccugccugaaggggugcugcagcugcggcuccugcugcaaguucgacgaggacgacagcgagcccguccugaagggggugaagcuccacuacacgugaggacuaguuauaagacugacuagcccgaugggccucccaacgggcccuccuccccuccuugcaccgagauuaauagaucucaaaggcucuuuucagagccaccaaaaaaaaaaaaaaaaaaaaaaaaaaaaaaaaaaaaaaaaaaaaaaaaaaaaaaaaaaaaaaaaaaaaaaaaaaaaaaaaaaaaaaaaaaaaaaaaaaaaa

SEQ ID NO: 24291 - RNA, 4041 nt, Artificial Sequence
  SARS-CoV-2/Wuhan/WIV05/2019__EPI_ISL_402128 spike protein mRNA gc (1-1273)(A222V_D614G)
aggagaaagcuuaccauguucguguuccugguccuccugccccuggugagcucccagugcgugaaccucaccacccgcacgcagcugccgcccgccuacaccaacagcuucacccggggcgucuacuaccccgacaagguguuccgcuccagcgugcugcacuccacccaggaccucuuccugcccuucuucagcaacgucacgugguuccacgccauccacguguccgggaccaacggcaccaagcgguucgacaacccggugcugcccuucaacgacggggucuacuucgcgagcaccgagaaguccaacaucauccgcggcuggaucuucgggacgacccucgacagcaagacccagucccugcugaucgugaacaacgccaccaacguggucaucaaggugugcgaguuccaguucugcaacgaccccuuccucggcguguacuaccacaagaacaacaagagcuggauggaguccgaguuccgggucuacagcuccgccaacaacugcacguucgaguacgugagccagcccuuccugauggaccuggagggcaagcaggggaacuucaagaaccuccgcgaguucguguucaagaacaucgacggcuacuucaagaucuacuccaagcacaccccgaucaaccugguccgggaccugccccagggguucagcguccucgagccccugguggaccugcccaucggcaucaacaucacccgcuuccagacccuccuggcccugcaccgguccuaccucacgccgggggacagcagcuccggcuggaccgcgggcgccgccgccuacuacgugggguaccugcagccccgcaccuuccugcucaaguacaacgagaacggcaccaucacggacgcggucgacugcgcccuggacccccugagcgagaccaagugcacccucaaguccuucaccguggagaaggggaucuaccagacgagcaacuuccgggugcagcccaccgaguccaucguccgcuucccgaacaucaccaaccugugccccuucggcgagguguucaacgccacccgguucgccagcgucuacgccuggaaccgcaagcggaucuccaacugcguggcggacuacagcgugcuguacaacuccgccagcuucuccacguucaagugcuacggcgucagccccaccaagcucaacgaccugugcuucaccaacguguacgccgacuccuucgugauccgcggggacgagguccggcagaucgcccccggccagaccgggaagaucgccgacuacaacuacaagcugccggacgacuucacgggcugcgugaucgcguggaacagcaacaaccucgacuccaaggucgggggcaacuacaacuaccuguaccgccuguuccgcaagagcaaccucaagcccuucgagcgggacaucuccaccgagaucuaccaggccggcagcacccccugcaacgggguggagggcuucaacugcuacuucccccugcaguccuacggguuccagccgaccaacggcgugggguaccagcccuaccggguggucgugcugagcuucgagcuccugcacgcccccgccacggugugcggccccaagaaguccaccaaccuggucaagaacaagugcgugaacuucaacuucaacggccucaccgggaccggcgugcugaccgagagcaacaagaaguuccugccguuccagcaguucgggcgcgacaucgccgacacgaccgacgcgguccgcgacccccagacccuggagauccucgacaucacccccugcagcuucggcgggguguccgugaucacgccgggcaccaacaccagcaaccaggucgccgugcuguaccagggcgugaacugcaccgagguccccguggccauccacgccgaccagcugacgcccaccuggcggguguacuccaccggcagcaacgucuuccagacccgcgccgggugccucaucggcgcggagcacgugaacaacuccuacgagugcgacauccccaucggggccggcaucugcgccagcuaccagacgcagaccaacuccccgcggcgcgcccggagcguggcgucccagagcaucaucgccuacaccaugucccugggcgccgagaacagcgucgccuacuccaacaacagcaucgccauccccaccaacuucacgaucuccgugaccaccgagauccugcccgugagcaugaccaagacgagcgucgacugcaccauguacaucugcggggacuccaccgagugcagcaaccuccugcugcaguacggcuccuucugcacccagcucaaccgcgcgcugacggggaucgccguggagcaggacaagaacacccaggagguguucgcccaggucaagcagaucuacaagacgcccccgaucaaggacuucggcggguucaacuucagccagauccugcccgaccccuccaagcccagcaagcgguccuucaucgaggaccuccuguucaacaaggugacccuggccgacgccggcuucaucaagcaguacggcgacugccucggggacaucgcggcccgcgaccugaucugcgcccagaaguucaacggccugaccgugcucccgccccugcugaccgacgagaugaucgcccaguacaccagcgcccuccuggcggggaccaucacguccggcuggaccuucggggccggcgccgcccugcagauccccuucgcgaugcagauggccuaccgguucaacggcaucggggucacccagaacgugcucuacgagaaccagaagcugaucgccaaccaguucaacagcgccaucggcaagauccaggacucccugagcuccaccgccagcgcgcucgggaagcugcaggacguggucaaccagaacgcccaggcccugaacacgcucgugaagcagcuguccagcaacuucggcgccaucuccagcgugcugaacgacauccucucccgccuggacaaggucgaggccgaggugcagaucgaccggcugaucaccgggcgccuccagagccugcagaccuacgugacccagcagcugauccgggcggccgagauccgcgccagcgccaaccucgccgcgaccaagauguccgagugcguccugggccagagcaagcggguggacuucugcggcaagggguaccaccugauguccuucccccagagcgccccgcacggcguggucuuccuccacgugacguacguccccgcccaggagaagaacuucaccaccgcccccgcgaucugccacgacgggaaggcccacuucccccgcgagggcguguucguguccaacgggacccacugguucgucacgcagcggaacuucuacgagccgcagaucaucaccaccgacaacaccuucgugagcggcaacugcgacguggucaucggcaucgugaacaacacgguguacgacccccugcagcccgagcuggacuccuucaaggaggagcucgacaaguacuucaagaaccacaccagccccgacgucgaccugggggacaucuccggcaucaacgccagcguggugaacauccagaaggagaucgaccgccugaacgaggucgccaagaaccucaacgagucccugaucgaccugcaggagcucgggaaguacgagcaguacaucaaguggccgugguacaucuggcugggcuucaucgccggccugaucgcgaucgugauggugaccaucaugcucugcugcaugaccagcugcugcuccugccugaaggggugcugcagcugcggcuccugcugcaaguucgacgaggacgacagcgagcccguccugaagggggugaagcuccacuacacgugaggacuaguuauaagacugacuagcccgaugggccucccaacgggcccuccuccccuccuugcaccgagauuaauagaucucaaaggcucuuuucagagccaccaaaaaaaaaaaaaaaaaaaaaaaaaaaaaaaaaaaaaaaaaaaaaaaaaaaaaaaaaaaaaaaaaaaaaaaaaaaaaaaaaaaaaaaaaaaaaaaaaaaaa

SEQ ID NO: 24292 - RNA, 4041 nt, Artificial Sequence
  SARS-CoV-2/Wuhan/WIV05/2019__EPI_ISL_402128 spike protein mRNA gc (1-1273)(N439K_D614G)
aggagaaagcuuaccauguucguguuccugguccuccugccccuggugagcucccagugcgugaaccucaccacccgcacgcagcugccgcccgccuacaccaacagcuucacccggggcgucuacuaccccgacaagguguuccgcuccagcgugcugcacuccacccaggaccucuuccugcccuucuucagcaacgucacgugguuccacgccauccacguguccgggaccaacggcaccaagcgguucgacaacccggugcugcccuucaacgacggggucuacuucgcgagcaccgagaaguccaacaucauccgcggcuggaucuucgggacgacccucgacagcaagacccagucccugcugaucgugaacaacgccaccaacguggucaucaaggugugcgaguuccaguucugcaacgaccccuuccucggcguguacuaccacaagaacaacaagagcuggauggaguccgaguuccgggucuacagcuccgccaacaacugcacguucgaguacgugagccagcccuuccugauggaccuggagggcaagcaggggaacuucaagaaccuccgcgaguucguguucaagaacaucgacggcuacuucaagaucuacuccaagcacaccccgaucaaccugguccgggaccugccccagggguucagcgcccucgagccccugguggaccugcccaucggcaucaacaucacccgcuuccagacccuccuggcccugcaccgguccuaccucacgccgggggacagcagcuccggcuggaccgcgggcgccgccgccuacuacgugggguaccugcagccccgcaccuuccugcucaaguacaacgagaacggcaccaucacggacgcggucgacugcgcccuggacccccugagcgagaccaagugcacccucaaguccuucaccguggagaaggggaucuaccagacgagcaacuuccgggugcagcccaccgaguccaucguccgcuucccgaacaucaccaaccugugccccuucggcgagguguucaacgccacccgguucgccagcgucuacgccuggaaccgcaagcggaucuccaacugcguggcggacuacagcgugcuguacaacuccgccagcuucuccacguucaagugcuacggcgucagccccaccaagcucaacgaccugugcuucaccaacguguacgccgacuccuucgugauccgcggggacgagguccggcagaucgcccccggccagaccgggaagaucgccgacuacaacuacaagcugccggacgacuucacgggcugcgugaucgcguggaacagcaagaaccucgacuccaaggucgggggcaacuacaacuaccuguaccgccuguuccgcaagagcaaccucaagcccuucgagcgggacaucuccaccgagaucuaccaggccggcagcacccccugcaacgggguggagggcuucaacugcuacuucccccugcaguccuacggguuccagccgaccaacggcgugggguaccagcccuaccggguggucgugcugagcuucgagcuccugcacgcccccgccacggugugcggccccaagaaguccaccaaccuggucaagaacaagugcgugaacuucaacuucaacggccucaccgggaccggcgugcugaccgagagcaacaagaaguuccugccguuccagcaguucgggcgcgacaucgccgacacgaccgacgcgguccgcgacccccagacccuggagauccucgacaucacccccugcagcuucggcgggguguccgugaucacgccgggcaccaacaccagcaaccaggucgccgugcuguaccagggcgugaacugcaccgagguccccguggccauccacgccgaccagcugacgcccaccuggcggguguacuccaccggcagcaacgucuuccagacccgcgccgggugccucaucggcgcggagcacgugaacaacuccuacgagugcgacauccccaucggggccggcaucugcgccagcuaccagacgcagaccaacuccccgcggcgcgcccggagcguggcgucccagagcaucaucgccuacaccaugucccugggcgccgagaacagcgucgccuacuccaacaacagcaucgccauccccaccaacuucacgaucuccgugaccaccgagauccugcccgugagcaugaccaagacgagcgucgacugcaccauguacaucugcggggacuccaccgagugcagcaaccuccugcugcaguacggcuccuucugcacccagcucaaccgcgcgcugacggggaucgccguggagcaggacaagaacacccaggagguguucgcccaggucaagcagaucuacaagacgcccccgaucaaggacuucggcggguucaacuucagccagauccugcccgaccccuccaagcccagcaagcgguccuucaucgaggaccuccuguucaacaaggugacccuggccgacgccggcuucaucaagcaguacggcgacugccucggggacaucgcggcccgcgaccugaucugcgcccagaaguucaacggccugaccgugcucccgccccugcugaccgacgagaugaucgcccaguacaccagcgcccuccuggcggggaccaucacguccggcuggaccuucggggccggcgccgcccugcagauccccuucgcgaugcagauggccuaccgguucaacggcaucggggucacccagaacgugcucuacgagaaccagaagcugaucgccaaccaguucaacagcgccaucggcaagauccaggacucccugagcuccaccgccagcgcgcucgggaagcugcaggacguggucaaccagaacgcccaggcccugaacacgcucgugaagcagcuguccagcaacuucggcgccaucuccagcgugcugaacgacauccucucccgccuggacaaggucgaggccgaggugcagaucgaccggcugaucaccgggcgccuccagagccugcagaccuacgugacccagcagcugauccgggcggccgagauccgcgccagcgccaaccucgccgcgaccaagauguccgagugcguccugggccagagcaagcggguggacuucugcggcaagggguaccaccugauguccuucccccagagcgccccgcacggcguggucuuccuccacgugacguacguccccgcccaggagaagaacuucaccaccgcccccgcgaucugccacgacgggaaggcccacuucccccgcgagggcguguucguguccaacgggacccacugguucgucacgcagcggaacuucuacgagccgcagaucaucaccaccgacaacaccuucgugagcggcaacugcgacguggucaucggcaucgugaacaacacgguguacgacccccugcagcccgagcuggacuccuucaaggaggagcucgacaaguacuucaagaaccacaccagccccgacgucgaccugggggacaucuccggcaucaacgccagcguggugaacauccagaaggagaucgaccgccugaacgaggucgccaagaaccucaacgagucccugaucgaccugcaggagcucgggaaguacgagcaguacaucaaguggccgugguacaucuggcugggcuucaucgccggccugaucgcgaucgugauggugaccaucaugcucugcugcaugaccagcugcugcuccugccugaaggggugcugcagcugcggcuccugcugcaaguucgacgaggacgacagcgagcccguccugaagggggugaagcuccacuacacgugaggacuaguuauaagacugacuagcccgaugggccucccaacgggcccuccuccccuccuugcaccgagauuaauagaucucaaaggcucuuuucagagccaccaaaaaaaaaaaaaaaaaaaaaaaaaaaaaaaaaaaaaaaaaaaaaaaaaaaaaaaaaaaaaaaaaaaaaaaaaaaaaaaaaaaaaaaaaaaaaaaaaaaaa

SEQ ID NO: 24293 - RNA, 4041 nt, Artificial Sequence
  SARS-CoV-2/Wuhan/WIV05/2019__EPI_ISL_402128 spike protein mRNA gc (1-1273)(S477N_D614G)
aggagaaagcuuaccauguucguguuccugguccuccugccccuggugagcucccagugcgugaaccucaccacccgcacgcagcugccgcccgccuacaccaacagcuucacccggggcgucuacuaccccgacaagguguuccgcuccagcgugcugcacuccacccaggaccucuuccugcccuucuucagcaacgucacgugguuccacgccauccacguguccgggaccaacggcaccaagcgguucgacaacccggugcugcccuucaacgacggggucuacuucgcgagcaccgagaaguccaacaucauccgcggcuggaucuucgggacgacccucgacagcaagacccagucccugcugaucgugaacaacgccaccaacguggucaucaaggugugcgaguuccaguucugcaacgaccccuuccucggcguguacuaccacaagaacaacaagagcuggauggaguccgaguuccgggucuacagcuccgccaacaacugcacguucgaguacgugagccagcccuuccugauggaccuggagggcaagcaggggaacuucaagaaccuccgcgaguucguguucaagaacaucgacggcuacuucaagaucuacuccaagcacaccccgaucaaccugguccgggaccugccccagggguucagcgcccucgagccccugguggaccugcccaucggcaucaacaucacccgcuuccagacccuccuggcccugcaccgguccuaccucacgccgggggacagcagcuccggcuggaccgcgggcgccgccgccuacuacgugggguaccugcagccccgcaccuuccugcucaaguacaacgagaacggcaccaucacggacgcggucgacugcgcccuggacccccugagcgagaccaagugcacccucaaguccuucaccguggagaaggggaucuaccagacgagcaacuuccgggugcagcccaccgaguccaucguccgcuucccgaacaucaccaaccugugccccuucggcgagguguucaacgccacccgguucgccagcgucuacgccuggaaccgcaagcggaucuccaacugcguggcggacuacagcgugcuguacaacuccgccagcuucuccacguucaagugcuacggcgucagccccaccaagcucaacgaccugugcuucaccaacguguacgccgacuccuucgugauccgcggggacgagguccggcagaucgcccccggccagaccgggaagaucgccgacuacaacuacaagcugccggacgacuucacgggcugcgugaucgcguggaacagcaacaaccucgacuccaaggucgggggcaacuacaacuaccuguaccgccuguuccgcaagagcaaccucaagcccuucgagcgggacaucuccaccgagaucuaccaggccggcaacacccccugcaacgggguggagggcuucaacugcuacuucccccugcaguccuacggguuccagccgaccaacggcgugggguaccagcccuaccggguggucgugcugagcuucgagcuccugcacgcccccgccacggugugcggccccaagaaguccaccaaccuggucaagaacaagugcgugaacuucaacuucaacggccucaccgggaccggcgugcugaccgagagcaacaagaaguuccugccguuccagcaguucgggcgcgacaucgccgacacgaccgacgcgguccgcgacccccagacccuggagauccucgacaucacccccugcagcuucggcgggguguccgugaucacgccgggcaccaacaccagcaaccaggucgccgugcuguaccagggcgugaacugcaccgagguccccguggccauccacgccgaccagcugacgcccaccuggcggguguacuccaccggcagcaacgucuuccagacccgcgccgggugccucaucggcgcggagcacgugaacaacuccuacgagugcgacauccccaucggggccggcaucugcgccagcuaccagacgcagaccaacuccccgcggcgcgcccggagcguggcgucccagagcaucaucgccuacaccaugucccugggcgccgagaacagcgucgccuacuccaacaacagcaucgccauccccaccaacuucacgaucuccgugaccaccgagauccugcccgugagcaugaccaagacgagcgucgacugcaccauguacaucugcggggacuccaccgagugcagcaaccuccugcugcaguacggcuccuucugcacccagcucaaccgcgcgcugacggggaucgccguggagcaggacaagaacacccaggagguguucgcccaggucaagcagaucuacaagacgcccccgaucaaggacuucggcggguucaacuucagccagauccugcccgaccccuccaagcccagcaagcgguccuucaucgaggaccuccuguucaacaaggugacccuggccgacgccggcuucaucaagcaguacggcgacugccucggggacaucgcggcccgcgaccugaucugcgcccagaaguucaacggccugaccgugcucccgccccugcugaccgacgagaugaucgcccaguacaccagcgcccuccuggcggggaccaucacguccggcuggaccuucggggccggcgccgcccugcagauccccuucgcgaugcagauggccuaccgguucaacggcaucggggucacccagaacgugcucuacgagaaccagaagcugaucgccaaccaguucaacagcgccaucggcaagauccaggacucccugagcuccaccgccagcgcgcucgggaagcugcaggacguggucaaccagaacgcccaggcccugaacacgcucgugaagcagcuguccagcaacuucggcgccaucuccagcgugcugaacgacauccucucccgccuggacaaggucgaggccgaggugcagaucgaccggcugaucaccgggcgccuccagagccugcagaccuacgugacccagcagcugauccgggcggccgagauccgcgccagcgccaaccucgccgcgaccaagauguccgagugcguccugggccagagcaagcggguggacuucugcggcaagggguaccaccugauguccuucccccagagcgccccgcacggcguggucuuccuccacgugacguacguccccgcccaggagaagaacuucaccaccgcccccgcgaucugccacgacgggaaggcccacuucccccgcgagggcguguucguguccaacgggacccacugguucgucacgcagcggaacuucuacgagccgcagaucaucaccaccgacaacaccuucgugagcggcaacugcgacguggucaucggcaucgugaacaacacgguguacgacccccugcagcccgagcuggacuccuucaaggaggagcucgacaaguacuucaagaaccacaccagccccgacgucgaccugggggacaucuccggcaucaacgccagcguggugaacauccagaaggagaucgaccgccugaacgaggucgccaagaaccucaacgagucccugaucgaccugcaggagcucgggaaguacgagcaguacaucaaguggccgugguacaucuggcugggcuucaucgccggccugaucgcgaucgugauggugaccaucaugcucugcugcaugaccagcugcugcuccugccugaaggggugcugcagcugcggcuccugcugcaaguucgacgaggacgacagcgagcccguccugaagggggugaagcuccacuacacgugaggacuaguuauaagacugacuagcccgaugggccucccaacgggcccuccuccccuccuugcaccgagauuaauagaucucaaaggcucuuuucagagccaccaaaaaaaaaaaaaaaaaaaaaaaaaaaaaaaaaaaaaaaaaaaaaaaaaaaaaaaaaaaaaaaaaaaaaaaaaaaaaaaaaaaaaaaaaaaaaaaaaaaaa

SEQ ID NO: 24294 - RNA, 4041 nt, Artificial Sequence
  SARS-CoV-2/Wuhan/WIV05/2019__EPI_ISL_402128 spike protein mRNA gc (1-1273)(N501Y_D614G)
aggagaaagcuuaccauguucguguuccugguccuccugccccuggugagcucccagugcgugaaccucaccacccgcacgcagcugccgcccgccuacaccaacagcuucacccggggcgucuacuaccccgacaagguguuccgcuccagcgugcugcacuccacccaggaccucuuccugcccuucuucagcaacgucacgugguuccacgccauccacguguccgggaccaacggcaccaagcgguucgacaacccggugcugcccuucaacgacggggucuacuucgcgagcaccgagaaguccaacaucauccgcggcuggaucuucgggacgacccucgacagcaagacccagucccugcugaucgugaacaacgccaccaacguggucaucaaggugugcgaguuccaguucugcaacgaccccuuccucggcguguacuaccacaagaacaacaagagcuggauggaguccgaguuccgggucuacagcuccgccaacaacugcacguucgaguacgugagccagcccuuccugauggaccuggagggcaagcaggggaacuucaagaaccuccgcgaguucguguucaagaacaucgacggcuacuucaagaucuacuccaagcacaccccgaucaaccugguccgggaccugccccagggguucagcgcccucgagccccugguggaccugcccaucggcaucaacaucacccgcuuccagacccuccuggcccugcaccgguccuaccucacgccgggggacagcagcuccggcuggaccgcgggcgccgccgccuacuacgugggguaccugcagccccgcaccuuccugcucaaguacaacgagaacggcaccaucacggacgcggucgacugcgcccuggacccccugagcgagaccaagugcacccucaaguccuucaccguggagaaggggaucuaccagacgagcaacuuccgggugcagcccaccgaguccaucguccgcuucccgaacaucaccaaccugugccccuucggcgagguguucaacgccacccgguucgccagcgucuacgccuggaaccgcaagcggaucuccaacugcguggcggacuacagcgugcuguacaacuccgccagcuucuccacguucaagugcuacggcgucagccccaccaagcucaacgaccugugcuucaccaacguguacgccgacuccuucgugauccgcggggacgagguccggcagaucgcccccggccagaccgggaagaucgccgacuacaacuacaagcugccggacgacuucacgggcugcgugaucgcguggaacagcaacaaccucgacuccaaggucgggggcaacuacaacuaccuguaccgccuguuccgcaagagcaaccucaagcccuucgagcgggacaucuccaccgagaucuaccaggccggcagcacccccugcaacgggguggagggcuucaacugcuacuucccccugcaguccuacggguuccagccgaccuacggcgugggguaccagcccuaccggguggucgugcugagcuucgagcuccugcacgcccccgccacggugugcggccccaagaaguccaccaaccuggucaagaacaagugcgugaacuucaacuucaacggccucaccgggaccggcgugcugaccgagagcaacaagaaguuccugccguuccagcaguucgggcgcgacaucgccgacacgaccgacgcgguccgcgacccccagacccuggagauccucgacaucacccccugcagcuucggcgggguguccgugaucacgccgggcaccaacaccagcaaccaggucgccgugcuguaccagggcgugaacugcaccgagguccccguggccauccacgccgaccagcugacgcccaccuggcggguguacuccaccggcagcaacgucuuccagacccgcgccgggugccucaucggcgcggagcacgugaacaacuccuacgagugcgacauccccaucggggccggcaucugcgccagcuaccagacgcagaccaacuccccgcggcgcgcccggagcguggcgucccagagcaucaucgccuacaccaugucccugggcgccgagaacagcgucgccuacuccaacaacagcaucgccauccccaccaacuucacgaucuccgugaccaccgagauccugcccgugagcaugaccaagacgagcgucgacugcaccauguacaucugcggggacuccaccgagugcagcaaccuccugcugcaguacggcuccuucugcacccagcucaaccgcgcgcugacggggaucgccguggagcaggacaagaacacccaggagguguucgcccaggucaagcagaucuacaagacgcccccgaucaaggacuucggcggguucaacuucagccagauccugcccgaccccuccaagcccagcaagcgguccuucaucgaggaccuccuguucaacaaggugacccuggccgacgccggcuucaucaagcaguacggcgacugccucggggacaucgcggcccgcgaccugaucugcgcccagaaguucaacggccugaccgugcucccgccccugcugaccgacgagaugaucgcccaguacaccagcgcccuccuggcggggaccaucacguccggcuggaccuucggggccggcgccgcccugcagauccccuucgcgaugcagauggccuaccgguucaacggcaucggggucacccagaacgugcucuacgagaaccagaagcugaucgccaaccaguucaacagcgccaucggcaagauccaggacucccugagcuccaccgccagcgcgcucgggaagcugcaggacguggucaaccagaacgcccaggcccugaacacgcucgugaagcagcuguccagcaacuucggcgccaucuccagcgugcugaacgacauccucucccgccuggacaaggucgaggccgaggugcagaucgaccggcugaucaccgggcgccuccagagccugcagaccuacgugacccagcagcugauccgggcggccgagauccgcgccagcgccaaccucgccgcgaccaagauguccgagugcguccugggccagagcaagcggguggacuucugcggcaagggguaccaccugauguccuucccccagagcgccccgcacggcguggucuuccuccacgugacguacguccccgcccaggagaagaacuucaccaccgcccccgcgaucugccacgacgggaaggcccacuucccccgcgagggcguguucguguccaacgggacccacugguucgucacgcagcggaacuucuacgagccgcagaucaucaccaccgacaacaccuucgugagcggcaacugcgacguggucaucggcaucgugaacaacacgguguacgacccccugcagcccgagcuggacuccuucaaggaggagcucgacaaguacuucaagaaccacaccagccccgacgucgaccugggggacaucuccggcaucaacgccagcguggugaacauccagaaggagaucgaccgccugaacgaggucgccaagaaccucaacgagucccugaucgaccugcaggagcucgggaaguacgagcaguacaucaaguggccgugguacaucuggcugggcuucaucgccggccugaucgcgaucgugauggugaccaucaugcucugcugcaugaccagcugcugcuccugccugaaggggugcugcagcugcggcuccugcugcaaguucgacgaggacgacagcgagcccguccugaagggggugaagcuccacuacacgugaggacuaguuauaagacugacuagcccgaugggccucccaacgggcccuccuccccuccuugcaccgagauuaauagaucucaaaggcucuuuucagagccaccaaaaaaaaaaaaaaaaaaaaaaaaaaaaaaaaaaaaaaaaaaaaaaaaaaaaaaaaaaaaaaaaaaaaaaaaaaaaaaaaaaaaaaaaaaaaaaaaaaaaa

SEQ ID NO: 24295 - RNA, 4035 nt, Artificial Sequence
  SARS-CoV-2/Wuhan/WIV05/2019__EPI_ISL_402128 spike protein mRNA gc (1-1273)(H69del_V70del_D614G)
aggagaaagcuuaccauguucguguuccugguccuccugccccuggugagcucccagugcgugaaccucaccacccgcacgcagcugccgcccgccuacaccaacagcuucacccggggcgucuacuaccccgacaagguguuccgcuccagcgugcugcacuccacccaggaccucuuccugcccuucuucagcaacgucacgugguuccacgccaucuccgggaccaacggcaccaagcgguucgacaacccggugcugcccuucaacgacggggucuacuucgcgagcaccgagaaguccaacaucauccgcggcuggaucuucgggacgacccucgacagcaagacccagucccugcugaucgugaacaacgccaccaacguggucaucaaggugugcgaguuccaguucugcaacgaccccuuccucggcguguacuaccacaagaacaacaagagcuggauggaguccgaguuccgggucuacagcuccgccaacaacugcacguucgaguacgugagccagcccuuccugauggaccuggagggcaagcaggggaacuucaagaaccuccgcgaguucguguucaagaacaucgacggcuacuucaagaucuacuccaagcacaccccgaucaaccugguccgggaccugccccagggguucagcgcccucgagccccugguggaccugcccaucggcaucaacaucacccgcuuccagacccuccuggcccugcaccgguccuaccucacgccgggggacagcagcuccggcuggaccgcgggcgccgccgccuacuacgugggguaccugcagccccgcaccuuccugcucaaguacaacgagaacggcaccaucacggacgcggucgacugcgcccuggacccccugagcgagaccaagugcacccucaaguccuucaccguggagaaggggaucuaccagacgagcaacuuccgggugcagcccaccgaguccaucguccgcuucccgaacaucaccaaccugugccccuucggcgagguguucaacgccacccgguucgccagcgucuacgccuggaaccgcaagcggaucuccaacugcguggcggacuacagcgugcuguacaacuccgccagcuucuccacguucaagugcuacggcgucagccccaccaagcucaacgaccugugcuucaccaacguguacgccgacuccuucgugauccgcggggacgagguccggcagaucgcccccggccagaccgggaagaucgccgacuacaacuacaagcugccggacgacuucacgggcugcgugaucgcguggaacagcaacaaccucgacuccaaggucgggggcaacuacaacuaccuguaccgccuguuccgcaagagcaaccucaagcccuucgagcgggacaucuccaccgagaucuaccaggccggcagcacccccugcaacgggguggagggcuucaacugcuacuucccccugcaguccuacggguuccagccgaccaacggcgugggguaccagcccuaccggguggucgugcugagcuucgagcuccugcacgcccccgccacggugugcggccccaagaaguccaccaaccuggucaagaacaagugcgugaacuucaacuucaacggccucaccgggaccggcgugcugaccgagagcaacaagaaguuccugccguuccagcaguucgggcgcgacaucgccgacacgaccgacgcgguccgcgacccccagacccuggagauccucgacaucacccccugcagcuucggcgggguguccgugaucacgccgggcaccaacaccagcaaccaggucgccgugcuguaccagggcgugaacugcaccgagguccccguggccauccacgccgaccagcugacgcccaccuggcggguguacuccaccggcagcaacgucuuccagacccgcgccgggugccucaucggcgcggagcacgugaacaacuccuacgagugcgacauccccaucggggccggcaucugcgccagcuaccagacgcagaccaacuccccgcggcgcgcccggagcguggcgucccagagcaucaucgccuacaccaugucccugggcgccgagaacagcgucgccuacuccaacaacagcaucgccauccccaccaacuucacgaucuccgugaccaccgagauccugcccgugagcaugaccaagacgagcgucgacugcaccauguacaucugcggggacuccaccgagugcagcaaccuccugcugcaguacggcuccuucugcacccagcucaaccgcgcgcugacggggaucgccguggagcaggacaagaacacccaggagguguucgcccaggucaagcagaucuacaagacgcccccgaucaaggacuucggcggguucaacuucagccagauccugcccgaccccuccaagcccagcaagcgguccuucaucgaggaccuccuguucaacaaggugacccuggccgacgccggcuucaucaagcaguacggcgacugccucggggacaucgcggcccgcgaccugaucugcgcccagaaguucaacggccugaccgugcucccgccccugcugaccgacgagaugaucgcccaguacaccagcgcccuccuggcggggaccaucacguccggcuggaccuucggggccggcgccgcccugcagauccccuucgcgaugcagauggccuaccgguucaacggcaucggggucacccagaacgugcucuacgagaaccagaagcugaucgccaaccaguucaacagcgccaucggcaagauccaggacucccugagcuccaccgccagcgcgcucgggaagcugcaggacguggucaaccagaacgcccaggcccugaacacgcucgugaagcagcuguccagcaacuucggcgccaucuccagcgugcugaacgacauccucucccgccuggacaaggucgaggccgaggugcagaucgaccggcugaucaccgggcgccuccagagccugcagaccuacgugacccagcagcugauccgggcggccgagauccgcgccagcgccaaccucgccgcgaccaagauguccgagugcguccugggccagagcaagcggguggacuucugcggcaagggguaccaccugauguccuucccccagagcgccccgcacggcguggucuuccuccacgugacguacguccccgcccaggagaagaacuucaccaccgcccccgcgaucugccacgacgggaaggcccacuucccccgcgagggcguguucguguccaacgggacccacugguucgucacgcagcggaacuucuacgagccgcagaucaucaccaccgacaacaccuucgugagcggcaacugcgacguggucaucggcaucgugaacaacacgguguacgacccccugcagcccgagcuggacuccuucaaggaggagcucgacaaguacuucaagaaccacaccagccccgacgucgaccugggggacaucuccggcaucaacgccagcguggugaacauccagaaggagaucgaccgccugaacgaggucgccaagaaccucaacgagucccugaucgaccugcaggagcucgggaaguacgagcaguacaucaaguggccgugguacaucuggcugggcuucaucgccggccugaucgcgaucgugauggugaccaucaugcucugcugcaugaccagcugcugcuccugccugaaggggugcugcagcugcggcuccugcugcaaguucgacgaggacgacagcgagcccguccugaagggggugaagcuccacuacacgugaggacuaguuauaagacugacuagcccgaugggccucccaacgggcccuccuccccuccuugcaccgagauuaauagaucucaaaggcucuuuucagagccaccaaaaaaaaaaaaaaaaaaaaaaaaaaaaaaaaaaaaaaaaaaaaaaaaaaaaaaaaaaaaaaaaaaaaaaaaaaaaaaaaaaaaaaaaaaaaaaaaaaaaa

SEQ ID NO: 24296 - RNA, 4041 nt, Artificial Sequence
  SARS-CoV-2/Wuhan/WIV05/2019__EPI_ISL_402128 spike protein mRNA gc (1-1273)(Y453F_D614G)
aggagaaagcuuaccauguucguguuccugguccuccugccccuggugagcucccagugcgugaaccucaccacccgcacgcagcugccgcccgccuacaccaacagcuucacccggggcgucuacuaccccgacaagguguuccgcuccagcgugcugcacuccacccaggaccucuuccugcccuucuucagcaacgucacgugguuccacgccauccacguguccgggaccaacggcaccaagcgguucgacaacccggugcugcccuucaacgacggggucuacuucgcgagcaccgagaaguccaacaucauccgcggcuggaucuucgggacgacccucgacagcaagacccagucccugcugaucgugaacaacgccaccaacguggucaucaaggugugcgaguuccaguucugcaacgaccccuuccucggcguguacuaccacaagaacaacaagagcuggauggaguccgaguuccgggucuacagcuccgccaacaacugcacguucgaguacgugagccagcccuuccugauggaccuggagggcaagcaggggaacuucaagaaccuccgcgaguucguguucaagaacaucgacggcuacuucaagaucuacuccaagcacaccccgaucaaccugguccgggaccugccccagggguucagcgcccucgagccccugguggaccugcccaucggcaucaacaucacccgcuuccagacccuccuggcccugcaccgguccuaccucacgccgggggacagcagcuccggcuggaccgcgggcgccgccgccuacuacgugggguaccugcagccccgcaccuuccugcucaaguacaacgagaacggcaccaucacggacgcggucgacugcgcccuggacccccugagcgagaccaagugcacccucaaguccuucaccguggagaaggggaucuaccagacgagcaacuuccgggugcagcccaccgaguccaucguccgcuucccgaacaucaccaaccugugccccuucggcgagguguucaacgccacccgguucgccagcgucuacgccuggaaccgcaagcggaucuccaacugcguggcggacuacagcgugcuguacaacuccgccagcuucuccacguucaagugcuacggcgucagccccaccaagcucaacgaccugugcuucaccaacguguacgccgacuccuucgugauccgcggggacgagguccggcagaucgcccccggccagaccgggaagaucgccgacuacaacuacaagcugccggacgacuucacgggcugcgugaucgcguggaacagcaacaaccucgacuccaaggucgggggcaacuacaacuaccuguuccgccuguuccgcaagagcaaccucaagcccuucgagcgggacaucuccaccgagaucuaccaggccggcagcacccccugcaacgggguggagggcuucaacugcuacuucccccugcaguccuacggguuccagccgaccaacggcgugggguaccagcccuaccggguggucgugcugagcuucgagcuccugcacgcccccgccacggugugcggccccaagaaguccaccaaccuggucaagaacaagugcgugaacuucaacuucaacggccucaccgggaccggcgugcugaccgagagcaacaagaaguuccugccguuccagcaguucgggcgcgacaucgccgacacgaccgacgcgguccgcgacccccagacccuggagauccucgacaucacccccugcagcuucggcgggguguccgugaucacgccgggcaccaacaccagcaaccaggucgccgugcuguaccagggcgugaacugcaccgagguccccguggccauccacgccgaccagcugacgcccaccuggcggguguacuccaccggcagcaacgucuuccagacccgcgccgggugccucaucggcgcggagcacgugaacaacuccuacgagugcgacauccccaucggggccggcaucugcgccagcuaccagacgcagaccaacuccccgcggcgcgcccggagcguggcgucccagagcaucaucgccuacaccaugucccugggcgccgagaacagcgucgccuacuccaacaacagcaucgccauccccaccaacuucacgaucuccgugaccaccgagauccugcccgugagcaugaccaagacgagcgucgacugcaccauguacaucugcggggacuccaccgagugcagcaaccuccugcugcaguacggcuccuucugcacccagcucaaccgcgcgcugacggggaucgccguggagcaggacaagaacacccaggagguguucgcccaggucaagcagaucuacaagacgcccccgaucaaggacuucggcggguucaacuucagccagauccugcccgaccccuccaagcccagcaagcgguccuucaucgaggaccuccuguucaacaaggugacccuggccgacgccggcuucaucaagcaguacggcgacugccucggggacaucgcggcccgcgaccugaucugcgcccagaaguucaacggccugaccgugcucccgccccugcugaccgacgagaugaucgcccaguacaccagcgcccuccuggcggggaccaucacguccggcuggaccuucggggccggcgccgcccugcagauccccuucgcgaugcagauggccuaccgguucaacggcaucggggucacccagaacgugcucuacgagaaccagaagcugaucgccaaccaguucaacagcgccaucggcaagauccaggacucccugagcuccaccgccagcgcgcucgggaagcugcaggacguggucaaccagaacgcccaggcccugaacacgcucgugaagcagcuguccagcaacuucggcgccaucuccagcgugcugaacgacauccucucccgccuggacaaggucgaggccgaggugcagaucgaccggcugaucaccgggcgccuccagagccugcagaccuacgugacccagcagcugauccgggcggccgagauccgcgccagcgccaaccucgccgcgaccaagauguccgagugcguccugggccagagcaagcggguggacuucugcggcaagggguaccaccugauguccuucccccagagcgccccgcacggcguggucuuccuccacgugacguacguccccgcccaggagaagaacuucaccaccgcccccgcgaucugccacgacgggaaggcccacuucccccgcgagggcguguucguguccaacgggacccacugguucgucacgcagcggaacuucuacgagccgcagaucaucaccaccgacaacaccuucgugagcggcaacugcgacguggucaucggcaucgugaacaacacgguguacgacccccugcagcccgagcuggacuccuucaaggaggagcucgacaaguacuucaagaaccacaccagccccgacgucgaccugggggacaucuccggcaucaacgccagcguggugaacauccagaaggagaucgaccgccugaacgaggucgccaagaaccucaacgagucccugaucgaccugcaggagcucgggaaguacgagcaguacaucaaguggccgugguacaucuggcugggcuucaucgccggccugaucgcgaucgugauggugaccaucaugcucugcugcaugaccagcugcugcuccugccugaaggggugcugcagcugcggcuccugcugcaaguucgacgaggacgacagcgagcccguccugaagggggugaagcuccacuacacgugaggacuaguuauaagacugacuagcccgaugggccucccaacgggcccuccuccccuccuugcaccgagauuaauagaucucaaaggcucuuuucagagccaccaaaaaaaaaaaaaaaaaaaaaaaaaaaaaaaaaaaaaaaaaaaaaaaaaaaaaaaaaaaaaaaaaaaaaaaaaaaaaaaaaaaaaaaaaaaaaaaaaaaaa

SEQ ID NO: 24297 - RNA, 4041 nt, Artificial Sequence
  SARS-CoV-2/Wuhan/WIV05/2019__EPI_ISL_402128 spike protein mRNA gc (1-1273)(D614G_I692V)
aggagaaagcuuaccauguucguguuccugguccuccugccccuggugagcucccagugcgugaaccucaccacccgcacgcagcugccgcccgccuacaccaacagcuucacccggggcgucuacuaccccgacaagguguuccgcuccagcgugcugcacuccacccaggaccucuuccugcccuucuucagcaacgucacgugguuccacgccauccacguguccgggaccaacggcaccaagcgguucgacaacccggugcugcccuucaacgacggggucuacuucgcgagcaccgagaaguccaacaucauccgcggcuggaucuucgggacgacccucgacagcaagacccagucccugcugaucgugaacaacgccaccaacguggucaucaaggugugcgaguuccaguucugcaacgaccccuuccucggcguguacuaccacaagaacaacaagagcuggauggaguccgaguuccgggucuacagcuccgccaacaacugcacguucgaguacgugagccagcccuuccugauggaccuggagggcaagcaggggaacuucaagaaccuccgcgaguucguguucaagaacaucgacggcuacuucaagaucuacuccaagcacaccccgaucaaccugguccgggaccugccccagggguucagcgcccucgagccccugguggaccugcccaucggcaucaacaucacccgcuuccagacccuccuggcccugcaccgguccuaccucacgccgggggacagcagcuccggcuggaccgcgggcgccgccgccuacuacgugggguaccugcagccccgcaccuuccugcucaaguacaacgagaacggcaccaucacggacgcggucgacugcgcccuggacccccugagcgagaccaagugcacccucaaguccuucaccguggagaaggggaucuaccagacgagcaacuuccgggugcagcccaccgaguccaucguccgcuucccgaacaucaccaaccugugccccuucggcgagguguucaacgccacccgguucgccagcgucuacgccuggaaccgcaagcggaucuccaacugcguggcggacuacagcgugcuguacaacuccgccagcuucuccacguucaagugcuacggcgucagccccaccaagcucaacgaccugugcuucaccaacguguacgccgacuccuucgugauccgcggggacgagguccggcagaucgcccccggccagaccgggaagaucgccgacuacaacuacaagcugccggacgacuucacgggcugcgugaucgcguggaacagcaacaaccucgacuccaaggucgggggcaacuacaacuaccuguaccgccuguuccgcaagagcaaccucaagcccuucgagcgggacaucuccaccgagaucuaccaggccggcagcacccccugcaacgggguggagggcuucaacugcuacuucccccugcaguccuacggguuccagccgaccaacggcgugggguaccagcccuaccggguggucgugcugagcuucgagcuccugcacgcccccgccacggugugcggccccaagaaguccaccaaccuggucaagaacaagugcgugaacuucaacuucaacggccucaccgggaccggcgugcugaccgagagcaacaagaaguuccugccguuccagcaguucgggcgcgacaucgccgacacgaccgacgcgguccgcgacccccagacccuggagauccucgacaucacccccugcagcuucggcgggguguccgugaucacgccgggcaccaacaccagcaaccaggucgccgugcuguaccagggcgugaacugcaccgagguccccguggccauccacgccgaccagcugacgcccaccuggcggguguacuccaccggcagcaacgucuuccagacccgcgccgggugccucaucggcgcggagcacgugaacaacuccuacgagugcgacauccccaucggggccggcaucugcgccagcuaccagacgcagaccaacuccccgcggcgcgcccggagcguggcgucccagagcgucaucgccuacaccaugucccugggcgccgagaacagcgucgccuacuccaacaacagcaucgccauccccaccaacuucacgaucuccgugaccaccgagauccugcccgugagcaugaccaagacgagcgucgacugcaccauguacaucugcggggacuccaccgagugcagcaaccuccugcugcaguacggcuccuucugcacccagcucaaccgcgcgcugacggggaucgccguggagcaggacaagaacacccaggagguguucgcccaggucaagcagaucuacaagacgcccccgaucaaggacuucggcggguucaacuucagccagauccugcccgaccccuccaagcccagcaagcgguccuucaucgaggaccuccuguucaacaaggugacccuggccgacgccggcuucaucaagcaguacggcgacugccucggggacaucgcggcccgcgaccugaucugcgcccagaaguucaacggccugaccgugcucccgccccugcugaccgacgagaugaucgcccaguacaccagcgcccuccuggcggggaccaucacguccggcuggaccuucggggccggcgccgcccugcagauccccuucgcgaugcagauggccuaccgguucaacggcaucggggucacccagaacgugcucuacgagaaccagaagcugaucgccaaccaguucaacagcgccaucggcaagauccaggacucccugagcuccaccgccagcgcgcucgggaagcugcaggacguggucaaccagaacgcccaggcccugaacacgcucgugaagcagcuguccagcaacuucggcgccaucuccagcgugcugaacgacauccucucccgccuggacaaggucgaggccgaggugcagaucgaccggcugaucaccgggcgccuccagagccugcagaccuacgugacccagcagcugauccgggcggccgagauccgcgccagcgccaaccucgccgcgaccaagauguccgagugcguccugggccagagcaagcggguggacuucugcggcaagggguaccaccugauguccuucccccagagcgccccgcacggcguggucuuccuccacgugacguacguccccgcccaggagaagaacuucaccaccgcccccgcgaucugccacgacgggaaggcccacuucccccgcgagggcguguucguguccaacgggacccacugguucgucacgcagcggaacuucuacgagccgcagaucaucaccaccgacaacaccuucgugagcggcaacugcgacguggucaucggcaucgugaacaacacgguguacgacccccugcagcccgagcuggacuccuucaaggaggagcucgacaaguacuucaagaaccacaccagccccgacgucgaccugggggacaucuccggcaucaacgccagcguggugaacauccagaaggagaucgaccgccugaacgaggucgccaagaaccucaacgagucccugaucgaccugcaggagcucgggaaguacgagcaguacaucaaguggccgugguacaucuggcugggcuucaucgccggccugaucgcgaucgugauggugaccaucaugcucugcugcaugaccagcugcugcuccugccugaaggggugcugcagcugcggcuccugcugcaaguucgacgaggacgacagcgagcccguccugaagggggugaagcuccacuacacgugaggacuaguuauaagacugacuagcccgaugggccucccaacgggcccuccuccccuccuugcaccgagauuaauagaucucaaaggcucuuuucagagccaccaaaaaaaaaaaaaaaaaaaaaaaaaaaaaaaaaaaaaaaaaaaaaaaaaaaaaaaaaaaaaaaaaaaaaaaaaaaaaaaaaaaaaaaaaaaaaaaaaaaaa

SEQ ID NO: 24298 - RNA, 4041 nt, Artificial Sequence
  SARS-CoV-2/Wuhan/WIV05/2019__EPI_ISL_402128 spike protein mRNA gc (1-1273)(D614G_M1229I)
aggagaaagcuuaccauguucguguuccugguccuccugccccuggugagcucccagugcgugaaccucaccacccgcacgcagcugccgcccgccuacaccaacagcuucacccggggcgucuacuaccccgacaagguguuccgcuccagcgugcugcacuccacccaggaccucuuccugcccuucuucagcaacgucacgugguuccacgccauccacguguccgggaccaacggcaccaagcgguucgacaacccggugcugcccuucaacgacggggucuacuucgcgagcaccgagaaguccaacaucauccgcggcuggaucuucgggacgacccucgacagcaagacccagucccugcugaucgugaacaacgccaccaacguggucaucaaggugugcgaguuccaguucugcaacgaccccuuccucggcguguacuaccacaagaacaacaagagcuggauggaguccgaguuccgggucuacagcuccgccaacaacugcacguucgaguacgugagccagcccuuccugauggaccuggagggcaagcaggggaacuucaagaaccuccgcgaguucguguucaagaacaucgacggcuacuucaagaucuacuccaagcacaccccgaucaaccugguccgggaccugccccagggguucagcgcccucgagccccugguggaccugcccaucggcaucaacaucacccgcuuccagacccuccuggcccugcaccgguccuaccucacgccgggggacagcagcuccggcuggaccgcgggcgccgccgccuacuacgugggguaccugcagccccgcaccuuccugcucaaguacaacgagaacggcaccaucacggacgcggucgacugcgcccuggacccccugagcgagaccaagugcacccucaaguccuucaccguggagaaggggaucuaccagacgagcaacuuccgggugcagcccaccgaguccaucguccgcuucccgaacaucaccaaccugugccccuucggcgagguguucaacgccacccgguucgccagcgucuacgccuggaaccgcaagcggaucuccaacugcguggcggacuacagcgugcuguacaacuccgccagcuucuccacguucaagugcuacggcgucagccccaccaagcucaacgaccugugcuucaccaacguguacgccgacuccuucgugauccgcggggacgagguccggcagaucgcccccggccagaccgggaagaucgccgacuacaacuacaagcugccggacgacuucacgggcugcgugaucgcguggaacagcaacaaccucgacuccaaggucgggggcaacuacaacuaccuguaccgccuguuccgcaagagcaaccucaagcccuucgagcgggacaucuccaccgagaucuaccaggccggcagcacccccugcaacgggguggagggcuucaacugcuacuucccccugcaguccuacggguuccagccgaccaacggcgugggguaccagcccuaccggguggucgugcugagcuucgagcuccugcacgcccccgccacggugugcggccccaagaaguccaccaaccuggucaagaacaagugcgugaacuucaacuucaacggccucaccgggaccggcgugcugaccgagagcaacaagaaguuccugccguuccagcaguucgggcgcgacaucgccgacacgaccgacgcgguccgcgacccccagacccuggagauccucgacaucacccccugcagcuucggcgggguguccgugaucacgccgggcaccaacaccagcaaccaggucgccgugcuguaccagggcgugaacugcaccgagguccccguggccauccacgccgaccagcugacgcccaccuggcggguguacuccaccggcagcaacgucuuccagacccgcgccgggugccucaucggcgcggagcacgugaacaacuccuacgagugcgacauccccaucggggccggcaucugcgccagcuaccagacgcagaccaacuccccgcggcgcgcccggagcguggcgucccagagcaucaucgccuacaccaugucccugggcgccgagaacagcgucgccuacuccaacaacagcaucgccauccccaccaacuucacgaucuccgugaccaccgagauccugcccgugagcaugaccaagacgagcgucgacugcaccauguacaucugcggggacuccaccgagugcagcaaccuccugcugcaguacggcuccuucugcacccagcucaaccgcgcgcugacggggaucgccguggagcaggacaagaacacccaggagguguucgcccaggucaagcagaucuacaagacgcccccgaucaaggacuucggcggguucaacuucagccagauccugcccgaccccuccaagcccagcaagcgguccuucaucgaggaccuccuguucaacaaggugacccuggccgacgccggcuucaucaagcaguacggcgacugccucggggacaucgcggcccgcgaccugaucugcgcccagaaguucaacggccugaccgugcucccgccccugcugaccgacgagaugaucgcccaguacaccagcgcccuccuggcggggaccaucacguccggcuggaccuucggggccggcgccgcccugcagauccccuucgcgaugcagauggccuaccgguucaacggcaucggggucacccagaacgugcucuacgagaaccagaagcugaucgccaaccaguucaacagcgccaucggcaagauccaggacucccugagcuccaccgccagcgcgcucgggaagcugcaggacguggucaaccagaacgcccaggcccugaacacgcucgugaagcagcuguccagcaacuucggcgccaucuccagcgugcugaacgacauccucucccgccuggacaaggucgaggccgaggugcagaucgaccggcugaucaccgggcgccuccagagccugcagaccuacgugacccagcagcugauccgggcggccgagauccgcgccagcgccaaccucgccgcgaccaagauguccgagugcguccugggccagagcaagcggguggacuucugcggcaagggguaccaccugauguccuucccccagagcgccccgcacggcguggucuuccuccacgugacguacguccccgcccaggagaagaacuucaccaccgcccccgcgaucugccacgacgggaaggcccacuucccccgcgagggcguguucguguccaacgggacccacugguucgucacgcagcggaacuucuacgagccgcagaucaucaccaccgacaacaccuucgugagcggcaacugcgacguggucaucggcaucgugaacaacacgguguacgacccccugcagcccgagcuggacuccuucaaggaggagcucgacaaguacuucaagaaccacaccagccccgacgucgaccugggggacaucuccggcaucaacgccagcguggugaacauccagaaggagaucgaccgccugaacgaggucgccaagaaccucaacgagucccugaucgaccugcaggagcucgggaaguacgagcaguacaucaaguggccgugguacaucuggcugggcuucaucgccggccugaucgcgaucgugaucgugaccaucaugcucugcugcaugaccagcugcugcuccugccugaaggggugcugcagcugcggcuccugcugcaaguucgacgaggacgacagcgagcccguccugaagggggugaagcuccacuacacgugaggacuaguuauaagacugacuagcccgaugggccucccaacgggcccuccuccccuccuugcaccgagauuaauagaucucaaaggcucuuuucagagccaccaaaaaaaaaaaaaaaaaaaaaaaaaaaaaaaaaaaaaaaaaaaaaaaaaaaaaaaaaaaaaaaaaaaaaaaaaaaaaaaaaaaaaaaaaaaaaaaaaaaaa

SEQ ID NO: 24299 - RNA, 4035 nt, Artificial Sequence
  SARS-CoV-2/Wuhan/WIV05/2019__EPI_ISL_402128 spike protein mRNA gc (1-1273)(H69del_V70del_A222V_Y453F_S477N_D614G_I692V)
aggagaaagcuuaccauguucguguuccugguccuccugccccuggugagcucccagugcgugaaccucaccacccgcacgcagcugccgcccgccuacaccaacagcuucacccggggcgucuacuaccccgacaagguguuccgcuccagcgugcugcacuccacccaggaccucuuccugcccuucuucagcaacgucacgugguuccacgccaucuccgggaccaacggcaccaagcgguucgacaacccggugcugcccuucaacgacggggucuacuucgcgagcaccgagaaguccaacaucauccgcggcuggaucuucgggacgacccucgacagcaagacccagucccugcugaucgugaacaacgccaccaacguggucaucaaggugugcgaguuccaguucugcaacgaccccuuccucggcguguacuaccacaagaacaacaagagcuggauggaguccgaguuccgggucuacagcuccgccaacaacugcacguucgaguacgugagccagcccuuccugauggaccuggagggcaagcaggggaacuucaagaaccuccgcgaguucguguucaagaacaucgacggcuacuucaagaucuacuccaagcacaccccgaucaaccugguccgggaccugccccagggguucagcguccucgagccccugguggaccugcccaucggcaucaacaucacccgcuuccagacccuccuggcccugcaccgguccuaccucacgccgggggacagcagcuccggcuggaccgcgggcgccgccgccuacuacgugggguaccugcagccccgcaccuuccugcucaaguacaacgagaacggcaccaucacggacgcggucgacugcgcccuggacccccugagcgagaccaagugcacccucaaguccuucaccguggagaaggggaucuaccagacgagcaacuuccgggugcagcccaccgaguccaucguccgcuucccgaacaucaccaaccugugccccuucggcgagguguucaacgccacccgguucgccagcgucuacgccuggaaccgcaagcggaucuccaacugcguggcggacuacagcgugcuguacaacuccgccagcuucuccacguucaagugcuacggcgucagccccaccaagcucaacgaccugugcuucaccaacguguacgccgacuccuucgugauccgcggggacgagguccggcagaucgcccccggccagaccgggaagaucgccgacuacaacuacaagcugccggacgacuucacgggcugcgugaucgcguggaacagcaacaaccucgacuccaaggucgggggcaacuacaacuaccuguuccgccuguuccgcaagagcaaccucaagcccuucgagcgggacaucuccaccgagaucuaccaggccggcaacacccccugcaacgggguggagggcuucaacugcuacuucccccugcaguccuacggguuccagccgaccaacggcgugggguaccagcccuaccggguggucgugcugagcuucgagcuccugcacgcccccgccacggugugcggccccaagaaguccaccaaccuggucaagaacaagugcgugaacuucaacuucaacggccucaccgggaccggcgugcugaccgagagcaacaagaaguuccugccguuccagcaguucgggcgcgacaucgccgacacgaccgacgcgguccgcgacccccagacccuggagauccucgacaucacccccugcagcuucggcgggguguccgugaucacgccgggcaccaacaccagcaaccaggucgccgugcuguaccagggcgugaacugcaccgagguccccguggccauccacgccgaccagcugacgcccaccuggcggguguacuccaccggcagcaacgucuuccagacccgcgccgggugccucaucggcgcggagcacgugaacaacuccuacgagugcgacauccccaucggggccggcaucugcgccagcuaccagacgcagaccaacuccccgcggcgcgcccggagcguggcgucccagagcgucaucgccuacaccaugucccugggcgccgagaacagcgucgccuacuccaacaacagcaucgccauccccaccaacuucacgaucuccgugaccaccgagauccugcccgugagcaugaccaagacgagcgucgacugcaccauguacaucugcggggacuccaccgagugcagcaaccuccugcugcaguacggcuccuucugcacccagcucaaccgcgcgcugacggggaucgccguggagcaggacaagaacacccaggagguguucgcccaggucaagcagaucuacaagacgcccccgaucaaggacuucggcggguucaacuucagccagauccugcccgaccccuccaagcccagcaagcgguccuucaucgaggaccuccuguucaacaaggugacccuggccgacgccggcuucaucaagcaguacggcgacugccucggggacaucgcggcccgcgaccugaucugcgcccagaaguucaacggccugaccgugcucccgccccugcugaccgacgagaugaucgcccaguacaccagcgcccuccuggcggggaccaucacguccggcuggaccuucggggccggcgccgcccugcagauccccuucgcgaugcagauggccuaccgguucaacggcaucggggucacccagaacgugcucuacgagaaccagaagcugaucgccaaccaguucaacagcgccaucggcaagauccaggacucccugagcuccaccgccagcgcgcucgggaagcugcaggacguggucaaccagaacgcccaggcccugaacacgcucgugaagcagcuguccagcaacuucggcgccaucuccagcgugcugaacgacauccucucccgccuggacaaggucgaggccgaggugcagaucgaccggcugaucaccgggcgccuccagagccugcagaccuacgugacccagcagcugauccgggcggccgagauccgcgccagcgccaaccucgccgcgaccaagauguccgagugcguccugggccagagcaagcggguggacuucugcggcaagggguaccaccugauguccuucccccagagcgccccgcacggcguggucuuccuccacgugacguacguccccgcccaggagaagaacuucaccaccgcccccgcgaucugccacgacgggaaggcccacuucccccgcgagggcguguucguguccaacgggacccacugguucgucacgcagcggaacuucuacgagccgcagaucaucaccaccgacaacaccuucgugagcggcaacugcgacguggucaucggcaucgugaacaacacgguguacgacccccugcagcccgagcuggacuccuucaaggaggagcucgacaaguacuucaagaaccacaccagccccgacgucgaccugggggacaucuccggcaucaacgccagcguggugaacauccagaaggagaucgaccgccugaacgaggucgccaagaaccucaacgagucccugaucgaccugcaggagcucgggaaguacgagcaguacaucaaguggccgugguacaucuggcugggcuucaucgccggccugaucgcgaucgugauggugaccaucaugcucugcugcaugaccagcugcugcuccugccugaaggggugcugcagcugcggcuccugcugcaaguucgacgaggacgacagcgagcccguccugaagggggugaagcuccacuacacgugaggacuaguuauaagacugacuagcccgaugggccucccaacgggcccuccuccccuccuugcaccgagauuaauagaucucaaaggcucuuuucagagccaccaaaaaaaaaaaaaaaaaaaaaaaaaaaaaaaaaaaaaaaaaaaaaaaaaaaaaaaaaaaaaaaaaaaaaaaaaaaaaaaaaaaaaaaaaaaaaaaaaaaaa

SEQ ID NO: 24300 - RNA, 4035 nt, Artificial Sequence
  SARS-CoV-2/Wuhan/WIV05/2019__EPI_ISL_402128 spike protein mRNA gc (1-1273)(H69del_V70del_Y453F_D614G_I692V_M1229I)
aggagaaagcuuaccauguucguguuccugguccuccugccccuggugagcucccagugcgugaaccucaccacccgcacgcagcugccgcccgccuacaccaacagcuucacccggggcgucuacuaccccgacaagguguuccgcuccagcgugcugcacuccacccaggaccucuuccugcccuucuucagcaacgucacgugguuccacgccaucuccgggaccaacggcaccaagcgguucgacaacccggugcugcccuucaacgacggggucuacuucgcgagcaccgagaaguccaacaucauccgcggcuggaucuucgggacgacccucgacagcaagacccagucccugcugaucgugaacaacgccaccaacguggucaucaaggugugcgaguuccaguucugcaacgaccccuuccucggcguguacuaccacaagaacaacaagagcuggauggaguccgaguuccgggucuacagcuccgccaacaacugcacguucgaguacgugagccagcccuuccugauggaccuggagggcaagcaggggaacuucaagaaccuccgcgaguucguguucaagaacaucgacggcuacuucaagaucuacuccaagcacaccccgaucaaccugguccgggaccugccccagggguucagcgcccucgagccccugguggaccugcccaucggcaucaacaucacccgcuuccagacccuccuggcccugcaccgguccuaccucacgccgggggacagcagcuccggcuggaccgcgggcgccgccgccuacuacgugggguaccugcagccccgcaccuuccugcucaaguacaacgagaacggcaccaucacggacgcggucgacugcgcccuggacccccugagcgagaccaagugcacccucaaguccuucaccguggagaaggggaucuaccagacgagcaacuuccgggugcagcccaccgaguccaucguccgcuucccgaacaucaccaaccugugccccuucggcgagguguucaacgccacccgguucgccagcgucuacgccuggaaccgcaagcggaucuccaacugcguggcggacuacagcgugcuguacaacuccgccagcuucuccacguucaagugcuacggcgucagccccaccaagcucaacgaccugugcuucaccaacguguacgccgacuccuucgugauccgcggggacgagguccggcagaucgcccccggccagaccgggaagaucgccgacuacaacuacaagcugccggacgacuucacgggcugcgugaucgcguggaacagcaacaaccucgacuccaaggucgggggcaacuacaacuaccuguuccgccuguuccgcaagagcaaccucaagcccuucgagcgggacaucuccaccgagaucuaccaggccggcagcacccccugcaacgggguggagggcuucaacugcuacuucccccugcaguccuacggguuccagccgaccaacggcgugggguaccagcccuaccggguggucgugcugagcuucgagcuccugcacgcccccgccacggugugcggccccaagaaguccaccaaccuggucaagaacaagugcgugaacuucaacuucaacggccucaccgggaccggcgugcugaccgagagcaacaagaaguuccugccguuccagcaguucgggcgcgacaucgccgacacgaccgacgcgguccgcgacccccagacccuggagauccucgacaucacccccugcagcuucggcgggguguccgugaucacgccgggcaccaacaccagcaaccaggucgccgugcuguaccagggcgugaacugcaccgagguccccguggccauccacgccgaccagcugacgcccaccuggcggguguacuccaccggcagcaacgucuuccagacccgcgccgggugccucaucggcgcggagcacgugaacaacuccuacgagugcgacauccccaucggggccggcaucugcgccagcuaccagacgcagaccaacuccccgcggcgcgcccggagcguggcgucccagagcgugaucgccuacaccaugucccugggcgccgagaacagcgucgccuacuccaacaacagcaucgccauccccaccaacuucacgaucuccgugaccaccgagauccugcccgugagcaugaccaagacgagcgucgacugcaccauguacaucugcggggacuccaccgagugcagcaaccuccugcugcaguacggcuccuucugcacccagcucaaccgcgcgcugacggggaucgccguggagcaggacaagaacacccaggagguguucgcccaggucaagcagaucuacaagacgcccccgaucaaggacuucggcggguucaacuucagccagauccugcccgaccccuccaagcccagcaagcgguccuucaucgaggaccuccuguucaacaaggugacccuggccgacgccggcuucaucaagcaguacggcgacugccucggggacaucgcggcccgcgaccugaucugcgcccagaaguucaacggccugaccgugcucccgccccugcugaccgacgagaugaucgcccaguacaccagcgcccuccuggcggggaccaucacguccggcuggaccuucggggccggcgccgcccugcagauccccuucgcgaugcagauggccuaccgguucaacggcaucggggucacccagaacgugcucuacgagaaccagaagcugaucgccaaccaguucaacagcgccaucggcaagauccaggacucccugagcuccaccgccagcgcgcucgggaagcugcaggacguggucaaccagaacgcccaggcccugaacacgcucgugaagcagcuguccagcaacuucggcgccaucuccagcgugcugaacgacauccucucccgccuggacaaggucgaggccgaggugcagaucgaccggcugaucaccgggcgccuccagagccugcagaccuacgugacccagcagcugauccgggcggccgagauccgcgccagcgccaaccucgccgcgaccaagauguccgagugcguccugggccagagcaagcggguggacuucugcggcaagggguaccaccugauguccuucccccagagcgccccgcacggcguggucuuccuccacgugacguacguccccgcccaggagaagaacuucaccaccgcccccgcgaucugccacgacgggaaggcccacuucccccgcgagggcguguucguguccaacgggacccacugguucgucacgcagcggaacuucuacgagccgcagaucaucaccaccgacaacaccuucgugagcggcaacugcgacguggucaucggcaucgugaacaacacgguguacgacccccugcagcccgagcuggacuccuucaaggaggagcucgacaaguacuucaagaaccacaccagccccgacgucgaccugggggacaucuccggcaucaacgccagcguggugaacauccagaaggagaucgaccgccugaacgaggucgccaagaaccucaacgagucccugaucgaccugcaggagcucgggaaguacgagcaguacaucaaguggccgugguacaucuggcugggcuucaucgccggccugaucgcgaucgugaucgugaccaucaugcucugcugcaugaccagcugcugcuccugccugaaggggugcugcagcugcggcuccugcugcaaguucgacgaggacgacagcgagcccguccugaagggggugaagcuccacuacacgugaggacuaguuauaagacugacuagcccgaugggccucccaacgggcccuccuccccuccuugcaccgagauuaauagaucucaaaggcucuuuucagagccaccaaaaaaaaaaaaaaaaaaaaaaaaaaaaaaaaaaaaaaaaaaaaaaaaaaaaaaaaaaaaaaaaaaaaaaaaaaaaaaaaaaaaaaaaaaaaaaaaaaaaa

SEQ ID NO: 24301 - RNA, 4032 nt, Artificial Sequence
  SARS-CoV-2/Wuhan/WIV05/2019__EPI_ISL_402128 spike protein mRNA gc (1-1273)(H69del_V70del_Y144del_N501Y_A570D_D614G_P681H_T716I_S982 A_D1118H)
aggagaaagcuuaccauguucguguuccugguccuccugccccuggugagcucccagugcgugaaccucaccacccgcacgcagcugccgcccgccuacaccaacagcuucacccggggcgucuacuaccccgacaagguguuccgcuccagcgugcugcacuccacccaggaccucuuccugcccuucuucagcaacgucacgugguuccacgccaucuccgggaccaacggcaccaagcgguucgacaacccggugcugcccuucaacgacggggucuacuucgcgagcaccgagaaguccaacaucauccgcggcuggaucuucgggacgacccucgacagcaagacccagucccugcugaucgugaacaacgccaccaacguggucaucaaggugugcgaguuccaguucugcaacgaccccuuccucggcguguaccacaagaacaacaagagcuggauggaguccgaguuccgggucuacagcuccgccaacaacugcacguucgaguacgugagccagcccuuccugauggaccuggagggcaagcaggggaacuucaagaaccuccgcgaguucguguucaagaacaucgacggcuacuucaagaucuacuccaagcacaccccgaucaaccugguccgggaccugccccagggguucagcgcccucgagccccugguggaccugcccaucggcaucaacaucacccgcuuccagacccuccuggcccugcaccgguccuaccucacgccgggggacagcagcuccggcuggaccgcgggcgccgccgccuacuacgugggguaccugcagccccgcaccuuccugcucaaguacaacgagaacggcaccaucacggacgcggucgacugcgcccuggacccccugagcgagaccaagugcacccucaaguccuucaccguggagaaggggaucuaccagacgagcaacuuccgggugcagcccaccgaguccaucguccgcuucccgaacaucaccaaccugugccccuucggcgagguguucaacgccacccgguucgccagcgucuacgccuggaaccgcaagcggaucuccaacugcguggcggacuacagcgugcuguacaacuccgccagcuucuccacguucaagugcuacggcgucagccccaccaagcucaacgaccugugcuucaccaacguguacgccgacuccuucgugauccgcggggacgagguccggcagaucgcccccggccagaccgggaagaucgccgacuacaacuacaagcugccggacgacuucacgggcugcgugaucgcguggaacagcaacaaccucgacuccaaggucgggggcaacuacaacuaccuguaccgccuguuccgcaagagcaaccucaagcccuucgagcgggacaucuccaccgagaucuaccaggccggcagcacccccugcaacgggguggagggcuucaacugcuacuucccccugcaguccuacggguuccagccgaccuacggcgugggguaccagcccuaccggguggucgugcugagcuucgagcuccugcacgcccccgccacggugugcggccccaagaaguccaccaaccuggucaagaacaagugcgugaacuucaacuucaacggccucaccgggaccggcgugcugaccgagagcaacaagaaguuccugccguuccagcaguucgggcgcgacaucgacgacacgaccgacgcgguccgcgacccccagacccuggagauccucgacaucacccccugcagcuucggcgggguguccgugaucacgccgggcaccaacaccagcaaccaggucgccgugcuguaccagggcgugaacugcaccgagguccccguggccauccacgccgaccagcugacgcccaccuggcggguguacuccaccggcagcaacgucuuccagacccgcgccgggugccucaucggcgcggagcacgugaacaacuccuacgagugcgacauccccaucggggccggcaucugcgccagcuaccagacgcagaccaacucccaccggcgcgcccggagcguggcgucccagagcaucaucgccuacaccaugucccugggcgccgagaacagcgucgccuacuccaacaacagcaucgccauccccaucaacuucacgaucuccgugaccaccgagauccugcccgugagcaugaccaagacgagcgucgacugcaccauguacaucugcggggacuccaccgagugcagcaaccuccugcugcaguacggcuccuucugcacccagcucaaccgcgcgcugacggggaucgccguggagcaggacaagaacacccaggagguguucgcccaggucaagcagaucuacaagacgcccccgaucaaggacuucggcggguucaacuucagccagauccugcccgaccccuccaagcccagcaagcgguccuucaucgaggaccuccuguucaacaaggugacccuggccgacgccggcuucaucaagcaguacggcgacugccucggggacaucgcggcccgcgaccugaucugcgcccagaaguucaacggccugaccgugcucccgccccugcugaccgacgagaugaucgcccaguacaccagcgcccuccuggcggggaccaucacguccggcuggaccuucggggccggcgccgcccugcagauccccuucgcgaugcagauggccuaccgguucaacggcaucggggucacccagaacgugcucuacgagaaccagaagcugaucgccaaccaguucaacagcgccaucggcaagauccaggacucccugagcuccaccgccagcgcgcucgggaagcugcaggacguggucaaccagaacgcccaggcccugaacacgcucgugaagcagcuguccagcaacuucggcgccaucuccagcgugcugaacgacauccucgcccgccuggacaaggucgaggccgaggugcagaucgaccggcugaucaccgggcgccuccagagccugcagaccuacgugacccagcagcugauccgggcggccgagauccgcgccagcgccaaccucgccgcgaccaagauguccgagugcguccugggccagagcaagcggguggacuucugcggcaagggguaccaccugauguccuucccccagagcgccccgcacggcguggucuuccuccacgugacguacguccccgcccaggagaagaacuucaccaccgcccccgcgaucugccacgacgggaaggcccacuucccccgcgagggcguguucguguccaacgggacccacugguucgucacgcagcggaacuucuacgagccgcagaucaucaccacccacaacaccuucgugagcggcaacugcgacguggucaucggcaucgugaacaacacgguguacgacccccugcagcccgagcuggacuccuucaaggaggagcucgacaaguacuucaagaaccacaccagccccgacgucgaccugggggacaucuccggcaucaacgccagcguggugaacauccagaaggagaucgaccgccugaacgaggucgccaagaaccucaacgagucccugaucgaccugcaggagcucgggaaguacgagcaguacaucaaguggccgugguacaucuggcugggcuucaucgccggccugaucgcgaucgugauggugaccaucaugcucugcugcaugaccagcugcugcuccugccugaaggggugcugcagcugcggcuccugcugcaaguucgacgaggacgacagcgagcccguccugaagggggugaagcuccacuacacgugaggacuaguuauaagacugacuagcccgaugggccucccaacgggcccuccuccccuccuugcaccgagauuaauagaucucaaaggcucuuuucagagccaccaaaaaaaaaaaaaaaaaaaaaaaaaaaaaaaaaaaaaaaaaaaaaaaaaaaaaaaaaaaaaaaaaaaaaaaaaaaaaaaaaaaaaaaaaaaaaaaaaaaaa

SEQ ID NO: 24302 - RNA, 4041 nt, Artificial Sequence
  SARS-CoV-2/Wuhan/WIV05/2019__EPI_ISL_402128 spike protein mRNA gc (1-1273)(K417N_E484K_N501Y_D614G)
aggagaaagcuuaccauguucguguuccugguccuccugccccuggugagcucccagugcgugaaccucaccacccgcacgcagcugccgcccgccuacaccaacagcuucacccggggcgucuacuaccccgacaagguguuccgcuccagcgugcugcacuccacccaggaccucuuccugcccuucuucagcaacgucacgugguuccacgccauccacguguccgggaccaacggcaccaagcgguucgacaacccggugcugcccuucaacgacggggucuacuucgcgagcaccgagaaguccaacaucauccgcggcuggaucuucgggacgacccucgacagcaagacccagucccugcugaucgugaacaacgccaccaacguggucaucaaggugugcgaguuccaguucugcaacgaccccuuccucggcguguacuaccacaagaacaacaagagcuggauggaguccgaguuccgggucuacagcuccgccaacaacugcacguucgaguacgugagccagcccuuccugauggaccuggagggcaagcaggggaacuucaagaaccuccgcgaguucguguucaagaacaucgacggcuacuucaagaucuacuccaagcacaccccgaucaaccugguccgggaccugccccagggguucagcgcccucgagccccugguggaccugcccaucggcaucaacaucacccgcuuccagacccuccuggcccugcaccgguccuaccucacgccgggggacagcagcuccggcuggaccgcgggcgccgccgccuacuacgugggguaccugcagccccgcaccuuccugcucaaguacaacgagaacggcaccaucacggacgcggucgacugcgcccuggacccccugagcgagaccaagugcacccucaaguccuucaccguggagaaggggaucuaccagacgagcaacuuccgggugcagcccaccgaguccaucguccgcuucccgaacaucaccaaccugugccccuucggcgagguguucaacgccacccgguucgccagcgucuacgccuggaaccgcaagcggaucuccaacugcguggcggacuacagcgugcuguacaacuccgccagcuucuccacguucaagugcuacggcgucagccccaccaagcucaacgaccugugcuucaccaacguguacgccgacuccuucgugauccgcggggacgagguccggcagaucgcccccggccagaccgggaacaucgccgacuacaacuacaagcugccggacgacuucacgggcugcgugaucgcguggaacagcaacaaccucgacuccaaggucgggggcaacuacaacuaccuguaccgccuguuccgcaagagcaaccucaagcccuucgagcgggacaucuccaccgagaucuaccaggccggcagcacccccugcaacggggugaagggcuucaacugcuacuucccccugcaguccuacggguuccagccgaccuacggcgugggguaccagcccuaccggguggucgugcugagcuucgagcuccugcacgcccccgccacggugugcggccccaagaaguccaccaaccuggucaagaacaagugcgugaacuucaacuucaacggccucaccgggaccggcgugcugaccgagagcaacaagaaguuccugccguuccagcaguucgggcgcgacaucgccgacacgaccgacgcgguccgcgacccccagacccuggagauccucgacaucacccccugcagcuucggcgggguguccgugaucacgccgggcaccaacaccagcaaccaggucgccgugcuguaccagggcgugaacugcaccgagguccccguggccauccacgccgaccagcugacgcccaccuggcggguguacuccaccggcagcaacgucuuccagacccgcgccgggugccucaucggcgcggagcacgugaacaacuccuacgagugcgacauccccaucggggccggcaucugcgccagcuaccagacgcagaccaacuccccgcggcgcgcccggagcguggcgucccagagcaucaucgccuacaccaugucccugggcgccgagaacagcgucgccuacuccaacaacagcaucgccauccccaccaacuucacgaucuccgugaccaccgagauccugcccgugagcaugaccaagacgagcgucgacugcaccauguacaucugcggggacuccaccgagugcagcaaccuccugcugcaguacggcuccuucugcacccagcucaaccgcgcgcugacggggaucgccguggagcaggacaagaacacccaggagguguucgcccaggucaagcagaucuacaagacgcccccgaucaaggacuucggcggguucaacuucagccagauccugcccgaccccuccaagcccagcaagcgguccuucaucgaggaccuccuguucaacaaggugacccuggccgacgccggcuucaucaagcaguacggcgacugccucggggacaucgcggcccgcgaccugaucugcgcccagaaguucaacggccugaccgugcucccgccccugcugaccgacgagaugaucgcccaguacaccagcgcccuccuggcggggaccaucacguccggcuggaccuucggggccggcgccgcccugcagauccccuucgcgaugcagauggccuaccgguucaacggcaucggggucacccagaacgugcucuacgagaaccagaagcugaucgccaaccaguucaacagcgccaucggcaagauccaggacucccugagcuccaccgccagcgcgcucgggaagcugcaggacguggucaaccagaacgcccaggcccugaacacgcucgugaagcagcuguccagcaacuucggcgccaucuccagcgugcugaacgacauccucucccgccuggacaaggucgaggccgaggugcagaucgaccggcugaucaccgggcgccuccagagccugcagaccuacgugacccagcagcugauccgggcggccgagauccgcgccagcgccaaccucgccgcgaccaagauguccgagugcguccugggccagagcaagcggguggacuucugcggcaagggguaccaccugauguccuucccccagagcgccccgcacggcguggucuuccuccacgugacguacguccccgcccaggagaagaacuucaccaccgcccccgcgaucugccacgacgggaaggcccacuucccccgcgagggcguguucguguccaacgggacccacugguucgucacgcagcggaacuucuacgagccgcagaucaucaccaccgacaacaccuucgugagcggcaacugcgacguggucaucggcaucgugaacaacacgguguacgacccccugcagcccgagcuggacuccuucaaggaggagcucgacaaguacuucaagaaccacaccagccccgacgucgaccugggggacaucuccggcaucaacgccagcguggugaacauccagaaggagaucgaccgccugaacgaggucgccaagaaccucaacgagucccugaucgaccugcaggagcucgggaaguacgagcaguacaucaaguggccgugguacaucuggcugggcuucaucgccggccugaucgcgaucgugauggugaccaucaugcucugcugcaugaccagcugcugcuccugccugaaggggugcugcagcugcggcuccugcugcaaguucgacgaggacgacagcgagcccguccugaagggggugaagcuccacuacacgugaggacuaguuauaagacugacuagcccgaugggccucccaacgggcccuccuccccuccuugcaccgagauuaauagaucucaaaggcucuuuucagagccaccaaaaaaaaaaaaaaaaaaaaaaaaaaaaaaaaaaaaaaaaaaaaaaaaaaaaaaaaaaaaaaaaaaaaaaaaaaaaaaaaaaaaaaaaaaaaaaaaaaaaa

SEQ ID NO: 24303 - RNA, 4032 nt, Artificial Sequence
  SARS-CoV-2/Wuhan/WIV05/2019__EPI_ISL_402128 spike protein mRNA gc (1-1273)(L18F_D80A_D215G_L242del_A243del_L244del_R246I_K417N_E484 K_N501Y_D614G_A701V)
aggagaaagcuuaccauguucguguuccugguccuccugccccuggugagcucccagugcgugaacuucaccacccgcacgcagcugccgcccgccuacaccaacagcuucacccggggcgucuacuaccccgacaagguguuccgcuccagcgugcugcacuccacccaggaccucuuccugcccuucuucagcaacgucacgugguuccacgccauccacguguccgggaccaacggcaccaagcgguucgccaacccggugcugcccuucaacgacggggucuacuucgcgagcaccgagaaguccaacaucauccgcggcuggaucuucgggacgacccucgacagcaagacccagucccugcugaucgugaacaacgccaccaacguggucaucaaggugugcgaguuccaguucugcaacgaccccuuccucggcguguacuaccacaagaacaacaagagcuggauggaguccgaguuccgggucuacagcuccgccaacaacugcacguucgaguacgugagccagcccuuccugauggaccuggagggcaagcaggggaacuucaagaaccuccgcgaguucguguucaagaacaucgacggcuacuucaagaucuacuccaagcacaccccgaucaaccugguccggggccugccccagggguucagcgcccucgagccccugguggaccugcccaucggcaucaacaucacccgcuuccagacccuccacaucuccuaccucacgccgggggacagcagcuccggcuggaccgcgggcgccgccgccuacuacgugggguaccugcagccccgcaccuuccugcucaaguacaacgagaacggcaccaucacggacgcggucgacugcgcccuggacccccugagcgagaccaagugcacccucaaguccuucaccguggagaaggggaucuaccagacgagcaacuuccgggugcagcccaccgaguccaucguccgcuucccgaacaucaccaaccugugccccuucggcgagguguucaacgccacccgguucgccagcgucuacgccuggaaccgcaagcggaucuccaacugcguggcggacuacagcgugcuguacaacuccgccagcuucuccacguucaagugcuacggcgucagccccaccaagcucaacgaccugugcuucaccaacguguacgccgacuccuucgugauccgcggggacgagguccggcagaucgcccccggccagaccgggaacaucgccgacuacaacuacaagcugccggacgacuucacgggcugcgugaucgcguggaacagcaacaaccucgacuccaaggucgggggcaacuacaacuaccuguaccgccuguuccgcaagagcaaccucaagcccuucgagcgggacaucuccaccgagaucuaccaggccggcagcacccccugcaacggggugaagggcuucaacugcuacuucccccugcaguccuacggguuccagccgaccuacggcgugggguaccagcccuaccggguggucgugcugagcuucgagcuccugcacgcccccgccacggugugcggccccaagaaguccaccaaccuggucaagaacaagugcgugaacuucaacuucaacggccucaccgggaccggcgugcugaccgagagcaacaagaaguuccugccguuccagcaguucgggcgcgacaucgccgacacgaccgacgcgguccgcgacccccagacccuggagauccucgacaucacccccugcagcuucggcgggguguccgugaucacgccgggcaccaacaccagcaaccaggucgccgugcuguaccagggcgugaacugcaccgagguccccguggccauccacgccgaccagcugacgcccaccuggcggguguacuccaccggcagcaacgucuuccagacccgcgccgggugccucaucggcgcggagcacgugaacaacuccuacgagugcgacauccccaucggggccggcaucugcgccagcuaccagacgcagaccaacuccccgcggcgcgcccggagcguggcgucccagagcaucaucgccuacaccaugucccugggcguggagaacagcgucgccuacuccaacaacagcaucgccauccccaccaacuucacgaucuccgugaccaccgagauccugcccgugagcaugaccaagacgagcgucgacugcaccauguacaucugcggggacuccaccgagugcagcaaccuccugcugcaguacggcuccuucugcacccagcucaaccgcgcgcugacggggaucgccguggagcaggacaagaacacccaggagguguucgcccaggucaagcagaucuacaagacgcccccgaucaaggacuucggcggguucaacuucagccagauccugcccgaccccuccaagcccagcaagcgguccuucaucgaggaccuccuguucaacaaggugacccuggccgacgccggcuucaucaagcaguacggcgacugccucggggacaucgcggcccgcgaccugaucugcgcccagaaguucaacggccugaccgugcucccgccccugcugaccgacgagaugaucgcccaguacaccagcgcccuccuggcggggaccaucacguccggcuggaccuucggggccggcgccgcccugcagauccccuucgcgaugcagauggccuaccgguucaacggcaucggggucacccagaacgugcucuacgagaaccagaagcugaucgccaaccaguucaacagcgccaucggcaagauccaggacucccugagcuccaccgccagcgcgcucgggaagcugcaggacguggucaaccagaacgcccaggcccugaacacgcucgugaagcagcuguccagcaacuucggcgccaucuccagcgugcugaacgacauccucucccgccuggacaaggucgaggccgaggugcagaucgaccggcugaucaccgggcgccuccagagccugcagaccuacgugacccagcagcugauccgggcggccgagauccgcgccagcgccaaccucgccgcgaccaagauguccgagugcguccugggccagagcaagcggguggacuucugcggcaagggguaccaccugauguccuucccccagagcgccccgcacggcguggucuuccuccacgugacguacguccccgcccaggagaagaacuucaccaccgcccccgcgaucugccacgacgggaaggcccacuucccccgcgagggcguguucguguccaacgggacccacugguucgucacgcagcggaacuucuacgagccgcagaucaucaccaccgacaacaccuucgugagcggcaacugcgacguggucaucggcaucgugaacaacacgguguacgacccccugcagcccgagcuggacuccuucaaggaggagcucgacaaguacuucaagaaccacaccagccccgacgucgaccugggggacaucuccggcaucaacgccagcguggugaacauccagaaggagaucgaccgccugaacgaggucgccaagaaccucaacgagucccugaucgaccugcaggagcucgggaaguacgagcaguacaucaaguggccgugguacaucuggcugggcuucaucgccggccugaucgcgaucgugauggugaccaucaugcucugcugcaugaccagcugcugcuccugccugaaggggugcugcagcugcggcuccugcugcaaguucgacgaggacgacagcgagcccguccugaagggggugaagcuccacuacacgugaggacuaguuauaagacugacuagcccgaugggccucccaacgggcccuccuccccuccuugcaccgagauuaauagaucucaaaggcucuuuucagagccaccaaaaaaaaaaaaaaaaaaaaaaaaaaaaaaaaaaaaaaaaaaaaaaaaaaaaaaaaaaaaaaaaaaaaaaaaaaaaaaaaaaaaaaaaaaaaaaaaaaaaa

SEQ ID NO: 24304 - RNA, 4041 nt, Artificial Sequence
  SARS-CoV-2/Wuhan/WIV05/2019__EPI_ISL_402128 spike protein mRNA gc (1-1273)(E484K_D614G)
aggagaaagcuuaccauguucguguuccugguccuccugccccuggugagcucccagugcgugaaccucaccacccgcacgcagcugccgcccgccuacaccaacagcuucacccggggcgucuacuaccccgacaagguguuccgcuccagcgugcugcacuccacccaggaccucuuccugcccuucuucagcaacgucacgugguuccacgccauccacguguccgggaccaacggcaccaagcgguucgacaacccggugcugcccuucaacgacggggucuacuucgcgagcaccgagaaguccaacaucauccgcggcuggaucuucgggacgacccucgacagcaagacccagucccugcugaucgugaacaacgccaccaacguggucaucaaggugugcgaguuccaguucugcaacgaccccuuccucggcguguacuaccacaagaacaacaagagcuggauggaguccgaguuccgggucuacagcuccgccaacaacugcacguucgaguacgugagccagcccuuccugauggaccuggagggcaagcaggggaacuucaagaaccuccgcgaguucguguucaagaacaucgacggcuacuucaagaucuacuccaagcacaccccgaucaaccugguccgggaccugccccagggguucagcgcccucgagccccugguggaccugcccaucggcaucaacaucacccgcuuccagacccuccuggcccugcaccgguccuaccucacgccgggggacagcagcuccggcuggaccgcgggcgccgccgccuacuacgugggguaccugcagccccgcaccuuccugcucaaguacaacgagaacggcaccaucacggacgcggucgacugcgcccuggacccccugagcgagaccaagugcacccucaaguccuucaccguggagaaggggaucuaccagacgagcaacuuccgggugcagcccaccgaguccaucguccgcuucccgaacaucaccaaccugugccccuucggcgagguguucaacgccacccgguucgccagcgucuacgccuggaaccgcaagcggaucuccaacugcguggcggacuacagcgugcuguacaacuccgccagcuucuccacguucaagugcuacggcgucagccccaccaagcucaacgaccugugcuucaccaacguguacgccgacuccuucgugauccgcggggacgagguccggcagaucgcccccggccagaccgggaagaucgccgacuacaacuacaagcugccggacgacuucacgggcugcgugaucgcguggaacagcaacaaccucgacuccaaggucgggggcaacuacaacuaccuguaccgccuguuccgcaagagcaaccucaagcccuucgagcgggacaucuccaccgagaucuaccaggccggcagcacccccugcaacggggugaagggcuucaacugcuacuucccccugcaguccuacggguuccagccgaccaacggcgugggguaccagcccuaccggguggucgugcugagcuucgagcuccugcacgcccccgccacggugugcggccccaagaaguccaccaaccuggucaagaacaagugcgugaacuucaacuucaacggccucaccgggaccggcgugcugaccgagagcaacaagaaguuccugccguuccagcaguucgggcgcgacaucgccgacacgaccgacgcgguccgcgacccccagacccuggagauccucgacaucacccccugcagcuucggcgggguguccgugaucacgccgggcaccaacaccagcaaccaggucgccgugcuguaccagggcgugaacugcaccgagguccccguggccauccacgccgaccagcugacgcccaccuggcggguguacuccaccggcagcaacgucuuccagacccgcgccgggugccucaucggcgcggagcacgugaacaacuccuacgagugcgacauccccaucggggccggcaucugcgccagcuaccagacgcagaccaacuccccgcggcgcgcccggagcguggcgucccagagcaucaucgccuacaccaugucccugggcgccgagaacagcgucgccuacuccaacaacagcaucgccauccccaccaacuucacgaucuccgugaccaccgagauccugcccgugagcaugaccaagacgagcgucgacugcaccauguacaucugcggggacuccaccgagugcagcaaccuccugcugcaguacggcuccuucugcacccagcucaaccgcgcgcugacggggaucgccguggagcaggacaagaacacccaggagguguucgcccaggucaagcagaucuacaagacgcccccgaucaaggacuucggcggguucaacuucagccagauccugcccgaccccuccaagcccagcaagcgguccuucaucgaggaccuccuguucaacaaggugacccuggccgacgccggcuucaucaagcaguacggcgacugccucggggacaucgcggcccgcgaccugaucugcgcccagaaguucaacggccugaccgugcucccgccccugcugaccgacgagaugaucgcccaguacaccagcgcccuccuggcggggaccaucacguccggcuggaccuucggggccggcgccgcccugcagauccccuucgcgaugcagauggccuaccgguucaacggcaucggggucacccagaacgugcucuacgagaaccagaagcugaucgccaaccaguucaacagcgccaucggcaagauccaggacucccugagcuccaccgccagcgcgcucgggaagcugcaggacguggucaaccagaacgcccaggcccugaacacgcucgugaagcagcuguccagcaacuucggcgccaucuccagcgugcugaacgacauccucucccgccuggacaaggucgaggccgaggugcagaucgaccggcugaucaccgggcgccuccagagccugcagaccuacgugacccagcagcugauccgggcggccgagauccgcgccagcgccaaccucgccgcgaccaagauguccgagugcguccugggccagagcaagcggguggacuucugcggcaagggguaccaccugauguccuucccccagagcgccccgcacggcguggucuuccuccacgugacguacguccccgcccaggagaagaacuucaccaccgcccccgcgaucugccacgacgggaaggcccacuucccccgcgagggcguguucguguccaacgggacccacugguucgucacgcagcggaacuucuacgagccgcagaucaucaccaccgacaacaccuucgugagcggcaacugcgacguggucaucggcaucgugaacaacacgguguacgacccccugcagcccgagcuggacuccuucaaggaggagcucgacaaguacuucaagaaccacaccagccccgacgucgaccugggggacaucuccggcaucaacgccagcguggugaacauccagaaggagaucgaccgccugaacgaggucgccaagaaccucaacgagucccugaucgaccugcaggagcucgggaaguacgagcaguacaucaaguggccgugguacaucuggcugggcuucaucgccggccugaucgcgaucgugauggugaccaucaugcucugcugcaugaccagcugcugcuccugccugaaggggugcugcagcugcggcuccugcugcaaguucgacgaggacgacagcgagcccguccugaagggggugaagcuccacuacacgugaggacuaguuauaagacugacuagcccgaugggccucccaacgggcccuccuccccuccuugcaccgagauuaauagaucucaaaggcucuuuucagagccaccaaaaaaaaaaaaaaaaaaaaaaaaaaaaaaaaaaaaaaaaaaaaaaaaaaaaaaaaaaaaaaaaaaaaaaaaaaaaaaaaaaaaaaaaaaaaaaaaaaaaa

SEQ ID NO: 24305 - RNA, 4041 nt, Artificial Sequence
  SARS-CoV-2/Wuhan/WIV05/2019__EPI_ISL_402128 spike protein mRNA gc (1-1273)(L18F_T20N_P26S_D138Y_R190S_K417T_E484K_N501Y_D614G_H655Y _T1027I)
aggagaaagcuuaccauguucguguuccugguccuccugccccuggugagcucccagugcgugaacuucaccaaccgcacgcagcugccgagcgccuacaccaacagcuucacccggggcgucuacuaccccgacaagguguuccgcuccagcgugcugcacuccacccaggaccucuuccugcccuucuucagcaacgucacgugguuccacgccauccacguguccgggaccaacggcaccaagcgguucgacaacccggugcugcccuucaacgacggggucuacuucgcgagcaccgagaaguccaacaucauccgcggcuggaucuucgggacgacccucgacagcaagacccagucccugcugaucgugaacaacgccaccaacguggucaucaaggugugcgaguuccaguucugcaacuaccccuuccucggcguguacuaccacaagaacaacaagagcuggauggaguccgaguuccgggucuacagcuccgccaacaacugcacguucgaguacgugagccagcccuuccugauggaccuggagggcaagcaggggaacuucaagaaccucagcgaguucguguucaagaacaucgacggcuacuucaagaucuacuccaagcacaccccgaucaaccugguccgggaccugccccagggguucagcgcccucgagccccugguggaccugcccaucggcaucaacaucacccgcuuccagacccuccuggcccugcaccgguccuaccucacgccgggggacagcagcuccggcuggaccgcgggcgccgccgccuacuacgugggguaccugcagccccgcaccuuccugcucaaguacaacgagaacggcaccaucacggacgcggucgacugcgcccuggacccccugagcgagaccaagugcacccucaaguccuucaccguggagaaggggaucuaccagacgagcaacuuccgggugcagcccaccgaguccaucguccgcuucccgaacaucaccaaccugugccccuucggcgagguguucaacgccacccgguucgccagcgucuacgccuggaaccgcaagcggaucuccaacugcguggcggacuacagcgugcuguacaacuccgccagcuucuccacguucaagugcuacggcgucagccccaccaagcucaacgaccugugcuucaccaacguguacgccgacuccuucgugauccgcggggacgagguccggcagaucgcccccggccagaccgggaccaucgccgacuacaacuacaagcugccggacgacuucacgggcugcgugaucgcguggaacagcaacaaccucgacuccaaggucgggggcaacuacaacuaccuguaccgccuguuccgcaagagcaaccucaagcccuucgagcgggacaucuccaccgagaucuaccaggccggcagcacccccugcaacggggugaagggcuucaacugcuacuucccccugcaguccuacggguuccagccgaccuacggcgugggguaccagcccuaccggguggucgugcugagcuucgagcuccugcacgcccccgccacggugugcggccccaagaaguccaccaaccuggucaagaacaagugcgugaacuucaacuucaacggccucaccgggaccggcgugcugaccgagagcaacaagaaguuccugccguuccagcaguucgggcgcgacaucgccgacacgaccgacgcgguccgcgacccccagacccuggagauccucgacaucacccccugcagcuucggcgggguguccgugaucacgccgggcaccaacaccagcaaccaggucgccgugcuguaccagggcgugaacugcaccgagguccccguggccauccacgccgaccagcugacgcccaccuggcggguguacuccaccggcagcaacgucuuccagacccgcgccgggugccucaucggcgcggaguacgugaacaacuccuacgagugcgacauccccaucggggccggcaucugcgccagcuaccagacgcagaccaacuccccgcggcgcgcccggagcguggcgucccagagcaucaucgccuacaccaugucccugggcgccgagaacagcgucgccuacuccaacaacagcaucgccauccccaccaacuucacgaucuccgugaccaccgagauccugcccgugagcaugaccaagacgagcgucgacugcaccauguacaucugcggggacuccaccgagugcagcaaccuccugcugcaguacggcuccuucugcacccagcucaaccgcgcgcugacggggaucgccguggagcaggacaagaacacccaggagguguucgcccaggucaagcagaucuacaagacgcccccgaucaaggacuucggcggguucaacuucagccagauccugcccgaccccuccaagcccagcaagcgguccuucaucgaggaccuccuguucaacaaggugacccuggccgacgccggcuucaucaagcaguacggcgacugccucggggacaucgcggcccgcgaccugaucugcgcccagaaguucaacggccugaccgugcucccgccccugcugaccgacgagaugaucgcccaguacaccagcgcccuccuggcggggaccaucacguccggcuggaccuucggggccggcgccgcccugcagauccccuucgcgaugcagauggccuaccgguucaacggcaucggggucacccagaacgugcucuacgagaaccagaagcugaucgccaaccaguucaacagcgccaucggcaagauccaggacucccugagcuccaccgccagcgcgcucgggaagcugcaggacguggucaaccagaacgcccaggcccugaacacgcucgugaagcagcuguccagcaacuucggcgccaucuccagcgugcugaacgacauccucucccgccuggacaaggucgaggccgaggugcagaucgaccggcugaucaccgggcgccuccagagccugcagaccuacgugacccagcagcugauccgggcggccgagauccgcgccagcgccaaccucgccgcgaucaagauguccgagugcguccugggccagagcaagcggguggacuucugcggcaagggguaccaccugauguccuucccccagagcgccccgcacggcguggucuuccuccacgugacguacguccccgcccaggagaagaacuucaccaccgcccccgcgaucugccacgacgggaaggcccacuucccccgcgagggcguguucguguccaacgggacccacugguucgucacgcagcggaacuucuacgagccgcagaucaucaccaccgacaacaccuucgugagcggcaacugcgacguggucaucggcaucgugaacaacacgguguacgacccccugcagcccgagcuggacuccuucaaggaggagcucgacaaguacuucaagaaccacaccagccccgacgucgaccugggggacaucuccggcaucaacgccagcguggugaacauccagaaggagaucgaccgccugaacgaggucgccaagaaccucaacgagucccugaucgaccugcaggagcucgggaaguacgagcaguacaucaaguggccgugguacaucuggcugggcuucaucgccggccugaucgcgaucgugauggugaccaucaugcucugcugcaugaccagcugcugcuccugccugaaggggugcugcagcugcggcuccugcugcaaguucgacgaggacgacagcgagcccguccugaagggggugaagcuccacuacacgugaggacuaguuauaagacugacuagcccgaugggccucccaacgggcccuccuccccuccuugcaccgagauuaauagaucucaaaggcucuuuucagagccaccaaaaaaaaaaaaaaaaaaaaaaaaaaaaaaaaaaaaaaaaaaaaaaaaaaaaaaaaaaaaaaaaaaaaaaaaaaaaaaaaaaaaaaaaaaaaaaaaaaaaa

SEQ ID NO: 24306 - RNA, 4041 nt, Artificial Sequence
  SARS-CoV-2/Wuhan/WIV05/2019__EPI_ISL_402128 spike protein mRNA gc (1-1273)(S13I_W152C_L452R_D614G)
aggagaaagcuuaccauguucguguuccugguccuccugccccuggugagcauccagugcgugaaccucaccacccgcacgcagcugccgcccgccuacaccaacagcuucacccggggcgucuacuaccccgacaagguguuccgcuccagcgugcugcacuccacccaggaccucuuccugcccuucuucagcaacgucacgugguuccacgccauccacguguccgggaccaacggcaccaagcgguucgacaacccggugcugcccuucaacgacggggucuacuucgcgagcaccgagaaguccaacaucauccgcggcuggaucuucgggacgacccucgacagcaagacccagucccugcugaucgugaacaacgccaccaacguggucaucaaggugugcgaguuccaguucugcaacgaccccuuccucggcguguacuaccacaagaacaacaagagcugcauggaguccgaguuccgggucuacagcuccgccaacaacugcacguucgaguacgugagccagcccuuccugauggaccuggagggcaagcaggggaacuucaagaaccuccgcgaguucguguucaagaacaucgacggcuacuucaagaucuacuccaagcacaccccgaucaaccugguccgggaccugccccagggguucagcgcccucgagccccugguggaccugcccaucggcaucaacaucacccgcuuccagacccuccuggcccugcaccgguccuaccucacgccgggggacagcagcuccggcuggaccgcgggcgccgccgccuacuacgugggguaccugcagccccgcaccuuccugcucaaguacaacgagaacggcaccaucacggacgcggucgacugcgcccuggacccccugagcgagaccaagugcacccucaaguccuucaccguggagaaggggaucuaccagacgagcaacuuccgggugcagcccaccgaguccaucguccgcuucccgaacaucaccaaccugugccccuucggcgagguguucaacgccacccgguucgccagcgucuacgccuggaaccgcaagcggaucuccaacugcguggcggacuacagcgugcuguacaacuccgccagcuucuccacguucaagugcuacggcgucagccccaccaagcucaacgaccugugcuucaccaacguguacgccgacuccuucgugauccgcggggacgagguccggcagaucgcccccggccagaccgggaagaucgccgacuacaacuacaagcugccggacgacuucacgggcugcgugaucgcguggaacagcaacaaccucgacuccaaggucgggggcaacuacaacuaccgcuaccgccuguuccgcaagagcaaccucaagcccuucgagcgggacaucuccaccgagaucuaccaggccggcagcacccccugcaacgggguggagggcuucaacugcuacuucccccugcaguccuacggguuccagccgaccaacggcgugggguaccagcccuaccggguggucgugcugagcuucgagcuccugcacgcccccgccacggugugcggccccaagaaguccaccaaccuggucaagaacaagugcgugaacuucaacuucaacggccucaccgggaccggcgugcugaccgagagcaacaagaaguuccugccguuccagcaguucgggcgcgacaucgccgacacgaccgacgcgguccgcgacccccagacccuggagauccucgacaucacccccugcagcuucggcgggguguccgugaucacgccgggcaccaacaccagcaaccaggucgccgugcuguaccagggcgugaacugcaccgagguccccguggccauccacgccgaccagcugacgcccaccuggcggguguacuccaccggcagcaacgucuuccagacccgcgccgggugccucaucggcgcggagcacgugaacaacuccuacgagugcgacauccccaucggggccggcaucugcgccagcuaccagacgcagaccaacuccccgcggcgcgcccggagcguggcgucccagagcaucaucgccuacaccaugucccugggcgccgagaacagcgucgccuacuccaacaacagcaucgccauccccaccaacuucacgaucuccgugaccaccgagauccugcccgugagcaugaccaagacgagcgucgacugcaccauguacaucugcggggacuccaccgagugcagcaaccuccugcugcaguacggcuccuucugcacccagcucaaccgcgcgcugacggggaucgccguggagcaggacaagaacacccaggagguguucgcccaggucaagcagaucuacaagacgcccccgaucaaggacuucggcggguucaacuucagccagauccugcccgaccccuccaagcccagcaagcgguccuucaucgaggaccuccuguucaacaaggugacccuggccgacgccggcuucaucaagcaguacggcgacugccucggggacaucgcggcccgcgaccugaucugcgcccagaaguucaacggccugaccgugcucccgccccugcugaccgacgagaugaucgcccaguacaccagcgcccuccuggcggggaccaucacguccggcuggaccuucggggccggcgccgcccugcagauccccuucgcgaugcagauggccuaccgguucaacggcaucggggucacccagaacgugcucuacgagaaccagaagcugaucgccaaccaguucaacagcgccaucggcaagauccaggacucccugagcuccaccgccagcgcgcucgggaagcugcaggacguggucaaccagaacgcccaggcccugaacacgcucgugaagcagcuguccagcaacuucggcgccaucuccagcgugcugaacgacauccucucccgccuggacaaggucgaggccgaggugcagaucgaccggcugaucaccgggcgccuccagagccugcagaccuacgugacccagcagcugauccgggcggccgagauccgcgccagcgccaaccucgccgcgaccaagauguccgagugcguccugggccagagcaagcggguggacuucugcggcaagggguaccaccugauguccuucccccagagcgccccgcacggcguggucuuccuccacgugacguacguccccgcccaggagaagaacuucaccaccgcccccgcgaucugccacgacgggaaggcccacuucccccgcgagggcguguucguguccaacgggacccacugguucgucacgcagcggaacuucuacgagccgcagaucaucaccaccgacaacaccuucgugagcggcaacugcgacguggucaucggcaucgugaacaacacgguguacgacccccugcagcccgagcuggacuccuucaaggaggagcucgacaaguacuucaagaaccacaccagccccgacgucgaccugggggacaucuccggcaucaacgccagcguggugaacauccagaaggagaucgaccgccugaacgaggucgccaagaaccucaacgagucccugaucgaccugcaggagcucgggaaguacgagcaguacaucaaguggccgugguacaucuggcugggcuucaucgccggccugaucgcgaucgugauggugaccaucaugcucugcugcaugaccagcugcugcuccugccugaaggggugcugcagcugcggcuccugcugcaaguucgacgaggacgacagcgagcccguccugaagggggugaagcuccacuacacgugaggacuaguuauaagacugacuagcccgaugggccucccaacgggcccuccuccccuccuugcaccgagauuaauagaucucaaaggcucuuuucagagccaccaaaaaaaaaaaaaaaaaaaaaaaaaaaaaaaaaaaaaaaaaaaaaaaaaaaaaaaaaaaaaaaaaaaaaaaaaaaaaaaaaaaaaaaaaaaaaaaaaaaaa

SEQ ID NO: 24307 - RNA, 4041 nt, Artificial Sequence; identical to SEQ ID NO: 24289
  SARS-CoV-2/Wuhan/WIV05/2019__EPI_ISL_402128 spike protein mRNA gc (1-1273)

SEQ ID NO: 24308 - RNA, 4041 nt, Artificial Sequence
  SARS-CoV-2/Wuhan/WIV05/2019__EPI_ISL_402128 spike protein mRNA gc (1-1273)(D614G)
aggagaaagcuuaccauguucguguuccugguccuccugccccuggugagcucccagugcgugaaccucaccacccgcacgcagcugccgcccgccuacaccaacagcuucacccggggcgucuacuaccccgacaagguguuccgcuccagcgugcugcacuccacccaggaccucuuccugcccuucuucagcaacgucacgugguuccacgccauccacguguccgggaccaacggcaccaagcgguucgacaacccggugcugcccuucaacgacggggucuacuucgcgagcaccgagaaguccaacaucauccgcggcuggaucuucgggacgacccucgacagcaagacccagucccugcugaucgugaacaacgccaccaacguggucaucaaggugugcgaguuccaguucugcaacgaccccuuccucggcguguacuaccacaagaacaacaagagcuggauggaguccgaguuccgggucuacagcuccgccaacaacugcacguucgaguacgugagccagcccuuccugauggaccuggagggcaagcaggggaacuucaagaaccuccgcgaguucguguucaagaacaucgacggcuacuucaagaucuacuccaagcacaccccgaucaaccugguccgggaccugccccagggguucagcgcccucgagccccugguggaccugcccaucggcaucaacaucacccgcuuccagacccuccuggcccugcaccgguccuaccucacgccgggggacagcagcuccggcuggaccgcgggcgccgccgccuacuacgugggguaccugcagccccgcaccuuccugcucaaguacaacgagaacggcaccaucacggacgcggucgacugcgcccuggacccccugagcgagaccaagugcacccucaaguccuucaccguggagaaggggaucuaccagacgagcaacuuccgggugcagcccaccgaguccaucguccgcuucccgaacaucaccaaccugugccccuucggcgagguguucaacgccacccgguucgccagcgucuacgccuggaaccgcaagcggaucuccaacugcguggcggacuacagcgugcuguacaacuccgccagcuucuccacguucaagugcuacggcgucagccccaccaagcucaacgaccugugcuucaccaacguguacgccgacuccuucgugauccgcggggacgagguccggcagaucgcccccggccagaccgggaagaucgccgacuacaacuacaagcugccggacgacuucacgggcugcgugaucgcguggaacagcaacaaccucgacuccaaggucgggggcaacuacaacuaccuguaccgccuguuccgcaagagcaaccucaagcccuucgagcgggacaucuccaccgagaucuaccaggccggcagcacccccugcaacgggguggagggcuucaacugcuacuucccccugcaguccuacggguuccagccgaccaacggcgugggguaccagcccuaccggguggucgugcugagcuucgagcuccugcacgcccccgccacggugugcggccccaagaaguccaccaaccuggucaagaacaagugcgugaacuucaacuucaacggccucaccgggaccggcgugcugaccgagagcaacaagaaguuccugccguuccagcaguucgggcgcgacaucgccgacacgaccgacgcgguccgcgacccccagacccuggagauccucgacaucacccccugcagcuucggcgggguguccgugaucacgccgggcaccaacaccagcaaccaggucgccgugcuguaccagggcgugaacugcaccgagguccccguggccauccacgccgaccagcugacgcccaccuggcggguguacuccaccgggagcaacgucuuccagacccgcgccggcugccucaucggggcggagcacgugaacaacuccuacgagugcgacauccccaucggcgccggcaucugcgccagcuaccagacgcagaccaacuccccgcggcgcgcccggagcguggcgucccagagcaucaucgccuacaccaugucccugggggccgagaacagcgucgccuacuccaacaacagcaucgccauccccaccaacuucacgaucuccgugaccaccgagauccugcccgugagcaugaccaagacgagcgucgacugcaccauguacaucugcggcgacuccaccgagugcagcaaccuccugcugcaguacggguccuucugcacccagcucaaccgcgcgcugacgggcaucgccguggagcaggacaagaacacccaggagguguucgcccaggucaagcagaucuacaagacgcccccgaucaaggacuucgggggcuucaacuucagccagauccugcccgaccccuccaagcccagcaagcgguccuucaucgaggaccuccuguucaacaaggugacccuggccgacgccggcuucaucaagcaguacggggacugccucggcgacaucgcggcccgcgaccugaucugcgcccagaaguucaacgggcugaccgugcucccgccccugcugaccgacgagaugaucgcccaguacaccagcgcccuccuggcgggcaccaucacguccggguggaccuucggcgccggcgccgcccugcagauccccuucgcgaugcagauggccuaccgguucaacgggaucggcgucacccagaacgugcucuacgagaaccagaagcugaucgccaaccaguucaacagcgccaucgggaagauccaggacucccugagcuccaccgccagcgcgcucggcaagcugcaggacguggucaaccagaacgcccaggcccugaacacgcucgugaagcagcuguccagcaacuucggggccaucuccagcgugcugaacgacauccucucccgccuggacaaggucgaggccgaggugcagaucgaccggcugaucaccggccgccuccagagccugcagaccuacgugacccagcagcugauccgggcggccgagauccgcgccagcgccaaccucgccgcgaccaagauguccgagugcguccugggccagagcaagcggguggacuucugcgggaagggcuaccaccugauguccuucccccagagcgccccgcacgggguggucuuccuccacgugacguacguccccgcccaggagaagaacuucaccaccgcccccgcgaucugccacgacggcaaggcccacuucccccgcgaggggguguucguguccaacggcacccacugguucgucacgcagcggaacuucuacgagccgcagaucaucaccaccgacaacaccuucgugagcggcaacugcgacguggucaucgggaucgugaacaacacgguguacgacccccugcagcccgagcuggacuccuucaaggaggagcucgacaaguacuucaagaaccacaccagccccgacgucgaccugggcgacaucuccgggaucaacgccagcguggugaacauccagaaggagaucgaccgccugaacgaggucgccaagaaccucaacgagucccugaucgaccugcaggagcucggcaaguacgagcaguacaucaaguggccgugguacaucuggcugggcuucaucgccgggcugaucgcgaucgugauggugaccaucaugcucugcugcaugaccagcugcugcuccugccugaagggcugcugcagcugcggguccugcugcaaguucgacgaggacgacagcgagcccguccugaagggcgugaagcuccacuacacgugaggacuaguuauaagacugacuagcccgaugggccucccaacgggcccuccuccccuccuugcaccgagauuaauagaucucaaaggcucuuuucagagccaccaaaaaaaaaaaaaaaaaaaaaaaaaaaaaaaaaaaaaaaaaaaaaaaaaaaaaaaaaaaaaaaaaaaaaaaaaaaaaaaaaaaaaaaaaaaaaaaaaaaaa

SEQ ID NO: 24309 - RNA, 4041 nt, Artificial Sequence
  SARS-CoV-2/Wuhan/WIV05/2019__EPI_ISL_402128 spike protein mRNA gc (1-1273)(A222V_D614G)
aggagaaagcuuaccauguucguguuccugguccuccugccccuggugagcucccagugcgugaaccucaccacccgcacgcagcugccgcccgccuacaccaacagcuucacccggggcgucuacuaccccgacaagguguuccgcuccagcgugcugcacuccacccaggaccucuuccugcccuucuucagcaacgucacgugguuccacgccauccacguguccgggaccaacggcaccaagcgguucgacaacccggugcugcccuucaacgacggggucuacuucgcgagcaccgagaaguccaacaucauccgcggcuggaucuucgggacgacccucgacagcaagacccagucccugcugaucgugaacaacgccaccaacguggucaucaaggugugcgaguuccaguucugcaacgaccccuuccucggcguguacuaccacaagaacaacaagagcuggauggaguccgaguuccgggucuacagcuccgccaacaacugcacguucgaguacgugagccagcccuuccugauggaccuggagggcaagcaggggaacuucaagaaccuccgcgaguucguguucaagaacaucgacggcuacuucaagaucuacuccaagcacaccccgaucaaccugguccgggaccugccccagggguucagcgugcucgagccccugguggaccugcccaucggcaucaacaucacccgcuuccagacccuccuggcccugcaccgguccuaccucacgccgggggacagcagcuccggcuggaccgccggcgcggccgccuacuacgucggguaccugcagccccgcaccuuccugcucaaguacaacgagaacggcaccaucacggacgccguggacugcgcgcuggacccccugagcgagaccaagugcacccucaaguccuucaccguggagaaggggaucuaccagacgagcaacuuccggguccagcccaccgaguccaucgugcgcuucccgaacaucaccaaccugugccccuucggcgaggucuucaacgccacccgguucgccagcguguacgccuggaaccgcaagcggaucuccaacugcguggccgacuacagcguccuguacaacuccgcgagcuucuccacguucaagugcuacggcgugagccccaccaagcucaacgaccugugcuucaccaacguguacgccgacuccuucgucauccgcggggacgaggugcggcagaucgcccccggccagaccgggaagaucgccgacuacaacuacaagcugccggacgacuucacgggcugcgugaucgccuggaacagcaacaaccucgacuccaaggucgggggcaacuacaacuaccuguaccgccuguuccgcaagagcaaccucaagcccuucgagcgggacaucuccaccgagaucuaccaggcgggcagcacccccugcaacgggguggagggcuucaacugcuacuucccccugcaguccuacggguuccagccgaccaacggcgugggguaccagcccuaccgggucguggugcugagcuucgagcuccugcacgcccccgccacggucugcggccccaagaaguccaccaaccuggugaagaacaagugcgugaacuucaacuucaacggccucaccgggaccggcguccugaccgagagcaacaagaaguuccugccguuccagcaguucgggcgcgacaucgccgacacgaccgacgccgugcgcgacccccagacccuggagauccucgacaucacccccugcagcuucggcgggguguccgucaucacgccgggcaccaacaccagcaaccagguggcggugcuguaccagggcgucaacugcaccgaggugcccguggccauccacgccgaccagcugacgcccaccuggcgggucuacuccaccgggagcaacguguuccagacccgcgccggcugccucaucggggccgagcacgugaacaacuccuacgagugcgacauccccaucggcgcgggcaucugcgccagcuaccagacgcagaccaacuccccgcggcgcgcccggagcgucgccucccagagcaucaucgcguacaccaugucccugggggccgagaacagcguggccuacuccaacaacagcaucgccauccccaccaacuucacgaucuccgugaccaccgagauccugcccgucagcaugaccaagacgagcguggacugcaccauguacaucugcggcgacuccaccgagugcagcaaccuccugcugcaguacggguccuucugcacccagcucaaccgcgcccugacgggcaucgcgguggagcaggacaagaacacccaggaggucuucgcccaggugaagcagaucuacaagacgcccccgaucaaggacuucgggggcuucaacuucagccagauccugcccgaccccuccaagcccagcaagcgguccuucaucgaggaccuccuguucaacaaggugacccuggccgacgccggcuucaucaagcaguacggggacugccucggcgacaucgccgcgcgcgaccugaucugcgcccagaaguucaacgggcugaccguccucccgccccugcugaccgacgagaugaucgcccaguacaccagcgcccuccuggccggcaccaucacguccggguggaccuucggcgcgggcgccgcccugcagauccccuucgccaugcagauggcguaccgguucaacgggaucggcgugacccagaacgugcucuacgagaaccagaagcugaucgccaaccaguucaacagcgccaucgggaagauccaggacucccugagcuccaccgccagcgcccucggcaagcugcaggacgucgugaaccagaacgcgcaggcccugaacacgcucgugaagcagcuguccagcaacuucggggccaucuccagcguccugaacgacauccucucccgccuggacaagguggaggccgaggugcagaucgaccggcugaucaccggccgccuccagagccugcagaccuacgucacccagcagcugauccgggccgcggagauccgcgccagcgccaaccucgccgccaccaagauguccgagugcgugcugggccagagcaagcggguggacuucugcgggaagggcuaccaccugauguccuucccccagagcgcgccgcacggggucguguuccuccacgucacguacgugcccgcccaggagaagaacuucaccaccgcccccgccaucugccacgacggcaaggcgcacuucccccgcgaggggguguucgucuccaacggcacccacugguucgugacgcagcggaacuucuacgagccgcagaucaucaccaccgacaacaccuucgugagcggcaacugcgacgucgugaucgggaucgugaacaacacggucuacgacccccugcagcccgagcuggacuccuucaaggaggagcucgacaaguacuucaagaaccacaccagccccgacguggaccugggcgacaucuccgggaucaacgccagcguggucaacauccagaaggagaucgaccgccugaacgagguggccaagaaccucaacgagucccugaucgaccugcaggagcucggcaaguacgagcaguacaucaaguggccgugguacaucuggcugggcuucaucgccgggcugaucgccaucgugauggucaccaucaugcucugcugcaugaccagcugcugcuccugccugaagggcugcugcagcugcggguccugcugcaaguucgacgaggacgacagcgagcccgugcugaagggcgugaagcuccacuacacgugaggacuaguuauaagacugacuagcccgaugggccucccaacgggcccuccuccccuccuugcaccgagauuaauagaucucaaaggcucuuuucagagccaccaaaaaaaaaaaaaaaaaaaaaaaaaaaaaaaaaaaaaaaaaaaaaaaaaaaaaaaaaaaaaaaaaaaaaaaaaaaaaaaaaaaaaaaaaaaaaaaaaaaaa

SEQ ID NO: 24310 - RNA, 4041 nt, Artificial Sequence
  SARS-CoV-2/Wuhan/WIV05/2019__EPI_ISL_402128 spike protein mRNA gc (1-1273)(N439K_D614G)
aggagaaagcuuaccauguucguguuccugguccuccugccccuggugagcucccagugcgugaaccucaccacccgcacgcagcugccgcccgccuacaccaacagcuucacccggggcgucuacuaccccgacaagguguuccgcuccagcgugcugcacuccacccaggaccucuuccugcccuucuucagcaacgucacgugguuccacgccauccacguguccgggaccaacggcaccaagcgguucgacaacccggugcugcccuucaacgacggggucuacuucgcgagcaccgagaaguccaacaucauccgcggcuggaucuucgggacgacccucgacagcaagacccagucccugcugaucgugaacaacgccaccaacguggucaucaaggugugcgaguuccaguucugcaacgaccccuuccucggcguguacuaccacaagaacaacaagagcuggauggaguccgaguuccgggucuacagcuccgccaacaacugcacguucgaguacgugagccagcccuuccugauggaccuggagggcaagcaggggaacuucaagaaccuccgcgaguucguguucaagaacaucgacggcuacuucaagaucuacuccaagcacaccccgaucaaccugguccgggaccugccccagggguucagcgcccucgagccccugguggaccugcccaucggcaucaacaucacccgcuuccagacccuccuggcccugcaccgguccuaccucacgccgggggacagcagcuccggcuggaccgcgggcgccgccgccuacuacgugggguaccugcagccccgcaccuuccugcucaaguacaacgagaacggcaccaucacggacgcggucgacugcgcccuggacccccugagcgagaccaagugcacccucaaguccuucaccguggagaaggggaucuaccagacgagcaacuuccgggugcagcccaccgaguccaucguccgcuucccgaacaucaccaaccugugccccuucggcgagguguucaacgccacccgguucgccagcgucuacgccuggaaccgcaagcggaucuccaacugcguggcggacuacagcgugcuguacaacuccgccagcuucuccacguucaagugcuacggcgucagccccaccaagcucaacgaccugugcuucaccaacguguacgccgacuccuucgugauccgcggggacgagguccggcagaucgcccccggccagaccgggaagaucgccgacuacaacuacaagcugccggacgacuucacgggcugcgugaucgcguggaacagcaagaaccucgacuccaaggucgggggcaacuacaacuaccuguaccgccuguuccgcaagagcaaccucaagcccuucgagcgggacaucuccaccgagaucuaccaggccggcagcacccccugcaacgggguggagggcuucaacugcuacuucccccugcaguccuacggguuccagccgaccaacggcgugggguaccagcccuaccggguggucgugcugagcuucgagcuccugcacgcccccgccacggugugcggccccaagaaguccaccaaccuggucaagaacaagugcgugaacuucaacuucaacggccucaccgggaccggcgugcugaccgagagcaacaagaaguuccugccguuccagcaguucgggcgcgacaucgccgacacgaccgacgcgguccgcgacccccagacccuggagauccucgacaucacccccugcagcuucggcgggguguccgugaucacgccgggcaccaacaccagcaaccaggucgccgugcuguaccagggcgugaacugcaccgagguccccguggccauccacgccgaccagcugacgcccaccuggcggguguacuccaccgggagcaacgucuuccagacccgcgccggcugccucaucggggcggagcacgugaacaacuccuacgagugcgacauccccaucggcgccggcaucugcgccagcuaccagacgcagaccaacuccccgcggcgcgcccggagcguggcgucccagagcaucaucgccuacaccaugucccugggggccgagaacagcgucgccuacuccaacaacagcaucgccauccccaccaacuucacgaucuccgugaccaccgagauccugcccgugagcaugaccaagacgagcgucgacugcaccauguacaucugcggcgacuccaccgagugcagcaaccuccugcugcaguacggguccuucugcacccagcucaaccgcgcgcugacgggcaucgccguggagcaggacaagaacacccaggagguguucgcccaggucaagcagaucuacaagacgcccccgaucaaggacuucgggggcuucaacuucagccagauccugcccgaccccuccaagcccagcaagcgguccuucaucgaggaccuccuguucaacaaggugacccuggccgacgccggcuucaucaagcaguacggggacugccucggcgacaucgcggcccgcgaccugaucugcgcccagaaguucaacgggcugaccgugcucccgccccugcugaccgacgagaugaucgcccaguacaccagcgcccuccuggcgggcaccaucacguccggguggaccuucggcgccggcgccgcccugcagauccccuucgcgaugcagauggccuaccgguucaacgggaucggcgucacccagaacgugcucuacgagaaccagaagcugaucgccaaccaguucaacagcgccaucgggaagauccaggacucccugagcuccaccgccagcgcgcucggcaagcugcaggacguggucaaccagaacgcccaggcccugaacacgcucgugaagcagcuguccagcaacuucggggccaucuccagcgugcugaacgacauccucucccgccuggacaaggucgaggccgaggugcagaucgaccggcugaucaccggccgccuccagagccugcagaccuacgugacccagcagcugauccgggcggccgagauccgcgccagcgccaaccucgccgcgaccaagauguccgagugcguccugggccagagcaagcggguggacuucugcgggaagggcuaccaccugauguccuucccccagagcgccccgcacgggguggucuuccuccacgugacguacguccccgcccaggagaagaacuucaccaccgcccccgcgaucugccacgacggcaaggcccacuucccccgcgaggggguguucguguccaacggcacccacugguucgucacgcagcggaacuucuacgagccgcagaucaucaccaccgacaacaccuucgugagcggcaacugcgacguggucaucgggaucgugaacaacacgguguacgacccccugcagcccgagcuggacuccuucaaggaggagcucgacaaguacuucaagaaccacaccagccccgacgucgaccugggcgacaucuccgggaucaacgccagcguggugaacauccagaaggagaucgaccgccugaacgaggucgccaagaaccucaacgagucccugaucgaccugcaggagcucggcaaguacgagcaguacaucaaguggccgugguacaucuggcugggcuucaucgccgggcugaucgcgaucgugauggugaccaucaugcucugcugcaugaccagcugcugcuccugccugaagggcugcugcagcugcggguccugcugcaaguucgacgaggacgacagcgagcccguccugaagggcgugaagcuccacuacacgugaggacuaguuauaagacugacuagcccgaugggccucccaacgggcccuccuccccuccuugcaccgagauuaauagaucucaaaggcucuuuucagagccaccaaaaaaaaaaaaaaaaaaaaaaaaaaaaaaaaaaaaaaaaaaaaaaaaaaaaaaaaaaaaaaaaaaaaaaaaaaaaaaaaaaaaaaaaaaaaaaaaaaaaa

SEQ ID NO: 24311 - RNA, 4041 nt, Artificial Sequence
  SARS-CoV-2/Wuhan/WIV05/2019__EPI_ISL_402128 spike protein mRNA gc (1-1273)(S477N_D614G)
aggagaaagcuuaccauguucguguuccugguccuccugccccuggugagcucccagugcgugaaccucaccacccgcacgcagcugccgcccgccuacaccaacagcuucacccggggcgucuacuaccccgacaagguguuccgcuccagcgugcugcacuccacccaggaccucuuccugcccuucuucagcaacgucacgugguuccacgccauccacguguccgggaccaacggcaccaagcgguucgacaacccggugcugcccuucaacgacggggucuacuucgcgagcaccgagaaguccaacaucauccgcggcuggaucuucgggacgacccucgacagcaagacccagucccugcugaucgugaacaacgccaccaacguggucaucaaggugugcgaguuccaguucugcaacgaccccuuccucggcguguacuaccacaagaacaacaagagcuggauggaguccgaguuccgggucuacagcuccgccaacaacugcacguucgaguacgugagccagcccuuccugauggaccuggagggcaagcaggggaacuucaagaaccuccgcgaguucguguucaagaacaucgacggcuacuucaagaucuacuccaagcacaccccgaucaaccugguccgggaccugccccagggguucagcgcccucgagccccugguggaccugcccaucggcaucaacaucacccgcuuccagacccuccuggcccugcaccgguccuaccucacgccgggggacagcagcuccggcuggaccgcgggcgccgccgccuacuacgugggguaccugcagccccgcaccuuccugcucaaguacaacgagaacggcaccaucacggacgcggucgacugcgcccuggacccccugagcgagaccaagugcacccucaaguccuucaccguggagaaggggaucuaccagacgagcaacuuccgggugcagcccaccgaguccaucguccgcuucccgaacaucaccaaccugugccccuucggcgagguguucaacgccacccgguucgccagcgucuacgccuggaaccgcaagcggaucuccaacugcguggcggacuacagcgugcuguacaacuccgccagcuucuccacguucaagugcuacggcgucagccccaccaagcucaacgaccugugcuucaccaacguguacgccgacuccuucgugauccgcggggacgagguccggcagaucgcccccggccagaccgggaagaucgccgacuacaacuacaagcugccggacgacuucacgggcugcgugaucgcguggaacagcaacaaccucgacuccaaggucgggggcaacuacaacuaccuguaccgccuguuccgcaagagcaaccucaagcccuucgagcgggacaucuccaccgagaucuaccaggccggcaacacccccugcaacgggguggagggcuucaacugcuacuucccccugcagagcuacggguuccagccgaccaacggcgugggguaccagcccuaccggguggucgugcuguccuucgagcuccugcacgcccccgccacggugugcggccccaagaaguccaccaaccuggucaagaacaagugcgugaacuucaacuucaacggccucaccgggaccggcgugcugaccgagagcaacaagaaguuccugccguuccagcaguucgggcgcgacaucgccgacacgaccgacgcgguccgcgacccccagacccuggagauccucgacaucacccccugcagcuucggcggggugagcgugaucacgccgggcaccaacaccuccaaccaggucgccgugcuguaccagggcgugaacugcaccgagguccccguggccauccacgccgaccagcugacgcccaccuggcggguguacagcaccggguccaacgucuuccagacccgcgccggcugccucaucggggcggagcacgugaacaacagcuacgagugcgacauccccaucggcgccggcaucugcgccuccuaccagacgcagaccaacagcccgcggcgcgcccgguccguggcgagccaguccaucaucgccuacaccaugagccugggggccgagaacuccgucgccuacagcaacaacuccaucgccauccccaccaacuucacgaucagcgugaccaccgagauccugcccguguccaugaccaagacgagcgucgacugcaccauguacaucugcggcgacagcaccgagugcuccaaccuccugcugcaguacgggagcuucugcacccagcucaaccgcgcgcugacgggcaucgccguggagcaggacaagaacacccaggagguguucgcccaggucaagcagaucuacaagacgcccccgaucaaggacuucgggggcuucaacuucucccagauccugcccgaccccagcaagcccuccaagcggagcuucaucgaggaccuccuguucaacaaggugacccuggccgacgccggcuucaucaagcaguacggggacugccucggcgacaucgcggcccgcgaccugaucugcgcccagaaguucaacgggcugaccgugcucccgccccugcugaccgacgagaugaucgcccaguacaccuccgcccuccuggcgggcaccaucacgagcggguggaccuucggcgccggcgccgcccugcagauccccuucgcgaugcagauggccuaccgguucaacgggaucggcgucacccagaacgugcucuacgagaaccagaagcugaucgccaaccaguucaacuccgccaucgggaagauccaggacagccuguccagcaccgccuccgcgcucggcaagcugcaggacguggucaaccagaacgcccaggcccugaacacgcucgugaagcagcugagcuccaacuucggggccaucagcuccgugcugaacgacauccucagccgccuggacaaggucgaggccgaggugcagaucgaccggcugaucaccggccgccuccagucccugcagaccuacgugacccagcagcugauccgggcggccgagauccgcgccagcgccaaccucgccgcgaccaagaugagcgagugcguccugggccaguccaagcggguggacuucugcgggaagggcuaccaccugaugagcuucccccaguccgccccgcacgggguggucuuccuccacgugacguacguccccgcccaggagaagaacuucaccaccgcccccgcgaucugccacgacggcaaggcccacuucccccgcgaggggguguucgugagcaacggcacccacugguucgucacgcagcggaacuucuacgagccgcagaucaucaccaccgacaacaccuucguguccggcaacugcgacguggucaucgggaucgugaacaacacgguguacgacccccugcagcccgagcuggacagcuucaaggaggagcucgacaaguacuucaagaaccacaccucccccgacgucgaccugggcgacaucagcgggaucaacgccuccguggugaacauccagaaggagaucgaccgccugaacgaggucgccaagaaccucaacgagagccugaucgaccugcaggagcucggcaaguacgagcaguacaucaaguggccgugguacaucuggcugggcuucaucgccgggcugaucgcgaucgugauggugaccaucaugcucugcugcaugaccuccugcugcagcugccugaagggcugcugcuccugcgggagcugcugcaaguucgacgaggacgacuccgagcccguccugaagggcgugaagcuccacuacacgugaggacuaguuauaagacugacuagcccgaugggccucccaacgggcccuccuccccuccuugcaccgagauuaauagaucucaaaggcucuuuucagagccaccaaaaaaaaaaaaaaaaaaaaaaaaaaaaaaaaaaaaaaaaaaaaaaaaaaaaaaaaaaaaaaaaaaaaaaaaaaaaaaaaaaaaaaaaaaaaaaaaaaaaa

SEQ ID NO: 24312 - RNA, 4041 nt, Artificial Sequence
  SARS-CoV-2/Wuhan/WIV05/2019__EPI_ISL_402128 spike protein mRNA gc (1-1273)(N501Y_D614G)
aggagaaagcuuaccauguucguguuccugguccuccugccccuggugagcucccagugcgugaaccucaccacccgcacgcagcugccgcccgccuacaccaacagcuucacccggggcgucuacuaccccgacaagguguuccgcuccagcgugcugcacuccacccaggaccucuuccugcccuucuucagcaacgucacgugguuccacgccauccacguguccgggaccaacggcaccaagcgguucgacaacccggugcugcccuucaacgacggggucuacuucgcgagcaccgagaaguccaacaucauccgcggcuggaucuucgggacgacccucgacagcaagacccagucccugcugaucgugaacaacgccaccaacguggucaucaaggugugcgaguuccaguucugcaacgaccccuuccucggcguguacuaccacaagaacaacaagagcuggauggaguccgaguuccgggucuacagcuccgccaacaacugcacguucgaguacgugagccagcccuuccugauggaccuggagggcaagcaggggaacuucaagaaccuccgcgaguucguguucaagaacaucgacggcuacuucaagaucuacuccaagcacaccccgaucaaccugguccgggaccugccccagggguucagcgcccucgagccccugguggaccugcccaucggcaucaacaucacccgcuuccagacccuccuggcccugcaccgguccuaccucacgccgggggacagcagcuccggcuggaccgcgggcgccgccgccuacuacgugggguaccugcagccccgcaccuuccugcucaaguacaacgagaacggcaccaucacggacgcggucgacugcgcccuggacccccugagcgagaccaagugcacccucaaguccuucaccguggagaaggggaucuaccagacgagcaacuuccgggugcagcccaccgaguccaucguccgcuucccgaacaucaccaaccugugccccuucggcgagguguucaacgccacccgguucgccagcgucuacgccuggaaccgcaagcggaucuccaacugcguggcggacuacagcgugcuguacaacuccgccagcuucuccacguucaagugcuacggcgucagccccaccaagcucaacgaccugugcuucaccaacguguacgccgacuccuucgugauccgcggggacgagguccggcagaucgcccccggccagaccgggaagaucgccgacuacaacuacaagcugccggacgacuucacgggcugcgugaucgcguggaacagcaacaaccucgacuccaaggucgggggcaacuacaacuaccuguaccgccuguuccgcaagagcaaccucaagcccuucgagcgggacaucuccaccgagaucuaccaggccggcagcacccccugcaacgggguggagggcuucaacugcuacuucccccugcaguccuacggguuccagccgaccuacggcgugggguaccagcccuaccggguggucgugcugagcuucgagcuccugcacgcccccgccacggugugcggccccaagaaguccaccaaccuggucaagaacaagugcgugaacuucaacuucaacggccucaccgggaccggcgugcugaccgagagcaacaagaaguuccugccguuccagcaguucgggcgcgacaucgccgacacgaccgacgcgguccgcgacccccagacccuggagauccucgacaucacccccugcagcuucggcgggguguccgugaucacgccgggcaccaacaccagcaaccaggucgccgugcuguaccagggcgugaacugcaccgagguccccguggccauccacgccgaccagcugacgcccaccuggcggguguacuccaccgggagcaacgucuuccagacccgcgccggcugccucaucggggcggagcacgugaacaacuccuacgagugcgacauccccaucggcgccggcaucugcgccagcuaccagacgcagaccaacuccccgcggcgcgcccggagcguggcgucccagagcaucaucgccuacaccaugucccugggggccgagaacagcgucgccuacuccaacaacagcaucgccauccccaccaacuucacgaucuccgugaccaccgagauccugcccgugagcaugaccaagacgagcgucgacugcaccauguacaucugcggcgacuccaccgagugcagcaaccuccugcugcaguacggguccuucugcacccagcucaaccgcgcgcugacgggcaucgccguggagcaggacaagaacacccaggagguguucgcccaggucaagcagaucuacaagacgcccccgaucaaggacuucgggggcuucaacuucagccagauccugcccgaccccuccaagcccagcaagcgguccuucaucgaggaccuccuguucaacaaggugacccuggccgacgccggcuucaucaagcaguacggggacugccucggcgacaucgcggcccgcgaccugaucugcgcccagaaguucaacgggcugaccgugcucccgccccugcugaccgacgagaugaucgcccaguacaccagcgcccuccuggcgggcaccaucacguccggguggaccuucggcgccggcgccgcccugcagauccccuucgcgaugcagauggccuaccgguucaacgggaucggcgucacccagaacgugcucuacgagaaccagaagcugaucgccaaccaguucaacagcgccaucgggaagauccaggacucccugagcuccaccgccagcgcgcucggcaagcugcaggacguggucaaccagaacgcccaggcccugaacacgcucgugaagcagcuguccagcaacuucggggccaucuccagcgugcugaacgacauccucucccgccuggacaaggucgaggccgaggugcagaucgaccggcugaucaccggccgccuccagagccugcagaccuacgugacccagcagcugauccgggcggccgagauccgcgccagcgccaaccucgccgcgaccaagauguccgagugcguccugggccagagcaagcggguggacuucugcgggaagggcuaccaccugauguccuucccccagagcgccccgcacgggguggucuuccuccacgugacguacguccccgcccaggagaagaacuucaccaccgcccccgcgaucugccacgacggcaaggcccacuucccccgcgaggggguguucguguccaacggcacccacugguucgucacgcagcggaacuucuacgagccgcagaucaucaccaccgacaacaccuucgugagcggcaacugcgacguggucaucgggaucgugaacaacacgguguacgacccccugcagcccgagcuggacuccuucaaggaggagcucgacaaguacuucaagaaccacaccagccccgacgucgaccugggcgacaucuccgggaucaacgccagcguggugaacauccagaaggagaucgaccgccugaacgaggucgccaagaaccucaacgagucccugaucgaccugcaggagcucggcaaguacgagcaguacaucaaguggccgugguacaucuggcugggcuucaucgccgggcugaucgcgaucgugauggugaccaucaugcucugcugcaugaccagcugcugcuccugccugaagggcugcugcagcugcggguccugcugcaaguucgacgaggacgacagcgagcccguccugaagggcgugaagcuccacuacacgugaggacuaguuauaagacugacuagcccgaugggccucccaacgggcccuccuccccuccuugcaccgagauuaauagaucucaaaggcucuuuucagagccaccaaaaaaaaaaaaaaaaaaaaaaaaaaaaaaaaaaaaaaaaaaaaaaaaaaaaaaaaaaaaaaaaaaaaaaaaaaaaaaaaaaaaaaaaaaaaaaaaaaaaa

SEQ ID NO: 24313 - RNA, 4035 nt, Artificial Sequence
  SARS-CoV-2/Wuhan/WIV05/2019__EPI_ISL_402128 spike protein mRNA gc (1-1273)(H69del_V70del_D614G)
aggagaaagcuuaccauguucguguuccugguccuccugccccuggugagcucccagugcgugaaccucaccacccgcacgcagcugccgcccgccuacaccaacagcuucacccggggcgucuacuaccccgacaagguguuccgcuccagcgugcugcacuccacccaggaccucuuccugcccuucuucagcaacgucacgugguuccacgccaucuccgggaccaacggcaccaagcgguucgacaacccggugcugcccuucaacgacgggguguacuucgcgagcaccgagaaguccaacaucauccgcggcuggaucuucgggacgacccucgacagcaagacccagucccugcugaucgucaacaacgccaccaacguggugaucaaggucugcgaguuccaguucugcaacgaccccuuccucggcguguacuaccacaagaacaacaagagcuggauggaguccgaguuccggguguacagcuccgccaacaacugcacguucgaguacgucagccagcccuuccugauggaccuggagggcaagcaggggaacuucaagaaccuccgcgaguucguguucaagaacaucgacggcuacuucaagaucuacuccaagcacaccccgaucaaccuggugcgggaccugccccagggguucagcgcccucgagccccuggucgaccugcccaucggcaucaacaucacccgcuuccagacccuccuggcccugcaccgguccuaccucacgccgggggacagcagcuccggcuggaccgcgggcgccgccgccuacuacgugggguaccugcagccccgcaccuuccugcucaaguacaacgagaacggcaccaucacggacgcgguggacugcgcccuggacccccugagcgagaccaagugcacccucaaguccuucaccgucgagaaggggaucuaccagacgagcaacuuccgggugcagcccaccgaguccaucgugcgcuucccgaacaucaccaaccugugccccuucggcgaggucuucaacgccacccgguucgccagcguguacgccuggaaccgcaagcggaucuccaacugcgucgcggacuacagcgugcuguacaacuccgccagcuucuccacguucaagugcuacggcgugagccccaccaagcucaacgaccugugcuucaccaacgucuacgccgacuccuucgugauccgcggggacgaggugcggcagaucgcccccggccagaccgggaagaucgccgacuacaacuacaagcugccggacgacuucacgggcugcgucaucgcguggaacagcaacaaccucgacuccaaggucgggggcaacuacaacuaccuguaccgccuguuccgcaagagcaaccucaagcccuucgagcgggacaucuccaccgagaucuaccaggccggcagcacccccugcaacgggguggagggcuucaacugcuacuucccccugcaguccuacggguuccagccgaccaacggcgugggguaccagcccuaccggguggugguccugagcuucgagcuccugcacgcccccgccacggugugcggccccaagaaguccaccaaccuggugaagaacaagugcgucaacuucaacuucaacggccucaccgggaccggcgugcugaccgagagcaacaagaaguuccugccguuccagcaguucgggcgcgacaucgccgacacgaccgacgcggugcgcgacccccagacccuggagauccucgacaucacccccugcagcuucggcggggucuccgugaucacgccgggcaccaacaccagcaaccagguggccguccuguaccagggcgugaacugcaccgaggugcccgucgccauccacgccgaccagcugacgcccaccuggcggguguacuccaccgggagcaacguguuccagacccgcgccggcugccucaucggggcggagcacgucaacaacuccuacgagugcgacauccccaucggcgccggcaucugcgccagcuaccagacgcagaccaacuccccgcggcgcgcccggagcguggcgucccagagcaucaucgccuacaccaugucccugggggccgagaacagcguggccuacuccaacaacagcaucgccauccccaccaacuucacgaucuccgucaccaccgagauccugcccgugagcaugaccaagacgagcguggacugcaccauguacaucugcggcgacuccaccgagugcagcaaccuccugcugcaguacggguccuucugcacccagcucaaccgcgcgcugacgggcaucgccgucgagcaggacaagaacacccaggagguguucgcccaggugaagcagaucuacaagacgcccccgaucaaggacuucgggggcuucaacuucagccagauccugcccgaccccuccaagcccagcaagcgguccuucaucgaggaccuccuguucaacaaggucacccuggccgacgccggcuucaucaagcaguacggggacugccucggcgacaucgcggcccgcgaccugaucugcgcccagaaguucaacgggcugaccgugcucccgccccugcugaccgacgagaugaucgcccaguacaccagcgcccuccuggcgggcaccaucacguccggguggaccuucggcgccggcgccgcccugcagauccccuucgcgaugcagauggccuaccgguucaacgggaucggcgugacccagaacguccucuacgagaaccagaagcugaucgccaaccaguucaacagcgccaucgggaagauccaggacucccugagcuccaccgccagcgcgcucggcaagcugcaggacguggugaaccagaacgcccaggcccugaacacgcucgucaagcagcuguccagcaacuucggggccaucuccagcgugcugaacgacauccucucccgccuggacaagguggaggccgagguccagaucgaccggcugaucaccggccgccuccagagccugcagaccuacgugacccagcagcugauccgggcggccgagauccgcgccagcgccaaccucgccgcgaccaagauguccgagugcgugcugggccagagcaagcgggucgacuucugcgggaagggcuaccaccugauguccuucccccagagcgccccgcacggggugguguuccuccacgucacguacgugcccgcccaggagaagaacuucaccaccgcccccgcgaucugccacgacggcaaggcccacuucccccgcgagggggucuucguguccaacggcacccacugguucgugacgcagcggaacuucuacgagccgcagaucaucaccaccgacaacaccuucgucagcggcaacugcgacguggugaucgggaucgucaacaacacgguguacgacccccugcagcccgagcuggacuccuucaaggaggagcucgacaaguacuucaagaaccacaccagccccgacguggaccugggcgacaucuccgggaucaacgccagcgucgugaacauccagaaggagaucgaccgccugaacgagguggccaagaaccucaacgagucccugaucgaccugcaggagcucggcaaguacgagcaguacaucaaguggccgugguacaucuggcugggcuucaucgccgggcugaucgcgaucgucauggugaccaucaugcucugcugcaugaccagcugcugcuccugccugaagggcugcugcagcugcggguccugcugcaaguucgacgaggacgacagcgagcccgugcugaagggcgucaagcuccacuacacgugaggacuaguuauaagacugacuagcccgaugggccucccaacgggcccuccuccccuccuugcaccgagauuaauagaucucaaaggcucuuuucagagccaccaaaaaaaaaaaaaaaaaaaaaaaaaaaaaaaaaaaaaaaaaaaaaaaaaaaaaaaaaaaaaaaaaaaaaaaaaaaaaaaaaaaaaaaaaaaaaaaaaaaaa

SEQ ID NO: 24314 - RNA, 4041 nt, Artificial Sequence
  SARS-CoV-2/Wuhan/WIV05/2019__EPI_ISL_402128 spike protein mRNA gc (1-1273)(Y453F_D614G)
aggagaaagcuuaccauguucguguuccugguccuccugccccuggugagcucccagugcgugaaccucaccacccgcacgcagcugccgcccgccuacaccaacagcuucacccggggcgucuacuaccccgacaagguguuccgcuccagcgugcugcacuccacccaggaccucuuccugcccuucuucagcaacgucacgugguuccacgccauccacguguccgggaccaacggcaccaagcgguucgacaacccggugcugcccuucaacgacggggucuacuucgcgagcaccgagaaguccaacaucauccgcggcuggaucuucgggacgacccucgacagcaagacccagucccugcugaucgugaacaacgccaccaacguggucaucaaggugugcgaguuccaguucugcaacgaccccuuccucggcguguacuaccacaagaacaacaagagcuggauggaguccgaguuccgggucuacagcuccgccaacaacugcacguucgaguacgugagccagcccuuccugauggaccuggagggcaagcaggggaacuucaagaaccuccgcgaguucguguucaagaacaucgacggcuacuucaagaucuacuccaagcacaccccgaucaaccugguccgggaccugccccagggguucagcgcccucgagccccugguggaccugcccaucggcaucaacaucacccgcuuccagacccuccuggcccugcaccgguccuaccucacgccgggggacagcagcuccggcuggaccgcgggcgccgccgccuacuacgugggguaccugcagccccgcaccuuccugcucaaguacaacgagaacggcaccaucacggacgcggucgacugcgcccuggacccccugagcgagaccaagugcacccucaaguccuucaccguggagaaggggaucuaccagacgagcaacuuccgggugcagcccaccgaguccaucguccgcuucccgaacaucaccaaccugugccccuucggcgagguguucaacgccacccgguucgccagcgucuacgccuggaaccgcaagcggaucuccaacugcguggcggacuacagcgugcuguacaacuccgccagcuucuccacguucaagugcuacggcgucagccccaccaagcucaacgaccugugcuucaccaacguguacgccgacuccuucgugauccgcggggacgagguccggcagaucgcccccggccagaccgggaagaucgccgacuacaacuacaagcugccggacgacuucacgggcugcgugaucgcguggaacagcaacaaccucgacuccaaggucgggggcaacuacaacuaccuguuccgccuguuccgcaagagcaaccucaagcccuucgagcgggacaucuccaccgagaucuaccaggccggcagcacccccugcaacgggguggagggcuucaacugcuacuucccccugcaguccuacggguuccagccgaccaacggcgugggguaccagcccuaccggguggucgugcugagcuucgagcuccugcacgcccccgccacggugugcggccccaagaaguccaccaaccuggucaagaacaagugcgugaacuucaacuucaacggccucaccgggaccggcgugcugaccgagagcaacaagaaguuccugccguuccagcaguucgggcgcgacaucgccgacacgaccgacgcgguccgcgacccccagacccuggagauccucgacaucacccccugcagcuucggcgggguguccgugaucacgccgggcaccaacaccagcaaccaggucgccgugcuguaccagggcgugaacugcaccgagguccccguggccauccacgccgaccagcugacgcccaccuggcggguguacuccaccgggagcaacgucuuccagacccgcgccggcugccucaucggggcggagcacgugaacaacuccuacgagugcgacauccccaucggcgccggcaucugcgccagcuaccagacgcagaccaacuccccgcggcgcgcccggagcguggcgucccagagcaucaucgccuacaccaugucccugggggccgagaacagcgucgccuacuccaacaacagcaucgccauccccaccaacuucacgaucuccgugaccaccgagauccugcccgugagcaugaccaagacgagcgucgacugcaccauguacaucugcggcgacuccaccgagugcagcaaccuccugcugcaguacggguccuucugcacccagcucaaccgcgcgcugacgggcaucgccguggagcaggacaagaacacccaggagguguucgcccaggucaagcagaucuacaagacgcccccgaucaaggacuucgggggcuucaacuucagccagauccugcccgaccccuccaagcccagcaagcgguccuucaucgaggaccuccuguucaacaaggugacccuggccgacgccggcuucaucaagcaguacggggacugccucggcgacaucgcggcccgcgaccugaucugcgcccagaaguucaacgggcugaccgugcucccgccccugcugaccgacgagaugaucgcccaguacaccagcgcccuccuggcgggcaccaucacguccggguggaccuucggcgccggcgccgcccugcagauccccuucgcgaugcagauggccuaccgguucaacgggaucggcgucacccagaacgugcucuacgagaaccagaagcugaucgccaaccaguucaacagcgccaucgggaagauccaggacucccugagcuccaccgccagcgcgcucggcaagcugcaggacguggucaaccagaacgcccaggcccugaacacgcucgugaagcagcuguccagcaacuucggggccaucuccagcgugcugaacgacauccucucccgccuggacaaggucgaggccgaggugcagaucgaccggcugaucaccggccgccuccagagccugcagaccuacgugacccagcagcugauccgggcggccgagauccgcgccagcgccaaccucgccgcgaccaagauguccgagugcguccugggccagagcaagcggguggacuucugcgggaagggcuaccaccugauguccuucccccagagcgccccgcacgggguggucuuccuccacgugacguacguccccgcccaggagaagaacuucaccaccgcccccgcgaucugccacgacggcaaggcccacuucccccgcgaggggguguucguguccaacggcacccacugguucgucacgcagcggaacuucuacgagccgcagaucaucaccaccgacaacaccuucgugagcggcaacugcgacguggucaucgggaucgugaacaacacgguguacgacccccugcagcccgagcuggacuccuucaaggaggagcucgacaaguacuucaagaaccacaccagccccgacgucgaccugggcgacaucuccgggaucaacgccagcguggugaacauccagaaggagaucgaccgccugaacgaggucgccaagaaccucaacgagucccugaucgaccugcaggagcucggcaaguacgagcaguacaucaaguggccgugguacaucuggcugggcuucaucgccgggcugaucgcgaucgugauggugaccaucaugcucugcugcaugaccagcugcugcuccugccugaagggcugcugcagcugcggguccugcugcaaguucgacgaggacgacagcgagcccguccugaagggcgugaagcuccacuacacgugaggacuaguuauaagacugacuagcccgaugggccucccaacgggcccuccuccccuccuugcaccgagauuaauagaucucaaaggcucuuuucagagccaccaaaaaaaaaaaaaaaaaaaaaaaaaaaaaaaaaaaaaaaaaaaaaaaaaaaaaaaaaaaaaaaaaaaaaaaaaaaaaaaaaaaaaaaaaaaaaaaaaaaaa

SEQ ID NO: 24315 - RNA, 4041 nt, Artificial Sequence
  SARS-CoV-2/Wuhan/WIV05/2019__EPI_ISL_402128 spike protein mRNA gc (1-1273)(D614G_I692V)
aggagaaagcuuaccauguucguguuccugguccuccugccccuggugagcucccagugcgugaaccucaccacccgcacgcagcugccgcccgccuacaccaacagcuucacccggggcgucuacuaccccgacaagguguuccgcuccagcgugcugcacuccacccaggaccucuuccugcccuucuucagcaacgucacgugguuccacgccauccacguguccgggaccaacggcaccaagcgguucgacaacccggugcugcccuucaacgacggggucuacuucgcgagcaccgagaaguccaacaucauccgcggcuggaucuucgggacgacccucgacagcaagacccagucccugcugaucgugaacaacgccaccaacguggucaucaaggugugcgaguuccaguucugcaacgaccccuuccucggcguguacuaccacaagaacaacaagagcuggauggaguccgaguuccgggucuacagcuccgccaacaacugcacguucgaguacgugagccagcccuuccugauggaccuggagggcaagcaggggaacuucaagaaccuccgcgaguucguguucaagaacaucgacggcuacuucaagaucuacuccaagcacaccccgaucaaccugguccgggaccugccccagggguucagcgcccucgagccccugguggaccugcccaucggcaucaacaucacccgcuuccagacccuccuggcccugcaccgguccuaccucacgccgggggacagcagcuccggcuggaccgcgggcgccgccgccuacuacgugggguaccugcagccccgcaccuuccugcucaaguacaacgagaacggcaccaucacggacgcggucgacugcgcccuggacccccugagcgagaccaagugcacccucaaguccuucaccguggagaaggggaucuaccagacgagcaacuuccgggugcagcccaccgaguccaucguccgcuucccgaacaucaccaaccugugccccuucggcgagguguucaacgccacccgguucgccagcgucuacgccuggaaccgcaagcggaucuccaacugcguggcggacuacagcgugcuguacaacuccgccagcuucuccacguucaagugcuacggcgucagccccaccaagcucaacgaccugugcuucaccaacguguacgccgacuccuucgugauccgcggggacgagguccggcagaucgcccccggccagaccgggaagaucgccgacuacaacuacaagcugccggacgacuucacgggcugcgugaucgcguggaacagcaacaaccucgacuccaaggucgggggcaacuacaacuaccuguaccgccuguuccgcaagagcaaccucaagcccuucgagcgggacaucuccaccgagaucuaccaggccggcagcacccccugcaacgggguggagggcuucaacugcuacuucccccugcaguccuacggguuccagccgaccaacggcgugggguaccagcccuaccggguggucgugcugagcuucgagcuccugcacgcccccgccacggugugcggccccaagaaguccaccaaccuggucaagaacaagugcgugaacuucaacuucaacggccucaccgggaccggcgugcugaccgagagcaacaagaaguuccugccguuccagcaguucgggcgcgacaucgccgacacgaccgacgcgguccgcgacccccagacccuggagauccucgacaucacccccugcagcuucggcgggguguccgugaucacgccgggcaccaacaccagcaaccaggucgccgugcuguaccagggcgugaacugcaccgagguccccguggccauccacgccgaccagcugacgcccaccuggcggguguacuccaccgggagcaacgucuuccagacccgcgccggcugccucaucggggcggagcacgugaacaacuccuacgagugcgacauccccaucggcgccggcaucugcgccagcuaccagacgcagaccaacuccccgcggcgcgcccggagcguggcgucccagagcgucaucgccuacaccaugucccugggggccgagaacagcguggccuacuccaacaacagcaucgccauccccaccaacuucacgaucuccgugaccaccgagauccugcccgucagcaugaccaagacgagcguggacugcaccauguacaucugcggcgacuccaccgagugcagcaaccuccugcugcaguacggguccuucugcacccagcucaaccgcgcgcugacgggcaucgccguggagcaggacaagaacacccaggaggucuucgcccaggugaagcagaucuacaagacgcccccgaucaaggacuucgggggcuucaacuucagccagauccugcccgaccccuccaagcccagcaagcgguccuucaucgaggaccuccuguucaacaaggugacccuggccgacgccggcuucaucaagcaguacggggacugccucggcgacaucgcggcccgcgaccugaucugcgcccagaaguucaacgggcugaccguccucccgccccugcugaccgacgagaugaucgcccaguacaccagcgcccuccuggcgggcaccaucacguccggguggaccuucggcgccggcgccgcccugcagauccccuucgcgaugcagauggccuaccgguucaacgggaucggcgugacccagaacgugcucuacgagaaccagaagcugaucgccaaccaguucaacagcgccaucgggaagauccaggacucccugagcuccaccgccagcgcgcucggcaagcugcaggacgucgugaaccagaacgcccaggcccugaacacgcucgugaagcagcuguccagcaacuucggggccaucuccagcguccugaacgacauccucucccgccuggacaagguggaggccgaggugcagaucgaccggcugaucaccggccgccuccagagccugcagaccuacgucacccagcagcugauccgggcggccgagauccgcgccagcgccaaccucgccgcgaccaagauguccgagugcgugcugggccagagcaagcggguggacuucugcgggaagggcuaccaccugauguccuucccccagagcgccccgcacggggucguguuccuccacgucacguacgugcccgcccaggagaagaacuucaccaccgcccccgcgaucugccacgacggcaaggcccacuucccccgcgaggggguguucgucuccaacggcacccacugguucgugacgcagcggaacuucuacgagccgcagaucaucaccaccgacaacaccuucgugagcggcaacugcgacgucgugaucgggaucgugaacaacacggucuacgacccccugcagcccgagcuggacuccuucaaggaggagcucgacaaguacuucaagaaccacaccagccccgacguggaccugggcgacaucuccgggaucaacgccagcguggucaacauccagaaggagaucgaccgccugaacgagguggccaagaaccucaacgagucccugaucgaccugcaggagcucggcaaguacgagcaguacaucaaguggccgugguacaucuggcugggcuucaucgccgggcugaucgcgaucgugauggucaccaucaugcucugcugcaugaccagcugcugcuccugccugaagggcugcugcagcugcggguccugcugcaaguucgacgaggacgacagcgagcccgugcugaagggcgugaagcuccacuacacgugaggacuaguuauaagacugacuagcccgaugggccucccaacgggcccuccuccccuccuugcaccgagauuaauagaucucaaaggcucuuuucagagccaccaaaaaaaaaaaaaaaaaaaaaaaaaaaaaaaaaaaaaaaaaaaaaaaaaaaaaaaaaaaaaaaaaaaaaaaaaaaaaaaaaaaaaaaaaaaaaaaaaaaaa

SEQ ID NO: 24316 - RNA, 4041 nt, Artificial Sequence
  SARS-CoV-2/Wuhan/WIV05/2019__EPI_ISL_402128 spike protein mRNA gc (1-1273)(D614G_M1229I)
aggagaaagcuuaccauguucguguuccugguccuccugccccuggugagcucccagugcgugaaccucaccacccgcacgcagcugccgcccgccuacaccaacagcuucacccggggcgucuacuaccccgacaagguguuccgcuccagcgugcugcacuccacccaggaccucuuccugcccuucuucagcaacgucacgugguuccacgccauccacguguccgggaccaacggcaccaagcgguucgacaacccggugcugcccuucaacgacggggucuacuucgcgagcaccgagaaguccaacaucauccgcggcuggaucuucgggacgacccucgacagcaagacccagucccugcugaucgugaacaacgccaccaacguggucaucaaggugugcgaguuccaguucugcaacgaccccuuccucggcguguacuaccacaagaacaacaagagcuggauggaguccgaguuccgggucuacagcuccgccaacaacugcacguucgaguacgugagccagcccuuccugauggaccuggagggcaagcaggggaacuucaagaaccuccgcgaguucguguucaagaacaucgacggcuacuucaagaucuacuccaagcacaccccgaucaaccugguccgggaccugccccagggguucagcgcccucgagccccugguggaccugcccaucggcaucaacaucacccgcuuccagacccuccuggcccugcaccgguccuaccucacgccgggggacagcagcuccggcuggaccgcgggcgccgccgccuacuacgugggguaccugcagccccgcaccuuccugcucaaguacaacgagaacggcaccaucacggacgcggucgacugcgcccuggacccccugagcgagaccaagugcacccucaaguccuucaccguggagaaggggaucuaccagacgagcaacuuccgggugcagcccaccgaguccaucguccgcuucccgaacaucaccaaccugugccccuucggcgagguguucaacgccacccgguucgccagcgucuacgccuggaaccgcaagcggaucuccaacugcguggcggacuacagcgugcuguacaacuccgccagcuucuccacguucaagugcuacggcgucagccccaccaagcucaacgaccugugcuucaccaacguguacgccgacuccuucgugauccgcggggacgagguccggcagaucgcccccggccagaccgggaagaucgccgacuacaacuacaagcugccggacgacuucacgggcugcgugaucgcguggaacagcaacaaccucgacuccaaggucgggggcaacuacaacuaccuguaccgccuguuccgcaagagcaaccucaagcccuucgagcgggacaucuccaccgagaucuaccaggccggcagcacccccugcaacgggguggagggcuucaacugcuacuucccccugcaguccuacggguuccagccgaccaacggcgugggguaccagcccuaccggguggucgugcugagcuucgagcuccugcacgcccccgccacggugugcggccccaagaaguccaccaaccuggucaagaacaagugcgugaacuucaacuucaacggccucaccgggaccggcgugcugaccgagagcaacaagaaguuccugccguuccagcaguucgggcgcgacaucgccgacacgaccgacgcgguccgcgacccccagacccuggagauccucgacaucacccccugcagcuucggcgggguguccgugaucacgccgggcaccaacaccagcaaccaggucgccgugcuguaccagggcgugaacugcaccgagguccccguggccauccacgccgaccagcugacgcccaccuggcggguguacuccaccgggagcaacgucuuccagacccgcgccggcugccucaucggggcggagcacgugaacaacuccuacgagugcgacauccccaucggcgccggcaucugcgccagcuaccagacgcagaccaacuccccgcggcgcgcccggagcguggcgucccagagcaucaucgccuacaccaugucccugggggccgagaacagcgucgccuacuccaacaacagcaucgccauccccaccaacuucacgaucuccgugaccaccgagauccugcccgugagcaugaccaagacgagcgucgacugcaccauguacaucugcggcgacuccaccgagugcagcaaccuccugcugcaguacggguccuucugcacccagcucaaccgcgcgcugacgggcaucgccguggagcaggacaagaacacccaggagguguucgcccaggucaagcagaucuacaagacgcccccgaucaaggacuucgggggcuucaacuucagccagauccugcccgaccccuccaagcccagcaagcgguccuucaucgaggaccuccuguucaacaaggugacccuggccgacgccggcuucaucaagcaguacggggacugccucggcgacaucgcggcccgcgaccugaucugcgcccagaaguucaacgggcugaccgugcucccgccccugcugaccgacgagaugaucgcccaguacaccagcgcccuccuggcgggcaccaucacguccggguggaccuucggcgccggcgccgcccugcagauccccuucgcgaugcagauggccuaccgguucaacgggaucggcgucacccagaacgugcucuacgagaaccagaagcugaucgccaaccaguucaacagcgccaucgggaagauccaggacucccugagcuccaccgccagcgcgcucggcaagcugcaggacguggucaaccagaacgcccaggcccugaacacgcucgugaagcagcuguccagcaacuucggggccaucuccagcgugcugaacgacauccucucccgccuggacaaggucgaggccgaggugcagaucgaccggcugaucaccggccgccuccagagccugcagaccuacgugacccagcagcugauccgggcggccgagauccgcgccagcgccaaccucgccgcgaccaagauguccgagugcguccugggccagagcaagcggguggacuucugcgggaagggcuaccaccugauguccuucccccagagcgccccgcacgggguggucuuccuccacgugacguacguccccgcccaggagaagaacuucaccaccgcccccgcgaucugccacgacggcaaggcccacuucccccgcgaggggguguucguguccaacggcacccacugguucgucacgcagcggaacuucuacgagccgcagaucaucaccaccgacaacaccuucgugagcggcaacugcgacguggucaucgggaucgugaacaacacgguguacgacccccugcagcccgagcuggacuccuucaaggaggagcucgacaaguacuucaagaaccacaccagccccgacgucgaccugggcgacaucuccgggaucaacgccagcguggugaacauccagaaggagaucgaccgccugaacgaggucgccaagaaccucaacgagucccugaucgaccugcaggagcucggcaaguacgagcaguacaucaaguggccgugguacaucuggcugggcuucaucgccgggcugaucgcgaucgugaucgugaccaucaugcucugcugcaugaccagcugcugcuccugccugaagggcugcugcagcugcggguccugcugcaaguucgacgaggacgacagcgagcccguccugaagggcgugaagcuccacuacacgugaggacuaguuauaagacugacuagcccgaugggccucccaacgggcccuccuccccuccuugcaccgagauuaauagaucucaaaggcucuuuucagagccaccaaaaaaaaaaaaaaaaaaaaaaaaaaaaaaaaaaaaaaaaaaaaaaaaaaaaaaaaaaaaaaaaaaaaaaaaaaaaaaaaaaaaaaaaaaaaaaaaaaaaa

SEQ ID NO: 24317 - RNA, 4035 nt, Artificial Sequence
  SARS-CoV-2/Wuhan/WIV05/2019__EPI_ISL_402128 spike protein mRNA gc (1-1273)(H69del_V70del_A222V_Y453F_S477N_D614G_I692V)
aggagaaagcuuaccauguucguguuccugguccuccugccccuggugagcucccagugcgugaaccucaccacccgcacgcagcugccgcccgccuacaccaacagcuucacccggggcgucuacuaccccgacaagguguuccgcuccagcgugcugcacuccacccaggaccucuuccugcccuucuucagcaacgucacgugguuccacgccaucuccgggaccaacggcaccaagcgguucgacaacccggugcugcccuucaacgacgggguguacuucgcgagcaccgagaaguccaacaucauccgcggcuggaucuucgggacgacccucgacagcaagacccagucccugcugaucgucaacaacgccaccaacguggugaucaaggucugcgaguuccaguucugcaacgaccccuuccucggcguguacuaccacaagaacaacaagagcuggauggaguccgaguuccggguguacagcuccgccaacaacugcacguucgaguacgucagccagcccuuccugauggaccuggagggcaagcaggggaacuucaagaaccuccgcgaguucguguucaagaacaucgacggcuacuucaagaucuacuccaagcacaccccgaucaaccuggugcgggaccugccccagggguucagcguccucgagccccugguggaccugcccaucggcaucaacaucacccgcuuccagacccuccuggcccugcaccgguccuaccucacgccgggggacagcagcuccggcuggaccgccggcgcggccgccuacuacgugggguaccugcagccccgcaccuuccugcucaaguacaacgagaacggcaccaucacggacgccgucgacugcgcgcuggacccccugagcgagaccaagugcacccucaaguccuucaccguggagaaggggaucuaccagacgagcaacuuccgggugcagcccaccgaguccaucguccgcuucccgaacaucaccaaccugugccccuucggcgagguguucaacgccacccgguucgccagcgucuacgccuggaaccgcaagcggaucuccaacugcguggccgacuacagcgugcuguacaacuccgcgagcuucuccacguucaagugcuacggcgucagccccaccaagcucaacgaccugugcuucaccaacguguacgccgacuccuucgugauccgcggggacgagguccggcagaucgcccccggccagaccgggaagaucgccgacuacaacuacaagcugccggacgacuucacgggcugcgugaucgccuggaacagcaacaaccucgacuccaaggucgggggcaacuacaacuaccuguuccgccuguuccgcaagagcaaccucaagcccuucgagcgggacaucuccaccgagaucuaccaggcgggcaacacccccugcaacgggguggagggcuucaacugcuacuucccccugcagagcuacggguuccagccgaccaacggcgugggguaccagcccuaccggguggucgugcuguccuucgagcuccugcacgcccccgccacggugugcggccccaagaaguccaccaaccuggucaagaacaagugcgugaacuucaacuucaacggccucaccgggaccggcgugcugaccgagagcaacaagaaguuccugccguuccagcaguucgggcgcgacaucgccgacacgaccgacgccguccgcgacccccagacccuggagauccucgacaucacccccugcagcuucggcggggugagcgugaucacgccgggcaccaacaccuccaaccaggucgcggugcuguaccagggcgugaacugcaccgagguccccguggccauccacgccgaccagcugacgcccaccuggcggguguacagcaccggguccaacgucuuccagacccgcgccggcugccucaucggggccgagcacgugaacaacagcuacgagugcgacauccccaucggcgcgggcaucugcgccuccuaccagacgcagaccaacagcccgcggcgcgcccgguccguggccagccaguccgucaucgcguacaccaugagccugggggccgagaacuccguggccuacagcaacaacuccaucgccauccccaccaacuucacgaucagcgugaccaccgagauccugcccgucuccaugaccaagacgagcguggacugcaccauguacaucugcggcgacagcaccgagugcuccaaccuccugcugcaguacgggagcuucugcacccagcucaaccgcgcccugacgggcaucgcgguggagcaggacaagaacacccaggaggucuucgcccaggugaagcagaucuacaagacgcccccgaucaaggacuucgggggcuucaacuucucccagauccugcccgaccccagcaagcccuccaagcggagcuucaucgaggaccuccuguucaacaaggugacccuggccgacgccggcuucaucaagcaguacggggacugccucggcgacaucgccgcgcgcgaccugaucugcgcccagaaguucaacgggcugaccguccucccgccccugcugaccgacgagaugaucgcccaguacaccuccgcccuccuggccggcaccaucacgagcggguggaccuucggcgcgggcgccgcccugcagauccccuucgccaugcagauggcguaccgguucaacgggaucggcgugacccagaacgugcucuacgagaaccagaagcugaucgccaaccaguucaacuccgccaucgggaagauccaggacagccuguccagcaccgccuccgcccucggcaagcugcaggacgucgugaaccagaacgcgcaggcccugaacacgcucgugaagcagcugagcuccaacuucggggccaucagcuccguccugaacgacauccucagccgccuggacaagguggaggccgaggugcagaucgaccggcugaucaccggccgccuccagucccugcagaccuacgucacccagcagcugauccgggccgcggagauccgcgccagcgccaaccucgccgccaccaagaugagcgagugcgugcugggccaguccaagcggguggacuucugcgggaagggcuaccaccugaugagcuucccccaguccgcgccgcacggggucguguuccuccacgucacguacgugcccgcccaggagaagaacuucaccaccgcccccgccaucugccacgacggcaaggcgcacuucccccgcgaggggguguucgucagcaacggcacccacugguucgugacgcagcggaacuucuacgagccgcagaucaucaccaccgacaacaccuucguguccggcaacugcgacgucgugaucgggaucgugaacaacacggucuacgacccccugcagcccgagcuggacagcuucaaggaggagcucgacaaguacuucaagaaccacaccucccccgacguggaccugggcgacaucagcgggaucaacgccuccguggucaacauccagaaggagaucgaccgccugaacgagguggccaagaaccucaacgagagccugaucgaccugcaggagcucggcaaguacgagcaguacaucaaguggccgugguacaucuggcugggcuucaucgccgggcugaucgccaucgugauggucaccaucaugcucugcugcaugaccuccugcugcagcugccugaagggcugcugcuccugcgggagcugcugcaaguucgacgaggacgacuccgagcccgugcugaagggcgugaagcuccacuacacgugaggacuaguuauaagacugacuagcccgaugggccucccaacgggcccuccuccccuccuugcaccgagauuaauagaucucaaaggcucuuuucagagccaccaaaaaaaaaaaaaaaaaaaaaaaaaaaaaaaaaaaaaaaaaaaaaaaaaaaaaaaaaaaaaaaaaaaaaaaaaaaaaaaaaaaaaaaaaaaaaaaaaaaaa

SEQ ID NO: 24318 - RNA, 4035 nt, Artificial Sequence
  SARS-CoV-2/Wuhan/WIV05/2019__EPI_ISL_402128 spike protein mRNA gc (1-1273)(H69del_V70del_Y453F_D614G_I692V_M1229I)
aggagaaagcuuaccauguucguguuccugguccuccugccccuggugagcucccagugcgugaaccucaccacccgcacgcagcugccgcccgccuacaccaacagcuucacccggggcgucuacuaccccgacaagguguuccgcuccagcgugcugcacuccacccaggaccucuuccugcccuucuucagcaacgucacgugguuccacgccaucuccgggaccaacggcaccaagcgguucgacaacccggugcugcccuucaacgacgggguguacuucgcgagcaccgagaaguccaacaucauccgcggcuggaucuucgggacgacccucgacagcaagacccagucccugcugaucgucaacaacgccaccaacguggugaucaaggucugcgaguuccaguucugcaacgaccccuuccucggcguguacuaccacaagaacaacaagagcuggauggaguccgaguuccggguguacagcuccgccaacaacugcacguucgaguacgucagccagcccuuccugauggaccuggagggcaagcaggggaacuucaagaaccuccgcgaguucguguucaagaacaucgacggcuacuucaagaucuacuccaagcacaccccgaucaaccuggugcgggaccugccccagggguucagcgcccucgagccccuggucgaccugcccaucggcaucaacaucacccgcuuccagacccuccuggcccugcaccgguccuaccucacgccgggggacagcagcuccggcuggaccgcgggcgccgccgccuacuacgugggguaccugcagccccgcaccuuccugcucaaguacaacgagaacggcaccaucacggacgcgguggacugcgcccuggacccccugagcgagaccaagugcacccucaaguccuucaccgucgagaaggggaucuaccagacgagcaacuuccgggugcagcccaccgaguccaucgugcgcuucccgaacaucaccaaccugugccccuucggcgaggucuucaacgccacccgguucgccagcguguacgccuggaaccgcaagcggaucuccaacugcgucgcggacuacagcgugcuguacaacuccgccagcuucuccacguucaagugcuacggcgugagccccaccaagcucaacgaccugugcuucaccaacgucuacgccgacuccuucgugauccgcggggacgaggugcggcagaucgcccccggccagaccgggaagaucgccgacuacaacuacaagcugccggacgacuucacgggcugcgucaucgcguggaacagcaacaaccucgacuccaaggucgggggcaacuacaacuaccuguuccgccuguuccgcaagagcaaccucaagcccuucgagcgggacaucuccaccgagaucuaccaggccggcagcacccccugcaacgggguggagggcuucaacugcuacuucccccugcaguccuacggguuccagccgaccaacggcgugggguaccagcccuaccggguggugguccugagcuucgagcuccugcacgcccccgccacggugugcggccccaagaaguccaccaaccuggugaagaacaagugcgucaacuucaacuucaacggccucaccgggaccggcgugcugaccgagagcaacaagaaguuccugccguuccagcaguucgggcgcgacaucgccgacacgaccgacgcggugcgcgacccccagacccuggagauccucgacaucacccccugcagcuucggcggggucuccgugaucacgccgggcaccaacaccagcaaccagguggccguccuguaccagggcgugaacugcaccgaggugcccgucgccauccacgccgaccagcugacgcccaccuggcggguguacuccaccgggagcaacguguuccagacccgcgccggcugccucaucggggcggagcacgucaacaacuccuacgagugcgacauccccaucggcgccggcaucugcgccagcuaccagacgcagaccaacuccccgcggcgcgcccggagcguggcgucccagagcgugaucgccuacaccaugucccugggggccgagaacagcgucgccuacuccaacaacagcaucgccauccccaccaacuucacgaucuccgugaccaccgagauccugcccgugagcaugaccaagacgagcgucgacugcaccauguacaucugcggcgacuccaccgagugcagcaaccuccugcugcaguacggguccuucugcacccagcucaaccgcgcgcugacgggcaucgccguggagcaggacaagaacacccaggagguguucgcccaggucaagcagaucuacaagacgcccccgaucaaggacuucgggggcuucaacuucagccagauccugcccgaccccuccaagcccagcaagcgguccuucaucgaggaccuccuguucaacaaggugacccuggccgacgccggcuucaucaagcaguacggggacugccucggcgacaucgcggcccgcgaccugaucugcgcccagaaguucaacgggcugaccgugcucccgccccugcugaccgacgagaugaucgcccaguacaccagcgcccuccuggcgggcaccaucacguccggguggaccuucggcgccggcgccgcccugcagauccccuucgcgaugcagauggccuaccgguucaacgggaucggcgucacccagaacgugcucuacgagaaccagaagcugaucgccaaccaguucaacagcgccaucgggaagauccaggacucccugagcuccaccgccagcgcgcucggcaagcugcaggacguggucaaccagaacgcccaggcccugaacacgcucgugaagcagcuguccagcaacuucggggccaucuccagcgugcugaacgacauccucucccgccuggacaaggucgaggccgaggugcagaucgaccggcugaucaccggccgccuccagagccugcagaccuacgugacccagcagcugauccgggcggccgagauccgcgccagcgccaaccucgccgcgaccaagauguccgagugcguccugggccagagcaagcggguggacuucugcgggaagggcuaccaccugauguccuucccccagagcgccccgcacgggguggucuuccuccacgugacguacguccccgcccaggagaagaacuucaccaccgcccccgcgaucugccacgacggcaaggcccacuucccccgcgaggggguguucguguccaacggcacccacugguucgucacgcagcggaacuucuacgagccgcagaucaucaccaccgacaacaccuucgugagcggcaacugcgacguggucaucgggaucgugaacaacacgguguacgacccccugcagcccgagcuggacuccuucaaggaggagcucgacaaguacuucaagaaccacaccagccccgacgucgaccugggcgacaucuccgggaucaacgccagcguggugaacauccagaaggagaucgaccgccugaacgaggucgccaagaaccucaacgagucccugaucgaccugcaggagcucggcaaguacgagcaguacaucaaguggccgugguacaucuggcugggcuucaucgccgggcugaucgcgaucgugaucgugaccaucaugcucugcugcaugaccagcugcugcuccugccugaagggcugcugcagcugcggguccugcugcaaguucgacgaggacgacagcgagcccguccugaagggcgugaagcuccacuacacgugaggacuaguuauaagacugacuagcccgaugggccucccaacgggcccuccuccccuccuugcaccgagauuaauagaucucaaaggcucuuuucagagccaccaaaaaaaaaaaaaaaaaaaaaaaaaaaaaaaaaaaaaaaaaaaaaaaaaaaaaaaaaaaaaaaaaaaaaaaaaaaaaaaaaaaaaaaaaaaaaaaaaaaaa

SEQ ID NO: 24319 - RNA, 4032 nt, Artificial Sequence
  SARS-CoV-2/Wuhan/WIV05/2019__EPI_ISL_402128 spike protein mRNA gc (1-1273)(H69del_V70del_Y144del_N501Y_A570D_D614G_P681H_T716I_S982 A_D1118H)
aggagaaagcuuaccauguucguguuccugguccuccugccccuggugagcucccagugcgugaaccucaccacccgcacgcagcugccgcccgccuacaccaacagcuucacccggggcgucuacuaccccgacaagguguuccgcuccagcgugcugcacuccacccaggaccucuuccugcccuucuucagcaacgucacgugguuccacgccaucuccgggaccaacggcaccaagcgguucgacaacccggugcugcccuucaacgacgggguguacuucgcgagcaccgagaaguccaacaucauccgcggcuggaucuucgggacgacccucgacagcaagacccagucccugcugaucgucaacaacgccaccaacguggugaucaaggucugcgaguuccaguucugcaacgaccccuuccucggcguguaccacaagaacaacaagagcuggauggaguccgaguuccggguguacagcuccgccaacaacugcacguucgaguacgucagccagcccuuccugauggaccuggagggcaagcaggggaacuucaagaaccuccgcgaguucguguucaagaacaucgacggcuacuucaagaucuacuccaagcacaccccgaucaaccuggugcgggaccugccccagggguucagcgcccucgagccccuggucgaccugcccaucggcaucaacaucacccgcuuccagacccuccuggcccugcaccgguccuaccucacgccgggggacagcagcuccggcuggaccgcgggcgccgccgccuacuacgugggguaccugcagccccgcaccuuccugcucaaguacaacgagaacggcaccaucacggacgcgguggacugcgcccuggacccccugagcgagaccaagugcacccucaaguccuucaccgucgagaaggggaucuaccagacgagcaacuuccgggugcagcccaccgaguccaucgugcgcuucccgaacaucaccaaccugugccccuucggcgaggucuucaacgccacccgguucgccagcguguacgccuggaaccgcaagcggaucuccaacugcgucgcggacuacagcgugcuguacaacuccgccagcuucuccacguucaagugcuacggcgugagccccaccaagcucaacgaccugugcuucaccaacgucuacgccgacuccuucgugauccgcggggacgaggugcggcagaucgcccccggccagaccgggaagaucgccgacuacaacuacaagcugccggacgacuucacgggcugcgucaucgcguggaacagcaacaaccucgacuccaaggucgggggcaacuacaacuaccuguaccgccuguuccgcaagagcaaccucaagcccuucgagcgggacaucuccaccgagaucuaccaggccggcagcacccccugcaacgggguggagggcuucaacugcuacuucccccugcaguccuacggguuccagccgaccuacggcgugggguaccagcccuaccggguggugguccugagcuucgagcuccugcacgcccccgccacggugugcggccccaagaaguccaccaaccuggugaagaacaagugcgucaacuucaacuucaacggccucaccgggaccggcgugcugaccgagagcaacaagaaguuccugccguuccagcaguucgggcgcgacaucgacgacacgaccgacgccgugcgcgacccccagacccuggagauccucgacaucacccccugcagcuucggcggggucuccgugaucacgccgggcaccaacaccagcaaccagguggcgguccuguaccagggcgugaacugcaccgaggugcccgucgccauccacgccgaccagcugacgcccaccuggcggguguacuccaccgggagcaacguguuccagacccgcgccggcugccucaucggggccgagcacgucaacaacuccuacgagugcgacauccccaucggcgcgggcaucugcgccagcuaccagacgcagaccaacucccaccggcgcgcccggagcguggccucccagagcaucaucgcguacaccaugucccugggggccgagaacagcguggccuacuccaacaacagcaucgccaucccgaucaacuucaccaucuccgucacgaccgagauccugcccgugagcaugaccaagaccagcguggacugcacgauguacaucugcggcgacuccaccgagugcagcaaccuccugcugcaguacggguccuucugcacccagcucaaccgcgcccugaccggcaucgcggucgagcaggacaagaacacgcaggagguguucgcccaggugaagcagaucuacaagaccccgcccaucaaggacuucgggggcuucaacuucagccagauccugcccgaccccuccaagcccagcaagcgguccuucaucgaggaccuccuguucaacaaggucacccuggccgacgccggcuucaucaagcaguacggggacugccucggcgacaucgccgcgcgcgaccugaucugcgcccagaaguucaacgggcugaccgugcugcccccgcuccugacggacgagaugaucgcccaguacaccagcgcccuccuggccggcaccaucaccuccggguggacguucggcgcgggcgccgcccugcagauccccuucgccaugcagauggcguaccgguucaacgggaucggcgugacccagaacguccucuacgagaaccagaagcugaucgccaaccaguucaacagcgccaucgggaagauccaggacucccugagcuccaccgccagcgcccucggcaagcugcaggacguggugaaccagaacgcgcaggcccugaacacccucgucaagcagcuguccagcaacuucggggccaucuccagcgugcugaacgacauccucgcccgccuggacaagguggaggccgagguccagaucgaccggcugaucacgggccgccuccagucccugcagaccuacgugacccagcagcugauccgggcggccgagauccgcgccagcgccaaccucgccgcgaccaagaugagcgagugcgugcugggccaguccaagcgggucgacuucugcgggaagggcuaccaccugaugagcuucccccaguccgcgccccacggggugguguuccuccacgucaccuacgugccggcccaggagaagaacuucacgaccgcccccgccaucugccacgacggcaaggcccacuucccccgcgagggggucuucgugagcaacggcacccacugguucgugacccagcggaacuucuacgagccccagaucaucacgacccacaacaccuucgucuccggcaacugcgacguggugaucgggaucgucaacaacaccguguacgacccgcugcagcccgagcuggacagcuucaaggaggagcucgacaaguacuucaagaaccacacgucccccgacguggaccugggcgacaucagcgggaucaacgccuccgucgugaacauccagaaggagaucgaccgccugaacgagguggccaagaaccucaacgagagccugaucgaccugcaggagcucggcaaguacgagcaguacaucaaguggcccugguacaucuggcugggcuucaucgccgggcugaucgcgaucgucauggugaccaucaugcucugcugcaugaccuccugcugcagcugccugaagggcugcugcuccugcgggagcugcugcaaguucgacgaggacgacuccgagccggugcugaagggcgucaagcuccacuacaccugaggacuaguuauaagacugacuagcccgaugggccucccaacgggcccuccuccccuccuugcaccgagauuaauagaucucaaaggcucuuuucagagccaccaaaaaaaaaaaaaaaaaaaaaaaaaaaaaaaaaaaaaaaaaaaaaaaaaaaaaaaaaaaaaaaaaaaaaaaaaaaaaaaaaaaaaaaaaaaaaaaaaaaaa

SEQ ID NO: 24320 - RNA, 4041 nt, Artificial Sequence
  SARS-CoV-2/Wuhan/WIV05/2019__EPI_ISL_402128 spike protein mRNA gc (1-1273)(K417N_E484K_N501Y_D614G)
aggagaaagcuuaccauguucguguuccugguccuccugccccuggugagcucccagugcgugaaccucaccacccgcacgcagcugccgcccgccuacaccaacagcuucacccggggcgucuacuaccccgacaagguguuccgcuccagcgugcugcacuccacccaggaccucuuccugcccuucuucagcaacgucacgugguuccacgccauccacguguccgggaccaacggcaccaagcgguucgacaacccggugcugcccuucaacgacggggucuacuucgcgagcaccgagaaguccaacaucauccgcggcuggaucuucgggacgacccucgacagcaagacccagucccugcugaucgugaacaacgccaccaacguggucaucaaggugugcgaguuccaguucugcaacgaccccuuccucggcguguacuaccacaagaacaacaagagcuggauggaguccgaguuccgggucuacagcuccgccaacaacugcacguucgaguacgugagccagcccuuccugauggaccuggagggcaagcaggggaacuucaagaaccuccgcgaguucguguucaagaacaucgacggcuacuucaagaucuacuccaagcacaccccgaucaaccugguccgggaccugccccagggguucagcgcccucgagccccugguggaccugcccaucggcaucaacaucacccgcuuccagacccuccuggcccugcaccgguccuaccucacgccgggggacagcagcuccggcuggaccgcgggcgccgccgccuacuacgugggguaccugcagccccgcaccuuccugcucaaguacaacgagaacggcaccaucacggacgcggucgacugcgcccuggacccccugagcgagaccaagugcacccucaaguccuucaccguggagaaggggaucuaccagacgagcaacuuccgggugcagcccaccgaguccaucguccgcuucccgaacaucaccaaccugugccccuucggcgagguguucaacgccacccgguucgccagcgucuacgccuggaaccgcaagcggaucuccaacugcguggcggacuacagcgugcuguacaacuccgccagcuucuccacguucaagugcuacggcgucagccccaccaagcucaacgaccugugcuucaccaacguguacgccgacuccuucgugauccgcggggacgagguccggcagaucgcccccggccagaccgggaacaucgccgacuacaacuacaagcugccggacgacuucacgggcugcgugaucgcguggaacagcaacaaccucgacuccaaggucgggggcaacuacaacuaccuguaccgccuguuccgcaagagcaaccucaagcccuucgagcgggacaucuccaccgagaucuaccaggccggcagcacccccugcaacggggugaagggcuucaacugcuacuucccccugcaguccuacggguuccagccgaccuacggcgugggguaccagcccuaccggguggucgugcugagcuucgagcuccugcacgcccccgccacggugugcggccccaagaaguccaccaaccuggucaagaacaagugcgugaacuucaacuucaacggccucaccgggaccggcgugcugaccgagagcaacaagaaguuccugccguuccagcaguucgggcgcgacaucgccgacacgaccgacgcgguccgcgacccccagacccuggagauccucgacaucacccccugcagcuucggcgggguguccgugaucacgccgggcaccaacaccagcaaccaggucgccgugcuguaccagggcgugaacugcaccgagguccccguggccauccacgccgaccagcugacgcccaccuggcggguguacuccaccgggagcaacgucuuccagacccgcgccggcugccucaucggggcggagcacgugaacaacuccuacgagugcgacauccccaucggcgccggcaucugcgccagcuaccagacgcagaccaacuccccgcggcgcgcccggagcguggcgucccagagcaucaucgccuacaccaugucccugggggccgagaacagcgucgccuacuccaacaacagcaucgccauccccaccaacuucacgaucuccgugaccaccgagauccugcccgugagcaugaccaagacgagcgucgacugcaccauguacaucugcggcgacuccaccgagugcagcaaccuccugcugcaguacggguccuucugcacccagcucaaccgcgcgcugacgggcaucgccguggagcaggacaagaacacccaggagguguucgcccaggucaagcagaucuacaagacgcccccgaucaaggacuucgggggcuucaacuucagccagauccugcccgaccccuccaagcccagcaagcgguccuucaucgaggaccuccuguucaacaaggugacccuggccgacgccggcuucaucaagcaguacggggacugccucggcgacaucgcggcccgcgaccugaucugcgcccagaaguucaacgggcugaccgugcucccgccccugcugaccgacgagaugaucgcccaguacaccagcgcccuccuggcgggcaccaucacguccggguggaccuucggcgccggcgccgcccugcagauccccuucgcgaugcagauggccuaccgguucaacgggaucggcgucacccagaacgugcucuacgagaaccagaagcugaucgccaaccaguucaacagcgccaucgggaagauccaggacucccugagcuccaccgccagcgcgcucggcaagcugcaggacguggucaaccagaacgcccaggcccugaacacgcucgugaagcagcuguccagcaacuucggggccaucuccagcgugcugaacgacauccucucccgccuggacaaggucgaggccgaggugcagaucgaccggcugaucaccggccgccuccagagccugcagaccuacgugacccagcagcugauccgggcggccgagauccgcgccagcgccaaccucgccgcgaccaagauguccgagugcguccugggccagagcaagcggguggacuucugcgggaagggcuaccaccugauguccuucccccagagcgccccgcacgggguggucuuccuccacgugacguacguccccgcccaggagaagaacuucaccaccgcccccgcgaucugccacgacggcaaggcccacuucccccgcgaggggguguucguguccaacggcacccacugguucgucacgcagcggaacuucuacgagccgcagaucaucaccaccgacaacaccuucgugagcggcaacugcgacguggucaucgggaucgugaacaacacgguguacgacccccugcagcccgagcuggacuccuucaaggaggagcucgacaaguacuucaagaaccacaccagccccgacgucgaccugggcgacaucuccgggaucaacgccagcguggugaacauccagaaggagaucgaccgccugaacgaggucgccaagaaccucaacgagucccugaucgaccugcaggagcucggcaaguacgagcaguacaucaaguggccgugguacaucuggcugggcuucaucgccgggcugaucgcgaucgugauggugaccaucaugcucugcugcaugaccagcugcugcuccugccugaagggcugcugcagcugcggguccugcugcaaguucgacgaggacgacagcgagcccguccugaagggcgugaagcuccacuacacgugaggacuaguuauaagacugacuagcccgaugggccucccaacgggcccuccuccccuccuugcaccgagauuaauagaucucaaaggcucuuuucagagccaccaaaaaaaaaaaaaaaaaaaaaaaaaaaaaaaaaaaaaaaaaaaaaaaaaaaaaaaaaaaaaaaaaaaaaaaaaaaaaaaaaaaaaaaaaaaaaaaaaaaaa

SEQ ID NO: 24321 - RNA, 4032 nt, Artificial Sequence
  SARS-CoV-2/Wuhan/WIV05/2019__EPI_ISL_402128 spike protein mRNA gc (1-1273)(L18F_D80A_D215G_L242del_A243del_L244del_R246I_K417N_E484 K_N501Y_D614G_A701V)
aggagaaagcuuaccauguucguguuccugguccuccugccccuggugagcucccagugcgugaacuucaccacccgcacgcagcucccgcccgccuacaccaacagcuucacccggggcgucuacuaccccgacaagguguuccgcuccagcgugcugcacuccacccaggaccuguuccuccccuucuucagcaacgucacgugguuccacgccauccacguguccgggaccaacggcaccaagcgguucgcgaacccggugcugcccuucaacgacggggucuacuucgccagcaccgagaaguccaacaucauccgcggcuggaucuucgggacgacccuggacagcaagacccagucccuccugaucgugaacaacgccaccaacguggucaucaaggugugcgaguuccaguucugcaacgaccccuuccugggcguguacuaccacaagaacaacaagagcuggauggaguccgaguuccgggucuacagcuccgccaacaacugcacguucgaguacgugagccagcccuuccucauggaccuggagggcaagcaggggaacuucaagaaccugcgcgaguucguguucaagaacaucgacggcuacuucaagaucuacuccaagcacaccccgaucaaccucguccgggggcugccccagggcuucagcgcccuggagccccucguggaccugcccaucgggaucaacaucacccgcuuccagacccugcacaucuccuaccucacgccgggcgacagcagcuccggcuggaccgcgggggccgccgccuacuacgugggcuaccugcagccccggaccuuccugcucaaguacaacgagaacgggaccaucacggacgcggucgacugcgcccuggacccccugagcgagaccaagugcacccucaaguccuucaccguggagaagggcaucuaccagacgagcaacuuccgcgugcagcccaccgaguccaucguccgguucccgaacaucaccaaccugugccccuucggcgagguguucaacgccacccgcuucgccagcgucuacgccuggaaccggaagcgcaucuccaacugcguggcggacuacagcgugcuguacaacuccgccagcuucuccacguucaagugcuacggggucagccccaccaagcucaacgaccugugcuucaccaacguguacgccgacuccuucgugauccggggcgacgagguccgccagaucgcccccgggcagaccggcaacaucgccgacuacaacuacaagcugccggacgacuucacggggugcgugaucgcguggaacagcaacaaccucgacuccaaggugggcggcaacuacaacuaccuguaccggcuguuccgcaagagcaaccucaagcccuucgagcgggacaucuccaccgagaucuaccaggccgggagcacccccugcaacggcgucaagggguucaacugcuacuucccccugcaguccuacggcuuccagccgaccuacggggugggcuaccagcccuaccgcguggucgugcugagcuucgagcuccugcacgcccccgccacggugugcggccccaagaaguccaccaaccuggucaagaacaagugcgugaacuucaacuucaacgggcucaccggcaccggggugcugaccgagagcaacaagaaguuccugccguuccagcaguucggccgggacaucgccgacacgaccgacgcgguccgcgacccccagacccucgagauccuggacaucacccccugcagcuucgggggcguguccgugaucacgccgggcaccaacaccagcaaccaggucgccgugcuguaccagggggugaacugcaccgagguccccguggccauccacgccgaccagcugacgcccaccuggcgcguguacuccaccggcagcaacgucuuccagacccgggccgggugccucaucggcgcggagcacgugaacaacuccuacgagugcgacauccccaucggcgccgggaucugcgccagcuaccagacgcagaccaacuccccgcgccgggcccgcagcguggcgucccagagcaucaucgccuacaccaugucccugggcgucgagaacagcguggccuacuccaacaacagcaucgccauccccaccaacuucacgaucuccgugaccaccgagauccugcccgucagcaugaccaagacgagcguggacugcaccauguacaucugcggggacuccaccgagugcagcaaccuccugcugcaguacggcuccuucugcacccagcucaaccgggcccugacggggaucgcgguggagcaggacaagaacacccaggaggucuucgcccaggugaagcagaucuacaagacgcccccgaucaaggacuucggcggcuucaacuucagccagauccugcccgaccccuccaagcccagcaagcgcuccuucaucgaggaccuccuguucaacaaggugacccuggccgacgccggguucaucaagcaguacggcgacugccucggggacaucgccgcgcgggaccugaucugcgcccagaaguucaacggccugaccguccucccgccccugcugaccgacgagaugaucgcccaguacaccagcgcccuccuggccgggaccaucacguccggcuggaccuucggcgcgggggccgcccugcagauccccuucgccaugcagauggcguaccgcuucaacggcaucggggugacccagaacgugcucuacgagaaccagaagcugaucgccaaccaguucaacagcgccaucggcaagauccaggacucccugagcuccaccgccagcgcccucgggaagcugcaggacgucgugaaccagaacgcgcaggcccugaacacgcucgugaagcagcuguccagcaacuucggcgccaucuccagcguccugaacgacauccucucccggcuggacaagguggaggccgaggugcagaucgaccgccugaucaccggccggcuccagagccugcagaccuacgucacccagcagcugauccgcgccgcggagauccgggccagcgccaaccucgccgccaccaagauguccgagugcgugcuggggcagagcaagcgcguggacuucugcggcaagggguaccaccugauguccuucccccagagcgcgccgcacggcgucguguuccuccacgucacguacgugcccgcccaggagaagaacuucaccaccgcccccgccaucugccacgacgggaaggcgcacuucccccgggagggcguguucgucuccaacggcacccacugguucgugacgcagcgcaacuucuacgagccgcagaucaucaccaccgacaacaccuucgugagcgggaacugcgacgucgugaucggcaucgugaacaacacggucuacgacccccugcagcccgagcuggacuccuucaaggaggagcucgacaaguacuucaagaaccacaccagccccgacguggaccugggggacaucuccggcaucaacgccagcguggucaacauccagaaggagaucgaccggcugaacgagguggccaagaaccucaacgagucccugaucgaccugcaggagcucggcaaguacgagcaguacaucaaguggccgugguacaucuggcugggguucaucgccggccugaucgccaucgugauggucaccaucaugcucugcugcaugaccagcugcugcuccugccugaaggggugcugcagcugcggcuccugcugcaaguucgacgaggacgacagcgagcccgugcugaagggggugaagcuccacuacacgugaggacuaguuauaagacugacuagcccgaugggccucccaacgggcccuccuccccuccuugcaccgagauuaauagaucucaaaggcucuuuucagagccaccaaaaaaaaaaaaaaaaaaaaaaaaaaaaaaaaaaaaaaaaaaaaaaaaaaaaaaaaaaaaaaaaaaaaaaaaaaaaaaaaaaaaaaaaaaaaaaaaaaaaa

SEQ ID NO: 24322 - RNA, 4041 nt, Artificial Sequence
  SARS-CoV-2/Wuhan/WIV05/2019__EPI_ISL_402128 spike protein mRNA gc (1-1273)(E484K_D614G)
aggagaaagcuuaccauguucguguuccugguccuccugccccuggugagcucccagugcgugaaccucaccacccgcacgcagcugccgcccgccuacaccaacagcuucacccggggcgucuacuaccccgacaagguguuccgcuccagcgugcugcacuccacccaggaccucuuccugcccuucuucagcaacgucacgugguuccacgccauccacguguccgggaccaacggcaccaagcgguucgacaacccggugcugcccuucaacgacggggucuacuucgcgagcaccgagaaguccaacaucauccgcggcuggaucuucgggacgacccucgacagcaagacccagucccugcugaucgugaacaacgccaccaacguggucaucaaggugugcgaguuccaguucugcaacgaccccuuccucggcguguacuaccacaagaacaacaagagcuggauggaguccgaguuccgggucuacagcuccgccaacaacugcacguucgaguacgugagccagcccuuccugauggaccuggagggcaagcaggggaacuucaagaaccuccgcgaguucguguucaagaacaucgacggcuacuucaagaucuacuccaagcacaccccgaucaaccugguccgggaccugccccagggguucagcgcccucgagccccugguggaccugcccaucggcaucaacaucacccgcuuccagacccuccuggcccugcaccgguccuaccucacgccgggggacagcagcuccggcuggaccgcgggcgccgccgccuacuacgugggguaccugcagccccgcaccuuccugcucaaguacaacgagaacggcaccaucacggacgcggucgacugcgcccuggacccccugagcgagaccaagugcacccucaaguccuucaccguggagaaggggaucuaccagacgagcaacuuccgggugcagcccaccgaguccaucguccgcuucccgaacaucaccaaccugugccccuucggcgagguguucaacgccacccgguucgccagcgucuacgccuggaaccgcaagcggaucuccaacugcguggcggacuacagcgugcuguacaacuccgccagcuucuccacguucaagugcuacggcgucagccccaccaagcucaacgaccugugcuucaccaacguguacgccgacuccuucgugauccgcggggacgagguccggcagaucgcccccggccagaccgggaagaucgccgacuacaacuacaagcugccggacgacuucacgggcugcgugaucgcguggaacagcaacaaccucgacuccaaggucgggggcaacuacaacuaccuguaccgccuguuccgcaagagcaaccucaagcccuucgagcgggacaucuccaccgagaucuaccaggccggcagcacccccugcaacggggugaagggcuucaacugcuacuucccccugcaguccuacggguuccagccgaccaacggcgugggguaccagcccuaccggguggucgugcugagcuucgagcuccugcacgcccccgccacggugugcggccccaagaaguccaccaaccuggucaagaacaagugcgugaacuucaacuucaacggccucaccgggaccggcgugcugaccgagagcaacaagaaguuccugccguuccagcaguucgggcgcgacaucgccgacacgaccgacgcgguccgcgacccccagacccuggagauccucgacaucacccccugcagcuucggcgggguguccgugaucacgccgggcaccaacaccagcaaccaggucgccgugcuguaccagggcgugaacugcaccgagguccccguggccauccacgccgaccagcugacgcccaccuggcggguguacuccaccgggagcaacgucuuccagacccgcgccggcugccucaucggggcggagcacgugaacaacuccuacgagugcgacauccccaucggcgccggcaucugcgccagcuaccagacgcagaccaacuccccgcggcgcgcccggagcguggcgucccagagcaucaucgccuacaccaugucccugggggccgagaacagcgucgccuacuccaacaacagcaucgccauccccaccaacuucacgaucuccgugaccaccgagauccugcccgugagcaugaccaagacgagcgucgacugcaccauguacaucugcggcgacuccaccgagugcagcaaccuccugcugcaguacggguccuucugcacccagcucaaccgcgcgcugacgggcaucgccguggagcaggacaagaacacccaggagguguucgcccaggucaagcagaucuacaagacgcccccgaucaaggacuucgggggcuucaacuucagccagauccugcccgaccccuccaagcccagcaagcgguccuucaucgaggaccuccuguucaacaaggugacccuggccgacgccggcuucaucaagcaguacggggacugccucggcgacaucgcggcccgcgaccugaucugcgcccagaaguucaacgggcugaccgugcucccgccccugcugaccgacgagaugaucgcccaguacaccagcgcccuccuggcgggcaccaucacguccggguggaccuucggcgccggcgccgcccugcagauccccuucgcgaugcagauggccuaccgguucaacgggaucggcgucacccagaacgugcucuacgagaaccagaagcugaucgccaaccaguucaacagcgccaucgggaagauccaggacucccugagcuccaccgccagcgcgcucggcaagcugcaggacguggucaaccagaacgcccaggcccugaacacgcucgugaagcagcuguccagcaacuucggggccaucuccagcgugcugaacgacauccucucccgccuggacaaggucgaggccgaggugcagaucgaccggcugaucaccggccgccuccagagccugcagaccuacgugacccagcagcugauccgggcggccgagauccgcgccagcgccaaccucgccgcgaccaagauguccgagugcguccugggccagagcaagcggguggacuucugcgggaagggcuaccaccugauguccuucccccagagcgccccgcacgggguggucuuccuccacgugacguacguccccgcccaggagaagaacuucaccaccgcccccgcgaucugccacgacggcaaggcccacuucccccgcgaggggguguucguguccaacggcacccacugguucgucacgcagcggaacuucuacgagccgcagaucaucaccaccgacaacaccuucgugagcggcaacugcgacguggucaucgggaucgugaacaacacgguguacgacccccugcagcccgagcuggacuccuucaaggaggagcucgacaaguacuucaagaaccacaccagccccgacgucgaccugggcgacaucuccgggaucaacgccagcguggugaacauccagaaggagaucgaccgccugaacgaggucgccaagaaccucaacgagucccugaucgaccugcaggagcucggcaaguacgagcaguacaucaaguggccgugguacaucuggcugggcuucaucgccgggcugaucgcgaucgugauggugaccaucaugcucugcugcaugaccagcugcugcuccugccugaagggcugcugcagcugcggguccugcugcaaguucgacgaggacgacagcgagcccguccugaagggcgugaagcuccacuacacgugaggacuaguuauaagacugacuagcccgaugggccucccaacgggcccuccuccccuccuugcaccgagauuaauagaucucaaaggcucuuuucagagccaccaaaaaaaaaaaaaaaaaaaaaaaaaaaaaaaaaaaaaaaaaaaaaaaaaaaaaaaaaaaaaaaaaaaaaaaaaaaaaaaaaaaaaaaaaaaaaaaaaaaaa

SEQ ID NO: 24323 - RNA, 4041 nt, Artificial Sequence
  SARS-CoV-2/Wuhan/WIV05/2019__EPI_ISL_402128 spike protein mRNA gc (1-1273)(L18F_T20N_P26S_D138Y_R190S_K417T_E484K_N501Y_D614G_H655Y _T1027I)
aggagaaagcuuaccauguucguguuccugguccuccugccccuggugagcucccagugcgugaacuucaccaaccgcacccagcucccgagcgccuacacgaacuccuucacccggggcgucuacuaccccgacaagguguuccgcagcuccgugcugcacagcacccaggaccuguuccuccccuucuucuccaacgucaccugguuccacgccauccacgugagcgggacgaacggcaccaagcgguucgacaaccccgugcugccguucaacgacggggucuacuucgcguccaccgagaaguccaacaucauccgcggcuggaucuucgggaccacgcuggacuccaagacccagagccuccugaucgugaacaacgccaccaacguggucaucaaggugugcgaguuccaguucugcaacuaccccuuccugggcguguacuaccacaagaacaacaaguccuggauggagagcgaguuccgggucuacuccagcgccaacaacugcaccuucgaguacgugucccagcccuuccucauggaccuggagggcaagcaggggaacuucaagaaccugagcgaguucguguucaagaacaucgacggcuacuucaagaucuacuccaagcacacgcccaucaaccucguccgcgaccugccgcagggguucagcgcccuggagccccucguggaccugcccaucggcaucaacaucacccgguuccagacccugcucgcccugcaccgcagcuaccugacccccggggacuccagcuccggcuggacggcgggcgccgccgccuacuacgugggguaccuccagccgcggaccuuccugcugaaguacaacgagaacggcaccaucaccgacgcggucgacugcgcccucgacccccugagcgagacgaagugcacccugaaguccuucaccguggagaaggggaucuaccagaccagcaacuuccgcgugcagcccacggaguccaucguccgguuccccaacaucaccaaccucugcccguucggcgagguguucaacgccacccgcuucgccagcgucuacgccuggaaccggaagcgcaucuccaacugcguggcggacuacagcgugcuguacaacuccgccagcuucuccaccuucaagugcuacggcgucagccccacgaagcugaacgaccucugcuucaccaacguguacgccgacuccuucgugauccgcggggacgagguccggcagaucgcccccggccagaccgggaccaucgccgacuacaacuacaagcugcccgacgacuucacgggcugcgugaucgcguggaacagcaacaaccuggacuccaaggucgggggcaacuacaacuaccucuaccggcuguuccgcaagagcaaccugaagccguucgagcgggacaucuccaccgagaucuaccaggccggcagcacccccugcaacggggugaagggcuucaacugcuacuucccccuccagagcuacggguuccagcccaccuacggcgugggguaccagccguaccgcguggucgugcuguccuucgagcugcuccacgcccccgccacggugugcggccccaagaaguccaccaaccuggucaagaacaagugcgugaacuucaacuucaacggccugaccgggaccggcgugcucaccgagagcaacaagaaguuccugcccuuccagcaguucgggcgggacaucgccgacacgaccgacgcgguccgcgacccgcagacccuggagauccuggacaucacccccugcagcuucggcgggguguccgugaucacgcccggcaccaacaccagcaaccaggucgccgugcucuaccagggcgugaacugcaccgaggucccgguggccauccacgccgaccagcugacgcccaccuggcgcguguacuccaccgggagcaacgucuuccagacccgggccggcugccugaucggggcggaguacgugaacaacuccuacgagugcgacauccccaucggcgccggcaucugcgccagcuaccagacgcagaccaacagcccccgccgggcccgcagcguggcgucccagagcaucaucgccuacaccaugucccucggggccgagaacagcgucgccuacuccaacaacagcaucgccaucccgaccaacuucacgaucagcgugaccaccgagauccugcccguguccaugaccaagacgagcgucgacugcaccauguacaucugcggcgacuccaccgagugcagcaaccugcuccugcaguacggguccuucugcacccagcugaaccgggcgcucacgggcaucgccguggagcaggacaagaacacccaggagguguucgcccaggucaagcagaucuacaagaccccgcccaucaaggacuucgggggcuucaacuucagccagauccugcccgaccccuccaagcccagcaagcgcuccuucaucgaggaccuccuguucaacaaggugacccuggccgacgccggcuucaucaagcaguacggggacugccugggcgacaucgcggcccgggaccucaucugcgcccagaaguucaacgggcugacggugcugcccccgcuccugaccgacgagaugaucgcccaguacaccagcgcccugcucgcgggcaccaucacguccggguggaccuucggcgccggcgccgcccugcagauccccuucgcgaugcagauggccuaccgcuucaacgggaucggcgucacccagaacgugcuguacgagaaccagaagcucaucgccaaccaguucaacagcgccaucgggaagauccaggacucccugagcuccaccgccagcgcgcugggcaagcuccaggacguggucaaccagaacgcccaggcccugaacacgcuggugaagcagcucuccagcaacuucggggccaucuccagcgugcugaacgacauccugagccggcucgacaaggucgaggccgaggugcagaucgaccgccugaucaccggccggcugcagucccuccagaccuacgugacccagcagcugauccgcgcggccgagauccgggccagcgccaaccuggccgcgaucaagauguccgagugcguccucggccagagcaagcgcguggacuucugcgggaagggcuaccaccugauguccuucccccagagcgcgccccacgggguggucuuccugcacgugaccuacgucccggcccaggagaagaacuucacgaccgcccccgccaucugccacgacggcaaggcccacuucccccgggaggggguguucguguccaacggcacccacugguucgucacccagcgcaacuucuacgagccccagaucaucacgaccgacaacaccuucgugagcggcaacugcgacguggucaucgggaucgugaacaacaccguguacgacccgcuccagcccgagcuggacuccuucaaggaggagcuggacaaguacuucaagaaccacacgagccccgacgucgaccucggcgacaucuccgggaucaacgccagcguggugaacauccagaaggagaucgaccggcugaacgaggucgccaagaaccugaacgagucccucaucgaccugcaggagcugggcaaguacgagcaguacaucaaguggcccugguacaucuggcucggcuucaucgccgggcugaucgcgaucgugauggugaccaucaugcugugcugcaugaccagcugcugcuccugccucaagggcugcugcagcugcggguccugcugcaaguucgacgaggacgacagcgagccgguccugaagggcgugaagcugcacuacaccugaggacuaguuauaagacugacuagcccgaugggccucccaacgggcccuccuccccuccuugcaccgagauuaauagaucucaaaggcucuuuucagagccaccaaaaaaaaaaaaaaaaaaaaaaaaaaaaaaaaaaaaaaaaaaaaaaaaaaaaaaaaaaaaaaaaaaaaaaaaaaaaaaaaaaaaaaaaaaaaaaaaaaaaa

SEQ ID NO: 24324 - RNA, 4041 nt, Artificial Sequence
  SARS-CoV-2/Wuhan/WIV05/2019__EPI_ISL_402128 spike protein mRNA gc (1-1273)(S13I_W152C_L452R_D614G)
aggagaaagcuuaccauguucguguuccugguccuccugccccuggugagcauccagugcgugaaccucaccacccgcacgcagcugccgcccgccuacaccaacuccuucacccggggcgucuacuaccccgacaagguguuccgcagcuccgugcugcacagcacccaggaccucuuccugcccuucuucuccaacgucacgugguuccacgccauccacgugagcgggaccaacggcaccaagcgguucgacaacccggugcugcccuucaacgacggggucuacuucgcguccaccgagaaguccaacaucauccgcggcuggaucuucgggacgacccucgacagcaagacccagagccugcugaucgugaacaacgccaccaacguggucaucaaggugugcgaguuccaguucugcaacgaccccuuccucggcguguacuaccacaagaacaacaaguccugcauggagagcgaguuccgggucuacuccagcgccaacaacugcacguucgaguacgugucccagcccuuccugauggaccuggagggcaagcaggggaacuucaagaaccuccgcgaguucguguucaagaacaucgacggcuacuucaagaucuacagcaagcacaccccgaucaaccugguccgggaccugccccagggguucuccgcccucgagccccugguggaccugcccaucggcaucaacaucacccgcuuccagacccuccuggcccugcaccggagcuaccucacgccgggggacuccagcagcggcuggaccgcgggcgccgccgccuacuacgugggguaccugcagccccgcaccuuccugcucaaguacaacgagaacggcaccaucacggacgcggucgacugcgcccuggacccccuguccgagaccaagugcacccucaagagcuucaccguggagaaggggaucuaccagacguccaacuuccgggugcagcccaccgagagcaucguccgcuucccgaacaucaccaaccugugccccuucggcgagguguucaacgccacccgguucgccuccgucuacgccuggaaccgcaagcggaucagcaacugcguggcggacuacuccgugcuguacaacagcgccuccuucagcacguucaagugcuacggcgucucccccaccaagcucaacgaccugugcuucaccaacguguacgccgacagcuucgugauccgcggggacgagguccggcagaucgcccccggccagaccgggaagaucgccgacuacaacuacaagcugccggacgacuucacgggcugcgugaucgcguggaacuccaacaaccucgacagcaaggucgggggcaacuacaacuaccgcuaccggcuguuccgcaaguccaaccugaagcccuucgagcgggacaucagcaccgagaucuaccaggccggcuccacccccugcaacgggguggagggcuucaacugcuacuucccccuccagagcuacggguuccagccgaccaacggcgugggguaccagcccuaccgcguggucgugcuguccuucgagcugcuccacgcccccgccacggugugcggccccaagaaguccaccaaccuggucaagaacaagugcgugaacuucaacuucaacggccugaccgggaccggcgugcucaccgagagcaacaagaaguuccugccguuccagcaguucgggcgcgacaucgccgacacgaccgacgcgguccgggacccccagacccuggagauccuggacaucacccccugcagcuucggcggggugagcgugaucacgccgggcaccaacaccuccaaccaggucgccgugcucuaccagggcgugaacugcaccgagguccccguggccauccacgccgaccagcugacgcccaccuggcgcguguacagcaccggguccaacgucuuccagacccgggccggcugccugaucggggcggagcacgugaacaacagcuacgagugcgacauccccaucggcgccggcaucugcgccuccuaccagacgcagaccaacagcccgcgccgggcccgcuccguggcgagccaguccaucaucgccuacaccaugagccucggggccgagaacuccgucgccuacagcaacaacuccaucgccauccccaccaacuucacgaucagcgugaccaccgagauccugcccguguccaugaccaagacgagcgucgacugcaccauguacaucugcggcgacagcaccgagugcuccaaccugcuccugcaguacgggagcuucugcacccagcugaaccgggcgcucacgggcaucgccguggagcaggacaagaacacccaggagguguucgcccaggucaagcagaucuacaagacgcccccgaucaaggacuucgggggcuucaacuucucccagauccugcccgaccccagcaagcccuccaagcgcagcuucaucgaggaccuccuguucaacaaggugacccuggccgacgccggcuucaucaagcaguacggggacugccugggcgacaucgcggcccgggaccucaucugcgcccagaaguucaacgggcugaccgugcugccgccccuccugaccgacgagaugaucgcccaguacaccuccgcccugcucgcgggcaccaucacgagcggguggaccuucggcgccggcgccgcccugcagauccccuucgcgaugcagauggccuaccgcuucaacgggaucggcgucacccagaacgugcuguacgagaaccagaagcucaucgccaaccaguucaacuccgccaucgggaagauccaggacagccuguccagcaccgccuccgcgcugggcaagcuccaggacguggucaaccagaacgcccaggcccugaacacgcuggugaagcagcucagcuccaacuucggggccaucagcuccgugcugaacgacauccugagccggcucgacaaggucgaggccgaggugcagaucgaccgccugaucaccggccggcugcagucccuccagaccuacgugacccagcagcugauccgcgcggccgagauccgggccagcgccaaccuggccgcgaccaagaugagcgagugcguccucggccaguccaagcgcguggacuucugcgggaagggcuaccaccugaugagcuucccccaguccgccccgcacgggguggucuuccugcacgugacguacguccccgcccaggagaagaacuucaccaccgcccccgcgaucugccacgacggcaaggcccacuucccccgggaggggguguucgugagcaacggcacccacugguucgucacgcagcgcaacuucuacgagccgcagaucaucaccaccgacaacaccuucguguccggcaacugcgacguggucaucgggaucgugaacaacacgguguacgacccccuccagcccgagcuggacagcuucaaggaggagcuggacaaguacuucaagaaccacaccucccccgacgucgaccucggcgacaucagcgggaucaacgccuccguggugaacauccagaaggagaucgaccggcugaacgaggucgccaagaaccugaacgagagccucaucgaccugcaggagcugggcaaguacgagcaguacaucaaguggccgugguacaucuggcucggcuucaucgccgggcugaucgcgaucgugauggugaccaucaugcugugcugcaugaccuccugcugcagcugccucaagggcugcugcuccugcgggagcugcugcaaguucgacgaggacgacuccgagcccguccugaagggcgugaagcugcacuacacgugaggacuaguuauaagacugacuagcccgaugggccucccaacgggcccuccuccccuccuugcaccgagauuaauagaucucaaaggcucuuuucagagccaccaaaaaaaaaaaaaaaaaaaaaaaaaaaaaaaaaaaaaaaaaaaaaaaaaaaaaaaaaaaaaaaaaaaaaaaaaaaaaaaaaaaaaaaaaaaaaaaaaaaaa

SEQ ID NO: 24325 - RNA, 4041 nt, Artificial Sequence
  SARS-CoV-2/Wuhan/WIV05/2019__EPI_ISL_402128 spike protein mRNA gc (1-1273)
aggagaaagcuuaccauguucguguuccuggugcugcugccccuggugagcagccagugcgugaaccugaccacccggacccagcugccaccagccuacaccaacagcuucacccggggcgucuacuaccccgacaagguguuccggagcagcguccugcacagcacccaggaccuguuccugcccuucuucagcaacgugaccugguuccacgccauccacgugagcggcaccaacggcaccaagcgguucgacaaccccgugcugcccuucaacgacggcguguacuucgccagcaccgagaagagcaacaucauccggggcuggaucuucggcaccacccuggacagcaagacccagagccugcugaucgugaauaacgccaccaacguggugaucaaggugugcgaguuccaguucugcaacgaccccuuccugggcguguacuaccacaagaacaacaagagcuggauggagagcgaguuccggguguacagcagcgccaacaacugcaccuucgaguacgugagccagcccuuccugauggaccuggagggcaagcagggcaacuucaagaaccugcgggaguucguguucaagaacaucgacggcuacuucaagaucuacagcaagcacaccccaaucaaccuggugcgggaucugccccagggcuucucagcccuggagccccugguggaccugcccaucggcaucaacaucacccgguuccagacccugcuggcccugcaccggagcuaccugaccccaggcgacagcagcagcggguggacagcaggcgcggcugcuuacuacgugggcuaccugcagccccggaccuuccugcugaaguacaacgagaacggcaccaucaccgacgccguggacugcgcccuggacccucugagcgagaccaagugcacccugaagagcuucaccguggagaagggcaucuaccagaccagcaacuuccgggugcagcccaccgagagcaucgugcgguuccccaacaucaccaaccugugccccuucggcgagguguucaacgccacccgguucgccagcguguacgccuggaaccggaagcggaucagcaacugcguggccgacuacagcgugcuguacaacagcgccagcuucagcaccuucaagugcuacggcgugagccccaccaagcugaacgaccugugcuucaccaacguguacgccgacagcuucgugauccguggcgacgaggugcggcagaucgcacccggccagacaggcaagaucgccgacuacaacuacaagcugcccgacgacuucaccggcugcgugaucgccuggaacagcaacaaccucgacagcaaggugggcggcaacuacaacuaccuguaccggcuguuccggaagagcaaccugaagcccuucgagcgggacaucagcaccgagaucuaccaagccggcuccaccccuugcaacggcguggagggcuucaacugcuacuucccucugcagagcuacggcuuccagcccaccaacggcgugggcuaccagcccuaccgggugguggugcugagcuucgagcugcugcacgccccagccaccguguguggccccaagaagagcaccaaccuggugaagaacaagugcgugaacuucaacuucaacggccuuaccggcaccggcgugcugaccgagagcaacaagaaauuccugcccuuucagcaguucggccgggacaucgccgacaccaccgacgcugugcgggauccccagacccuggagauccuggacaucaccccuugcagcuucggcggcgugagcgugaucaccccaggcaccaacaccagcaaccagguggccgugcuguaccaggacgugaacugcaccgaggugcccguggccauccacgccgaccagcugacacccaccuggcgggucuacagcaccggcagcaacguguuccagacccgggccgguugccugaucggcgccgagcacgugaacaacagcuacgagugcgacauccccaucggcgccggcaucugugccagcuaccagacccagaccaauucaccccggagggcaaggagcguggccagccagagcaucaucgccuacaccaugagccugggcgccgagaacagcguggccuacagcaacaacagcaucgccauccccaccaacuucaccaucagcgugaccaccgagauucugcccgugagcaugaccaagaccagcguggacugcaccauguacaucugcggcgacagcaccgagugcagcaaccugcugcugcaguacggcagcuucugcacccagcugaaccgggcccugaccggcaucgccguggagcaggacaagaacacccaggagguguucgcccaggugaagcagaucuacaagaccccucccaucaaggacuucggcggcuucaacuucagccagauccugcccgaccccagcaagcccagcaagcggagcuucaucgaggaccugcuguucaacaaggugacccuagccgacgccggcuucaucaagcaguacggcgacugccucggcgacauagccgcccgggaccugaucugcgcccagaaguucaacggccugaccgugcugccuccccugcugaccgacgagaugaucgcccaguacaccagcgcccuguuagccggaaccaucaccagcggcuggacuuucggcgcuggagccgcucugcagauccccuucgccaugcagauggccuaccgguucaacggcaucggcgugacccagaacgugcuguacgagaaccagaagcugaucgccaaccaguucaacagcgccaucggcaagauccaggacagccugagcagcaccgcuagcgcccugggcaagcugcaggacguggugaaccagaacgcccaggcccugaacacccuggugaagcagcugagcagcaacuucggcgccaucagcagcgugcugaacgacauccugagccggcuggacaaggucgaggccgaggugcagaucgaccggcugaucacuggccggcugcagagccugcagaccuacgugacccagcagcugauccgggccgccgagauucgggccagcgccaaccuggccgccaccaagaugagcgagugcgugcugggccagagcaagcggguggacuucugcggcaagggcuaccaccugaugagcuuuccccagagcgcaccccacggagugguguuccugcacgugaccuacgugcccgcccaggagaagaacuucaccaccgccccagccaucugccacgacggcaaggcccacuuuccccgggagggcguguucgugagcaacggcacccacugguucgugacccagcggaacuucuacgagccccagaucaucaccaccgacaacaccuucgugagcggcaacugcgacguggugaucggcaucgugaacaacaccguguacgauccccugcagcccgagcuggacagcuucaaggaggagcuggacaaguacuucaagaaucacaccagccccgacguggaccugggcgacaucagcggcaucaacgccagcguggugaacauccagaaggagaucgaucggcugaacgagguggccaagaaccugaacgagagccugaucgaccugcaggagcugggcaaguacgagcaguacaucaaguggcccugguacaucuggcugggcuucaucgccggccugaucgccaucgugauggugaccaucaugcugugcugcaugaccagcugcugcagcugccugaagggcuguugcagcugcggcagcugcugcaaguucgacgaggacgacagcgagcccgugcugaagggcgugaagcugcacuacaccugaggacuaguuauaagacugacuagcccgaugggccucccaacgggcccuccuccccuccuugcaccgagauuaauagaucucaaaggcucuuuucagagccaccaaaaaaaaaaaaaaaaaaaaaaaaaaaaaaaaaaaaaaaaaaaaaaaaaaaaaaaaaaaaaaaaaaaaaaaaaaaaaaaaaaaaaaaaaaaaaaaaaaaaa

SEQ ID NO: 24326 - RNA, 4041 nt, Artificial Sequence
  SARS-CoV-2/Wuhan/WIV05/2019__EPI_ISL_402128 spike protein mRNA gc (1-1273)(D614G)
aggagaaagcuuaccauguucguguuccuggugcugcugccccuggugagcagccagugcgugaaccugaccacccggacccagcugccaccagccuacaccaacagcuucacccggggcgucuacuaccccgacaagguguuccggagcagcguccugcacagcacccaggaccuguuccugcccuucuucagcaacgugaccugguuccacgccauccacgugagcggcaccaacggcaccaagcgguucgacaaccccgugcugcccuucaacgacggcguguacuucgccagcaccgagaagagcaacaucauccggggcuggaucuucggcaccacccuggacagcaagacccagagccugcugaucgugaauaacgccaccaacguggugaucaaggugugcgaguuccaguucugcaacgaccccuuccugggcguguacuaccacaagaacaacaagagcuggauggagagcgaguuccggguguacagcagcgccaacaacugcaccuucgaguacgugagccagcccuuccugauggaccuggagggcaagcagggcaacuucaagaaccugcgggaguucguguucaagaacaucgacggcuacuucaagaucuacagcaagcacaccccaaucaaccuggugcgggaucugccccagggcuucucagcccuggagccccugguggaccugcccaucggcaucaacaucacccgguuccagacccugcuggcccugcaccggagcuaccugaccccaggcgacagcagcagcggguggacagcaggcgcggcugcuuacuacgugggcuaccugcagccccggaccuuccugcugaaguacaacgagaacggcaccaucaccgacgccguggacugcgcccuggacccucugagcgagaccaagugcacccugaagagcuucaccguggagaagggcaucuaccagaccagcaacuuccgggugcagcccaccgagagcaucgugcgguuccccaacaucaccaaccugugccccuucggcgagguguucaacgccacccgguucgccagcguguacgccuggaaccggaagcggaucagcaacugcguggccgacuacagcgugcuguacaacagcgccagcuucagcaccuucaagugcuacggcgugagccccaccaagcugaacgaccugugcuucaccaacguguacgccgacagcuucgugauccguggcgacgaggugcggcagaucgcacccggccagacaggcaagaucgccgacuacaacuacaagcugcccgacgacuucaccggcugcgugaucgccuggaacagcaacaaccucgacagcaaggugggcggcaacuacaacuaccuguaccggcuguuccggaagagcaaccugaagcccuucgagcgggacaucagcaccgagaucuaccaagccggcuccaccccuugcaacggcguggagggcuucaacugcuacuucccucugcagagcuacggcuuccagcccaccaacggcgugggcuaccagcccuaccgggugguggugcugagcuucgagcugcugcacgccccagccaccguguguggccccaagaagagcaccaaccuggugaagaacaagugcgugaacuucaacuucaacggccuuaccggcaccggcgugcugaccgagagcaacaagaaauuccugcccuuucagcaguucggccgggacaucgccgacaccaccgacgcugugcgggauccccagacccuggagauccuggacaucaccccuugcagcuucggcggcgugagcgugaucaccccaggcaccaacaccagcaaccagguggccgugcuguaccagggcgugaacugcaccgaggugcccguggccauccacgccgaccagcugacacccaccuggcgggucuacagcaccggcagcaacguguuccagacccgggccgguugccugaucggcgccgagcacgugaacaacagcuacgagugcgacauccccaucggcgccggcaucugugccagcuaccagacccagaccaauucaccccggagggcaaggagcguggccagccagagcaucaucgccuacaccaugagccugggcgccgagaacagcguggccuacagcaacaacagcaucgccauccccaccaacuucaccaucagcgugaccaccgagauucugcccgugagcaugaccaagaccagcguggacugcaccauguacaucugcggcgacagcaccgagugcagcaaccugcugcugcaguacggcagcuucugcacccagcugaaccgggcccugaccggcaucgccguggagcaggacaagaacacccaggagguguucgcccaggugaagcagaucuacaagaccccucccaucaaggacuucggcggcuucaacuucagccagauccugcccgaccccagcaagcccagcaagcggagcuucaucgaggaccugcuguucaacaaggugacccuagccgacgccggcuucaucaagcaguacggcgacugccucggcgacauagccgcccgggaccugaucugcgcccagaaguucaacggccugaccgugcugccuccccugcugaccgacgagaugaucgcccaguacaccagcgcccuguuagccggaaccaucaccagcggcuggacuuucggcgcuggagccgcucugcagauccccuucgccaugcagauggccuaccgguucaacggcaucggcgugacccagaacgugcuguacgagaaccagaagcugaucgccaaccaguucaacagcgccaucggcaagauccaggacagccugagcagcaccgcuagcgcccugggcaagcugcaggacguggugaaccagaacgcccaggcccugaacacccuggugaagcagcugagcagcaacuucggcgccaucagcagcgugcugaacgacauccugagccggcuggacaaggucgaggccgaggugcagaucgaccggcugaucacuggccggcugcagagccugcagaccuacgugacccagcagcugauccgggccgccgagauucgggccagcgccaaccuggccgccaccaagaugagcgagugcgugcugggccagagcaagcggguggacuucugcggcaagggcuaccaccugaugagcuuuccccagagcgcaccccacggagugguguuccugcacgugaccuacgugcccgcccaggagaagaacuucaccaccgccccagccaucugccacgacggcaaggcccacuuuccccgggagggcguguucgugagcaacggcacccacugguucgugacccagcggaacuucuacgagccccagaucaucaccaccgacaacaccuucgugagcggcaacugcgacguggugaucggcaucgugaacaacaccguguacgauccccugcagcccgagcuggacagcuucaaggaggagcuggacaaguacuucaagaaucacaccagccccgacguggaccugggcgacaucagcggcaucaacgccagcguggugaacauccagaaggagaucgaucggcugaacgagguggccaagaaccugaacgagagccugaucgaccugcaggagcugggcaaguacgagcaguacaucaaguggcccugguacaucuggcugggcuucaucgccggccugaucgccaucgugauggugaccaucaugcugugcugcaugaccagcugcugcagcugccugaagggcuguugcagcugcggcagcugcugcaaguucgacgaggacgacagcgagcccgugcugaagggcgugaagcugcacuacaccugaggacuaguuauaagacugacuagcccgaugggccucccaacgggcccuccuccccuccuugcaccgagauuaauagaucucaaaggcucuuuucagagccaccaaaaaaaaaaaaaaaaaaaaaaaaaaaaaaaaaaaaaaaaaaaaaaaaaaaaaaaaaaaaaaaaaaaaaaaaaaaaaaaaaaaaaaaaaaaaaaaaaaaaa

SEQ ID NO: 24327 - RNA, 4041 nt, Artificial Sequence
  SARS-CoV-2/Wuhan/WIV05/2019__EPI_ISL_402128 spike protein mRNA gc (1-1273)(A222V_D614G)
aggagaaagcuuaccauguucguguuccuggugcugcugccccuggugagcagccagugcgugaaccugaccacccggacccagcugccaccagccuacaccaacagcuucacccggggcgucuacuaccccgacaagguguuccggagcagcguccugcacagcacccaggaccuguuccugcccuucuucagcaacgugaccugguuccacgccauccacgugagcggcaccaacggcaccaagcgguucgacaaccccgugcugcccuucaacgacggcguguacuucgccagcaccgagaagagcaacaucauccggggcuggaucuucggcaccacccuggacagcaagacccagagccugcugaucgugaauaacgccaccaacguggugaucaaggugugcgaguuccaguucugcaacgaccccuuccugggcguguacuaccacaagaacaacaagagcuggauggagagcgaguuccggguguacagcagcgccaacaacugcaccuucgaguacgugagccagcccuuccugauggaccuggagggcaagcagggcaacuucaagaaccugcgggaguucguguucaagaacaucgacggcuacuucaagaucuacagcaagcacaccccaaucaaccuggugcgggaucugccccagggcuucucagugcuggagccccugguggaccugcccaucggcaucaacaucacccgguuccagacccugcuggcccugcaccggagcuaccugaccccaggcgacagcagcagcggguggacagcaggcgcggcugcuuacuacgugggcuaccugcagccccggaccuuccugcugaaguacaacgagaacggcaccaucaccgacgccguggacugcgcccuggacccucugagcgagaccaagugcacccugaagagcuucaccguggagaagggcaucuaccagaccagcaacuuccgggugcagcccaccgagagcaucgugcgguuccccaacaucaccaaccugugccccuucggcgagguguucaacgccacccgguucgccagcguguacgccuggaaccggaagcggaucagcaacugcguggccgacuacagcgugcuguacaacagcgccagcuucagcaccuucaagugcuacggcgugagccccaccaagcugaacgaccugugcuucaccaacguguacgccgacagcuucgugauccguggcgacgaggugcggcagaucgcacccggccagacaggcaagaucgccgacuacaacuacaagcugcccgacgacuucaccggcugcgugaucgccuggaacagcaacaaccucgacagcaaggugggcggcaacuacaacuaccuguaccggcuguuccggaagagcaaccugaagcccuucgagcgggacaucagcaccgagaucuaccaagccggcuccaccccuugcaacggcguggagggcuucaacugcuacuucccucugcagagcuacggcuuccagcccaccaacggcgugggcuaccagcccuaccgggugguggugcugagcuucgagcugcugcacgccccagccaccguguguggccccaagaagagcaccaaccuggugaagaacaagugcgugaacuucaacuucaacggccuuaccggcaccggcgugcugaccgagagcaacaagaaauuccugcccuuucagcaguucggccgggacaucgccgacaccaccgacgcugugcgggauccccagacccuggagauccuggacaucaccccuugcagcuucggcggcgugagcgugaucaccccaggcaccaacaccagcaaccagguggccgugcuguaccagggcgugaacugcaccgaggugcccguggccauccacgccgaccagcugacacccaccuggcgggucuacagcaccggcagcaacguguuccagacccgggccgguugccugaucggcgccgagcacgugaacaacagcuacgagugcgacauccccaucggcgccggcaucugugccagcuaccagacccagaccaauucaccccggagggcaaggagcguggccagccagagcaucaucgccuacaccaugagccugggcgccgagaacagcguggccuacagcaacaacagcaucgccauccccaccaacuucaccaucagcgugaccaccgagauucugcccgugagcaugaccaagaccagcguggacugcaccauguacaucugcggcgacagcaccgagugcagcaaccugcugcugcaguacggcagcuucugcacccagcugaaccgggcccugaccggcaucgccguggagcaggacaagaacacccaggagguguucgcccaggugaagcagaucuacaagaccccucccaucaaggacuucggcggcuucaacuucagccagauccugcccgaccccagcaagcccagcaagcggagcuucaucgaggaccugcuguucaacaaggugacccuagccgacgccggcuucaucaagcaguacggcgacugccucggcgacauagccgcccgggaccugaucugcgcccagaaguucaacggccugaccgugcugccuccccugcugaccgacgagaugaucgcccaguacaccagcgcccuguuagccggaaccaucaccagcggcuggacuuucggcgcuggagccgcucugcagauccccuucgccaugcagauggccuaccgguucaacggcaucggcgugacccagaacgugcuguacgagaaccagaagcugaucgccaaccaguucaacagcgccaucggcaagauccaggacagccugagcagcaccgcuagcgcccugggcaagcugcaggacguggugaaccagaacgcccaggcccugaacacccuggugaagcagcugagcagcaacuucggcgccaucagcagcgugcugaacgacauccugagccggcuggacaaggucgaggccgaggugcagaucgaccggcugaucacuggccggcugcagagccugcagaccuacgugacccagcagcugauccgggccgccgagauucgggccagcgccaaccuggccgccaccaagaugagcgagugcgugcugggccagagcaagcggguggacuucugcggcaagggcuaccaccugaugagcuuuccccagagcgcaccccacggagugguguuccugcacgugaccuacgugcccgcccaggagaagaacuucaccaccgccccagccaucugccacgacggcaaggcccacuuuccccgggagggcguguucgugagcaacggcacccacugguucgugacccagcggaacuucuacgagccccagaucaucaccaccgacaacaccuucgugagcggcaacugcgacguggugaucggcaucgugaacaacaccguguacgauccccugcagcccgagcuggacagcuucaaggaggagcuggacaaguacuucaagaaucacaccagccccgacguggaccugggcgacaucagcggcaucaacgccagcguggugaacauccagaaggagaucgaucggcugaacgagguggccaagaaccugaacgagagccugaucgaccugcaggagcugggcaaguacgagcaguacaucaaguggcccugguacaucuggcugggcuucaucgccggccugaucgccaucgugauggugaccaucaugcugugcugcaugaccagcugcugcagcugccugaagggcuguugcagcugcggcagcugcugcaaguucgacgaggacgacagcgagcccgugcugaagggcgugaagcugcacuacaccugaggacuaguuauaagacugacuagcccgaugggccucccaacgggcccuccuccccuccuugcaccgagauuaauagaucucaaaggcucuuuucagagccaccaaaaaaaaaaaaaaaaaaaaaaaaaaaaaaaaaaaaaaaaaaaaaaaaaaaaaaaaaaaaaaaaaaaaaaaaaaaaaaaaaaaaaaaaaaaaaaaaaaaaa

SEQ ID NO: 24328 - RNA, 4041 nt, Artificial Sequence
  SARS-CoV-2/Wuhan/WIV05/2019__EPI_ISL_402128 spike protein mRNA gc (1-1273)(N439K_D614G)
aggagaaagcuuaccauguucguguuccuggugcugcugccccuggugagcagccagugcgugaaccugaccacccggacccagcugccaccagccuacaccaacagcuucacccggggcgucuacuaccccgacaagguguuccggagcagcguccugcacagcacccaggaccuguuccugcccuucuucagcaacgugaccugguuccacgccauccacgugagcggcaccaacggcaccaagcgguucgacaaccccgugcugcccuucaacgacggcguguacuucgccagcaccgagaagagcaacaucauccggggcuggaucuucggcaccacccuggacagcaagacccagagccugcugaucgugaauaacgccaccaacguggugaucaaggugugcgaguuccaguucugcaacgaccccuuccugggcguguacuaccacaagaacaacaagagcuggauggagagcgaguuccggguguacagcagcgccaacaacugcaccuucgaguacgugagccagcccuuccugauggaccuggagggcaagcagggcaacuucaagaaccugcgggaguucguguucaagaacaucgacggcuacuucaagaucuacagcaagcacaccccaaucaaccuggugcgggaucugccccagggcuucucagcccuggagccccugguggaccugcccaucggcaucaacaucacccgguuccagacccugcuggcccugcaccggagcuaccugaccccaggcgacagcagcagcggguggacagcaggcgcggcugcuuacuacgugggcuaccugcagccccggaccuuccugcugaaguacaacgagaacggcaccaucaccgacgccguggacugcgcccuggacccucugagcgagaccaagugcacccugaagagcuucaccguggagaagggcaucuaccagaccagcaacuuccgggugcagcccaccgagagcaucgugcgguuccccaacaucaccaaccugugccccuucggcgagguguucaacgccacccgguucgccagcguguacgccuggaaccggaagcggaucagcaacugcguggccgacuacagcgugcuguacaacagcgccagcuucagcaccuucaagugcuacggcgugagccccaccaagcugaacgaccugugcuucaccaacguguacgccgacagcuucgugauccguggcgacgaggugcggcagaucgcacccggccagacaggcaagaucgccgacuacaacuacaagcugcccgacgacuucaccggcugcgugaucgccuggaacagcaagaaccucgacagcaaggugggcggcaacuacaacuaccuguaccggcuguuccggaagagcaaccugaagcccuucgagcgggacaucagcaccgagaucuaccaagccggcuccaccccuugcaacggcguggagggcuucaacugcuacuucccucugcagagcuacggcuuccagcccaccaacggcgugggcuaccagcccuaccgggugguggugcugagcuucgagcugcugcacgccccagccaccguguguggccccaagaagagcaccaaccuggugaagaacaagugcgugaacuucaacuucaacggccuuaccggcaccggcgugcugaccgagagcaacaagaaauuccugcccuuucagcaguucggccgggacaucgccgacaccaccgacgcugugcgggauccccagacccuggagauccuggacaucaccccuugcagcuucggcggcgugagcgugaucaccccaggcaccaacaccagcaaccagguggccgugcuguaccagggcgugaacugcaccgaggugcccguggccauccacgccgaccagcugacacccaccuggcgggucuacagcaccggcagcaacguguuccagacccgggccgguugccugaucggcgccgagcacgugaacaacagcuacgagugcgacauccccaucggcgccggcaucugugccagcuaccagacccagaccaauucaccccggagggcaaggagcguggccagccagagcaucaucgccuacaccaugagccugggcgccgagaacagcguggccuacagcaacaacagcaucgccauccccaccaacuucaccaucagcgugaccaccgagauucugcccgugagcaugaccaagaccagcguggacugcaccauguacaucugcggcgacagcaccgagugcagcaaccugcugcugcaguacggcagcuucugcacccagcugaaccgggcccugaccggcaucgccguggagcaggacaagaacacccaggagguguucgcccaggugaagcagaucuacaagaccccucccaucaaggacuucggcggcuucaacuucagccagauccugcccgaccccagcaagcccagcaagcggagcuucaucgaggaccugcuguucaacaaggugacccuagccgacgccggcuucaucaagcaguacggcgacugccucggcgacauagccgcccgggaccugaucugcgcccagaaguucaacggccugaccgugcugccuccccugcugaccgacgagaugaucgcccaguacaccagcgcccuguuagccggaaccaucaccagcggcuggacuuucggcgcuggagccgcucugcagauccccuucgccaugcagauggccuaccgguucaacggcaucggcgugacccagaacgugcuguacgagaaccagaagcugaucgccaaccaguucaacagcgccaucggcaagauccaggacagccugagcagcaccgcuagcgcccugggcaagcugcaggacguggugaaccagaacgcccaggcccugaacacccuggugaagcagcugagcagcaacuucggcgccaucagcagcgugcugaacgacauccugagccggcuggacaaggucgaggccgaggugcagaucgaccggcugaucacuggccggcugcagagccugcagaccuacgugacccagcagcugauccgggccgccgagauucgggccagcgccaaccuggccgccaccaagaugagcgagugcgugcugggccagagcaagcggguggacuucugcggcaagggcuaccaccugaugagcuuuccccagagcgcaccccacggagugguguuccugcacgugaccuacgugcccgcccaggagaagaacuucaccaccgccccagccaucugccacgacggcaaggcccacuuuccccgggagggcguguucgugagcaacggcacccacugguucgugacccagcggaacuucuacgagccccagaucaucaccaccgacaacaccuucgugagcggcaacugcgacguggugaucggcaucgugaacaacaccguguacgauccccugcagcccgagcuggacagcuucaaggaggagcuggacaaguacuucaagaaucacaccagccccgacguggaccugggcgacaucagcggcaucaacgccagcguggugaacauccagaaggagaucgaucggcugaacgagguggccaagaaccugaacgagagccugaucgaccugcaggagcugggcaaguacgagcaguacaucaaguggcccugguacaucuggcugggcuucaucgccggccugaucgccaucgugauggugaccaucaugcugugcugcaugaccagcugcugcagcugccugaagggcuguugcagcugcggcagcugcugcaaguucgacgaggacgacagcgagcccgugcugaagggcgugaagcugcacuacaccugaggacuaguuauaagacugacuagcccgaugggccucccaacgggcccuccuccccuccuugcaccgagauuaauagaucucaaaggcucuuuucagagccaccaaaaaaaaaaaaaaaaaaaaaaaaaaaaaaaaaaaaaaaaaaaaaaaaaaaaaaaaaaaaaaaaaaaaaaaaaaaaaaaaaaaaaaaaaaaaaaaaaaaaa

SEQ ID NO: 24329 - RNA, 4041 nt, Artificial Sequence
  SARS-CoV-2/Wuhan/WIV05/2019__EPI_ISL_402128 spike protein mRNA gc (1-1273)(S477N_D614G)
aggagaaagcuuaccauguucguguuccuggugcugcugccccuggugagcagccagugcgugaaccugaccacccggacccagcugccaccagccuacaccaacagcuucacccggggcgucuacuaccccgacaagguguuccggagcagcguccugcacagcacccaggaccuguuccugcccuucuucagcaacgugaccugguuccacgccauccacgugagcggcaccaacggcaccaagcgguucgacaaccccgugcugcccuucaacgacggcguguacuucgccagcaccgagaagagcaacaucauccggggcuggaucuucggcaccacccuggacagcaagacccagagccugcugaucgugaauaacgccaccaacguggugaucaaggugugcgaguuccaguucugcaacgaccccuuccugggcguguacuaccacaagaacaacaagagcuggauggagagcgaguuccggguguacagcagcgccaacaacugcaccuucgaguacgugagccagcccuuccugauggaccuggagggcaagcagggcaacuucaagaaccugcgggaguucguguucaagaacaucgacggcuacuucaagaucuacagcaagcacaccccaaucaaccuggugcgggaucugccccagggcuucucagcccuggagccccugguggaccugcccaucggcaucaacaucacccgguuccagacccugcuggcccugcaccggagcuaccugaccccaggcgacagcagcagcggguggacagcaggcgcggcugcuuacuacgugggcuaccugcagccccggaccuuccugcugaaguacaacgagaacggcaccaucaccgacgccguggacugcgcccuggacccucugagcgagaccaagugcacccugaagagcuucaccguggagaagggcaucuaccagaccagcaacuuccgggugcagcccaccgagagcaucgugcgguuccccaacaucaccaaccugugccccuucggcgagguguucaacgccacccgguucgccagcguguacgccuggaaccggaagcggaucagcaacugcguggccgacuacagcgugcuguacaacagcgccagcuucagcaccuucaagugcuacggcgugagccccaccaagcugaacgaccugugcuucaccaacguguacgccgacagcuucgugauccguggcgacgaggugcggcagaucgcacccggccagacaggcaagaucgccgacuacaacuacaagcugcccgacgacuucaccggcugcgugaucgccuggaacagcaacaaccucgacagcaaggugggcggcaacuacaacuaccuguaccggcuguuccggaagagcaaccugaagcccuucgagcgggacaucagcaccgagaucuaccaagccggcaacaccccuugcaacggcguggagggcuucaacugcuacuucccucugcagagcuacggcuuccagcccaccaacggcgugggcuaccagcccuaccgggugguggugcugagcuucgagcugcugcacgccccagccaccguguguggccccaagaagagcaccaaccuggugaagaacaagugcgugaacuucaacuucaacggccuuaccggcaccggcgugcugaccgagagcaacaagaaauuccugcccuuucagcaguucggccgggacaucgccgacaccaccgacgcugugcgggauccccagacccuggagauccuggacaucaccccuugcagcuucggcggcgugagcgugaucaccccaggcaccaacaccagcaaccagguggccgugcuguaccagggcgugaacugcaccgaggugcccguggccauccacgccgaccagcugacacccaccuggcgggucuacagcaccggcagcaacguguuccagacccgggccgguugccugaucggcgccgagcacgugaacaacagcuacgagugcgacauccccaucggcgccggcaucugugccagcuaccagacccagaccaauucaccccggagggcaaggagcguggccagccagagcaucaucgccuacaccaugagccugggcgccgagaacagcguggccuacagcaacaacagcaucgccauccccaccaacuucaccaucagcgugaccaccgagauucugcccgugagcaugaccaagaccagcguggacugcaccauguacaucugcggcgacagcaccgagugcagcaaccugcugcugcaguacggcagcuucugcacccagcugaaccgggcccugaccggcaucgccguggagcaggacaagaacacccaggagguguucgcccaggugaagcagaucuacaagaccccucccaucaaggacuucggcggcuucaacuucagccagauccugcccgaccccagcaagcccagcaagcggagcuucaucgaggaccugcuguucaacaaggugacccuagccgacgccggcuucaucaagcaguacggcgacugccucggcgacauagccgcccgggaccugaucugcgcccagaaguucaacggccugaccgugcugccuccccugcugaccgacgagaugaucgcccaguacaccagcgcccuguuagccggaaccaucaccagcggcuggacuuucggcgcuggagccgcucugcagauccccuucgccaugcagauggccuaccgguucaacggcaucggcgugacccagaacgugcuguacgagaaccagaagcugaucgccaaccaguucaacagcgccaucggcaagauccaggacagccugagcagcaccgcuagcgcccugggcaagcugcaggacguggugaaccagaacgcccaggcccugaacacccuggugaagcagcugagcagcaacuucggcgccaucagcagcgugcugaacgacauccugagccggcuggacaaggucgaggccgaggugcagaucgaccggcugaucacuggccggcugcagagccugcagaccuacgugacccagcagcugauccgggccgccgagauucgggccagcgccaaccuggccgccaccaagaugagcgagugcgugcugggccagagcaagcggguggacuucugcggcaagggcuaccaccugaugagcuuuccccagagcgcaccccacggagugguguuccugcacgugaccuacgugcccgcccaggagaagaacuucaccaccgccccagccaucugccacgacggcaaggcccacuuuccccgggagggcguguucgugagcaacggcacccacugguucgugacccagcggaacuucuacgagccccagaucaucaccaccgacaacaccuucgugagcggcaacugcgacguggugaucggcaucgugaacaacaccguguacgauccccugcagcccgagcuggacagcuucaaggaggagcuggacaaguacuucaagaaucacaccagccccgacguggaccugggcgacaucagcggcaucaacgccagcguggugaacauccagaaggagaucgaucggcugaacgagguggccaagaaccugaacgagagccugaucgaccugcaggagcugggcaaguacgagcaguacaucaaguggcccugguacaucuggcugggcuucaucgccggccugaucgccaucgugauggugaccaucaugcugugcugcaugaccagcugcugcagcugccugaagggcuguugcagcugcggcagcugcugcaaguucgacgaggacgacagcgagcccgugcugaagggcgugaagcugcacuacaccugaggacuaguuauaagacugacuagcccgaugggccucccaacgggcccuccuccccuccuugcaccgagauuaauagaucucaaaggcucuuuucagagccaccaaaaaaaaaaaaaaaaaaaaaaaaaaaaaaaaaaaaaaaaaaaaaaaaaaaaaaaaaaaaaaaaaaaaaaaaaaaaaaaaaaaaaaaaaaaaaaaaaaaaa

SEQ ID NO: 24330 - RNA, 4041 nt, Artificial Sequence
  SARS-CoV-2/Wuhan/WIV05/2019__EPI_ISL_402128 spike protein mRNA gc (1-1273)(N501Y_D614G)
aggagaaagcuuaccauguucguguuccuggugcugcugccccuggugagcagccagugcgugaaccugaccacccggacccagcugccaccagccuacaccaacagcuucacccggggcgucuacuaccccgacaagguguuccggagcagcguccugcacagcacccaggaccuguuccugcccuucuucagcaacgugaccugguuccacgccauccacgugagcggcaccaacggcaccaagcgguucgacaaccccgugcugcccuucaacgacggcguguacuucgccagcaccgagaagagcaacaucauccggggcuggaucuucggcaccacccuggacagcaagacccagagccugcugaucgugaauaacgccaccaacguggugaucaaggugugcgaguuccaguucugcaacgaccccuuccugggcguguacuaccacaagaacaacaagagcuggauggagagcgaguuccggguguacagcagcgccaacaacugcaccuucgaguacgugagccagcccuuccugauggaccuggagggcaagcagggcaacuucaagaaccugcgggaguucguguucaagaacaucgacggcuacuucaagaucuacagcaagcacaccccaaucaaccuggugcgggaucugccccagggcuucucagcccuggagccccugguggaccugcccaucggcaucaacaucacccgguuccagacccugcuggcccugcaccggagcuaccugaccccaggcgacagcagcagcggguggacagcaggcgcggcugcuuacuacgugggcuaccugcagccccggaccuuccugcugaaguacaacgagaacggcaccaucaccgacgccguggacugcgcccuggacccucugagcgagaccaagugcacccugaagagcuucaccguggagaagggcaucuaccagaccagcaacuuccgggugcagcccaccgagagcaucgugcgguuccccaacaucaccaaccugugccccuucggcgagguguucaacgccacccgguucgccagcguguacgccuggaaccggaagcggaucagcaacugcguggccgacuacagcgugcuguacaacagcgccagcuucagcaccuucaagugcuacggcgugagccccaccaagcugaacgaccugugcuucaccaacguguacgccgacagcuucgugauccguggcgacgaggugcggcagaucgcacccggccagacaggcaagaucgccgacuacaacuacaagcugcccgacgacuucaccggcugcgugaucgccuggaacagcaacaaccucgacagcaaggugggcggcaacuacaacuaccuguaccggcuguuccggaagagcaaccugaagcccuucgagcgggacaucagcaccgagaucuaccaagccggcuccaccccuugcaacggcguggagggcuucaacugcuacuucccucugcagagcuacggcuuccagcccaccuacggcgugggcuaccagcccuaccgggugguggugcugagcuucgagcugcugcacgccccagccaccguguguggccccaagaagagcaccaaccuggugaagaacaagugcgugaacuucaacuucaacggccuuaccggcaccggcgugcugaccgagagcaacaagaaauuccugcccuuucagcaguucggccgggacaucgccgacaccaccgacgcugugcgggauccccagacccuggagauccuggacaucaccccuugcagcuucggcggcgugagcgugaucaccccaggcaccaacaccagcaaccagguggccgugcuguaccagggcgugaacugcaccgaggugcccguggccauccacgccgaccagcugacacccaccuggcgggucuacagcaccggcagcaacguguuccagacccgggccgguugccugaucggcgccgagcacgugaacaacagcuacgagugcgacauccccaucggcgccggcaucugugccagcuaccagacccagaccaauucaccccggagggcaaggagcguggccagccagagcaucaucgccuacaccaugagccugggcgccgagaacagcguggccuacagcaacaacagcaucgccauccccaccaacuucaccaucagcgugaccaccgagauucugcccgugagcaugaccaagaccagcguggacugcaccauguacaucugcggcgacagcaccgagugcagcaaccugcugcugcaguacggcagcuucugcacccagcugaaccgggcccugaccggcaucgccguggagcaggacaagaacacccaggagguguucgcccaggugaagcagaucuacaagaccccucccaucaaggacuucggcggcuucaacuucagccagauccugcccgaccccagcaagcccagcaagcggagcuucaucgaggaccugcuguucaacaaggugacccuagccgacgccggcuucaucaagcaguacggcgacugccucggcgacauagccgcccgggaccugaucugcgcccagaaguucaacggccugaccgugcugccuccccugcugaccgacgagaugaucgcccaguacaccagcgcccuguuagccggaaccaucaccagcggcuggacuuucggcgcuggagccgcucugcagauccccuucgccaugcagauggccuaccgguucaacggcaucggcgugacccagaacgugcuguacgagaaccagaagcugaucgccaaccaguucaacagcgccaucggcaagauccaggacagccugagcagcaccgcuagcgcccugggcaagcugcaggacguggugaaccagaacgcccaggcccugaacacccuggugaagcagcugagcagcaacuucggcgccaucagcagcgugcugaacgacauccugagccggcuggacaaggucgaggccgaggugcagaucgaccggcugaucacuggccggcugcagagccugcagaccuacgugacccagcagcugauccgggccgccgagauucgggccagcgccaaccuggccgccaccaagaugagcgagugcgugcugggccagagcaagcggguggacuucugcggcaagggcuaccaccugaugagcuuuccccagagcgcaccccacggagugguguuccugcacgugaccuacgugcccgcccaggagaagaacuucaccaccgccccagccaucugccacgacggcaaggcccacuuuccccgggagggcguguucgugagcaacggcacccacugguucgugacccagcggaacuucuacgagccccagaucaucaccaccgacaacaccuucgugagcggcaacugcgacguggugaucggcaucgugaacaacaccguguacgauccccugcagcccgagcuggacagcuucaaggaggagcuggacaaguacuucaagaaucacaccagccccgacguggaccugggcgacaucagcggcaucaacgccagcguggugaacauccagaaggagaucgaucggcugaacgagguggccaagaaccugaacgagagccugaucgaccugcaggagcugggcaaguacgagcaguacaucaaguggcccugguacaucuggcugggcuucaucgccggccugaucgccaucgugauggugaccaucaugcugugcugcaugaccagcugcugcagcugccugaagggcuguugcagcugcggcagcugcugcaaguucgacgaggacgacagcgagcccgugcugaagggcgugaagcugcacuacaccugaggacuaguuauaagacugacuagcccgaugggccucccaacgggcccuccuccccuccuugcaccgagauuaauagaucucaaaggcucuuuucagagccaccaaaaaaaaaaaaaaaaaaaaaaaaaaaaaaaaaaaaaaaaaaaaaaaaaaaaaaaaaaaaaaaaaaaaaaaaaaaaaaaaaaaaaaaaaaaaaaaaaaaaa

SEQ ID NO: 24331 - RNA, 4035 nt, Artificial Sequence
  SARS-CoV-2/Wuhan/WIV05/2019__EPI_ISL_402128 spike protein mRNA gc (1-1273)(H69del_V70del_D614G)
aggagaaagcuuaccauguucguguuccuggugcugcugccccuggugagcagccagugcgugaaccugaccacccggacccagcugccaccagccuacaccaacagcuucacccggggcgucuacuaccccgacaagguguuccggagcagcguccugcacagcacccaggaccuguuccugcccuucuucagcaacgugaccugguuccacgccaucagcggcaccaacggcaccaagcgguucgacaaccccgugcugcccuucaacgacggcguguacuucgccagcaccgagaagagcaacaucauccggggcuggaucuucggcaccacccuggacagcaagacccagagccugcugaucgugaauaacgccaccaacguggugaucaaggugugcgaguuccaguucugcaacgaccccuuccugggcguguacuaccacaagaacaacaagagcuggauggagagcgaguuccggguguacagcagcgccaacaacugcaccuucgaguacgugagccagcccuuccugauggaccuggagggcaagcagggcaacuucaagaaccugcgggaguucguguucaagaacaucgacggcuacuucaagaucuacagcaagcacaccccaaucaaccuggugcgggaucugccccagggcuucucagcccuggagccccugguggaccugcccaucggcaucaacaucacccgguuccagacccugcuggcccugcaccggagcuaccugaccccaggcgacagcagcagcggguggacagcaggcgcggcugcuuacuacgugggcuaccugcagccccggaccuuccugcugaaguacaacgagaacggcaccaucaccgacgccguggacugcgcccuggacccucugagcgagaccaagugcacccugaagagcuucaccguggagaagggcaucuaccagaccagcaacuuccgggugcagcccaccgagagcaucgugcgguuccccaacaucaccaaccugugccccuucggcgagguguucaacgccacccgguucgccagcguguacgccuggaaccggaagcggaucagcaacugcguggccgacuacagcgugcuguacaacagcgccagcuucagcaccuucaagugcuacggcgugagccccaccaagcugaacgaccugugcuucaccaacguguacgccgacagcuucgugauccguggcgacgaggugcggcagaucgcacccggccagacaggcaagaucgccgacuacaacuacaagcugcccgacgacuucaccggcugcgugaucgccuggaacagcaacaaccucgacagcaaggugggcggcaacuacaacuaccuguaccggcuguuccggaagagcaaccugaagcccuucgagcgggacaucagcaccgagaucuaccaagccggcuccaccccuugcaacggcguggagggcuucaacugcuacuucccucugcagagcuacggcuuccagcccaccaacggcgugggcuaccagcccuaccgggugguggugcugagcuucgagcugcugcacgccccagccaccguguguggccccaagaagagcaccaaccuggugaagaacaagugcgugaacuucaacuucaacggccuuaccggcaccggcgugcugaccgagagcaacaagaaauuccugcccuuucagcaguucggccgggacaucgccgacaccaccgacgcugugcgggauccccagacccuggagauccuggacaucaccccuugcagcuucggcggcgugagcgugaucaccccaggcaccaacaccagcaaccagguggccgugcuguaccagggcgugaacugcaccgaggugcccguggccauccacgccgaccagcugacacccaccuggcgggucuacagcaccggcagcaacguguuccagacccgggccgguugccugaucggcgccgagcacgugaacaacagcuacgagugcgacauccccaucggcgccggcaucugugccagcuaccagacccagaccaauucaccccggagggcaaggagcguggccagccagagcaucaucgccuacaccaugagccugggcgccgagaacagcguggccuacagcaacaacagcaucgccauccccaccaacuucaccaucagcgugaccaccgagauucugcccgugagcaugaccaagaccagcguggacugcaccauguacaucugcggcgacagcaccgagugcagcaaccugcugcugcaguacggcagcuucugcacccagcugaaccgggcccugaccggcaucgccguggagcaggacaagaacacccaggagguguucgcccaggugaagcagaucuacaagaccccucccaucaaggacuucggcggcuucaacuucagccagauccugcccgaccccagcaagcccagcaagcggagcuucaucgaggaccugcuguucaacaaggugacccuagccgacgccggcuucaucaagcaguacggcgacugccucggcgacauagccgcccgggaccugaucugcgcccagaaguucaacggccugaccgugcugccuccccugcugaccgacgagaugaucgcccaguacaccagcgcccuguuagccggaaccaucaccagcggcuggacuuucggcgcuggagccgcucugcagauccccuucgccaugcagauggccuaccgguucaacggcaucggcgugacccagaacgugcuguacgagaaccagaagcugaucgccaaccaguucaacagcgccaucggcaagauccaggacagccugagcagcaccgcuagcgcccugggcaagcugcaggacguggugaaccagaacgcccaggcccugaacacccuggugaagcagcugagcagcaacuucggcgccaucagcagcgugcugaacgacauccugagccggcuggacaaggucgaggccgaggugcagaucgaccggcugaucacuggccggcugcagagccugcagaccuacgugacccagcagcugauccgggccgccgagauucgggccagcgccaaccuggccgccaccaagaugagcgagugcgugcugggccagagcaagcggguggacuucugcggcaagggcuaccaccugaugagcuuuccccagagcgcaccccacggagugguguuccugcacgugaccuacgugcccgcccaggagaagaacuucaccaccgccccagccaucugccacgacggcaaggcccacuuuccccgggagggcguguucgugagcaacggcacccacugguucgugacccagcggaacuucuacgagccccagaucaucaccaccgacaacaccuucgugagcggcaacugcgacguggugaucggcaucgugaacaacaccguguacgauccccugcagcccgagcuggacagcuucaaggaggagcuggacaaguacuucaagaaucacaccagccccgacguggaccugggcgacaucagcggcaucaacgccagcguggugaacauccagaaggagaucgaucggcugaacgagguggccaagaaccugaacgagagccugaucgaccugcaggagcugggcaaguacgagcaguacaucaaguggcccugguacaucuggcugggcuucaucgccggccugaucgccaucgugauggugaccaucaugcugugcugcaugaccagcugcugcagcugccugaagggcuguugcagcugcggcagcugcugcaaguucgacgaggacgacagcgagcccgugcugaagggcgugaagcugcacuacaccugaggacuaguuauaagacugacuagcccgaugggccucccaacgggcccuccuccccuccuugcaccgagauuaauagaucucaaaggcucuuuucagagccaccaaaaaaaaaaaaaaaaaaaaaaaaaaaaaaaaaaaaaaaaaaaaaaaaaaaaaaaaaaaaaaaaaaaaaaaaaaaaaaaaaaaaaaaaaaaaaaaaaaaaa

SEQ ID NO: 24332 - RNA, 4041 nt, Artificial Sequence
  SARS-CoV-2/Wuhan/WIV05/2019__EPI_ISL_402128 spike protein mRNA gc (1-1273)(Y453F_D614G)
aggagaaagcuuaccauguucguguuccuggugcugcugccccuggugagcagccagugcgugaaccugaccacccggacccagcugccaccagccuacaccaacagcuucacccggggcgucuacuaccccgacaagguguuccggagcagcguccugcacagcacccaggaccuguuccugcccuucuucagcaacgugaccugguuccacgccauccacgugagcggcaccaacggcaccaagcgguucgacaaccccgugcugcccuucaacgacggcguguacuucgccagcaccgagaagagcaacaucauccggggcuggaucuucggcaccacccuggacagcaagacccagagccugcugaucgugaauaacgccaccaacguggugaucaaggugugcgaguuccaguucugcaacgaccccuuccugggcguguacuaccacaagaacaacaagagcuggauggagagcgaguuccggguguacagcagcgccaacaacugcaccuucgaguacgugagccagcccuuccugauggaccuggagggcaagcagggcaacuucaagaaccugcgggaguucguguucaagaacaucgacggcuacuucaagaucuacagcaagcacaccccaaucaaccuggugcgggaucugccccagggcuucucagcccuggagccccugguggaccugcccaucggcaucaacaucacccgguuccagacccugcuggcccugcaccggagcuaccugaccccaggcgacagcagcagcggguggacagcaggcgcggcugcuuacuacgugggcuaccugcagccccggaccuuccugcugaaguacaacgagaacggcaccaucaccgacgccguggacugcgcccuggacccucugagcgagaccaagugcacccugaagagcuucaccguggagaagggcaucuaccagaccagcaacuuccgggugcagcccaccgagagcaucgugcgguuccccaacaucaccaaccugugccccuucggcgagguguucaacgccacccgguucgccagcguguacgccuggaaccggaagcggaucagcaacugcguggccgacuacagcgugcuguacaacagcgccagcuucagcaccuucaagugcuacggcgugagccccaccaagcugaacgaccugugcuucaccaacguguacgccgacagcuucgugauccguggcgacgaggugcggcagaucgcacccggccagacaggcaagaucgccgacuacaacuacaagcugcccgacgacuucaccggcugcgugaucgccuggaacagcaacaaccucgacagcaaggugggcggcaacuacaacuaccuguuccggcuguuccggaagagcaaccugaagcccuucgagcgggacaucagcaccgagaucuaccaagccggcuccaccccuugcaacggcguggagggcuucaacugcuacuucccucugcagagcuacggcuuccagcccaccaacggcgugggcuaccagcccuaccgggugguggugcugagcuucgagcugcugcacgccccagccaccguguguggccccaagaagagcaccaaccuggugaagaacaagugcgugaacuucaacuucaacggccuuaccggcaccggcgugcugaccgagagcaacaagaaauuccugcccuuucagcaguucggccgggacaucgccgacaccaccgacgcugugcgggauccccagacccuggagauccuggacaucaccccuugcagcuucggcggcgugagcgugaucaccccaggcaccaacaccagcaaccagguggccgugcuguaccagggcgugaacugcaccgaggugcccguggccauccacgccgaccagcugacacccaccuggcgggucuacagcaccggcagcaacguguuccagacccgggccgguugccugaucggcgccgagcacgugaacaacagcuacgagugcgacauccccaucggcgccggcaucugugccagcuaccagacccagaccaauucaccccggagggcaaggagcguggccagccagagcaucaucgccuacaccaugagccugggcgccgagaacagcguggccuacagcaacaacagcaucgccauccccaccaacuucaccaucagcgugaccaccgagauucugcccgugagcaugaccaagaccagcguggacugcaccauguacaucugcggcgacagcaccgagugcagcaaccugcugcugcaguacggcagcuucugcacccagcugaaccgggcccugaccggcaucgccguggagcaggacaagaacacccaggagguguucgcccaggugaagcagaucuacaagaccccucccaucaaggacuucggcggcuucaacuucagccagauccugcccgaccccagcaagcccagcaagcggagcuucaucgaggaccugcuguucaacaaggugacccuagccgacgccggcuucaucaagcaguacggcgacugccucggcgacauagccgcccgggaccugaucugcgcccagaaguucaacggccugaccgugcugccuccccugcugaccgacgagaugaucgcccaguacaccagcgcccuguuagccggaaccaucaccagcggcuggacuuucggcgcuggagccgcucugcagauccccuucgccaugcagauggccuaccgguucaacggcaucggcgugacccagaacgugcuguacgagaaccagaagcugaucgccaaccaguucaacagcgccaucggcaagauccaggacagccugagcagcaccgcuagcgcccugggcaagcugcaggacguggugaaccagaacgcccaggcccugaacacccuggugaagcagcugagcagcaacuucggcgccaucagcagcgugcugaacgacauccugagccggcuggacaaggucgaggccgaggugcagaucgaccggcugaucacuggccggcugcagagccugcagaccuacgugacccagcagcugauccgggccgccgagauucgggccagcgccaaccuggccgccaccaagaugagcgagugcgugcugggccagagcaagcggguggacuucugcggcaagggcuaccaccugaugagcuuuccccagagcgcaccccacggagugguguuccugcacgugaccuacgugcccgcccaggagaagaacuucaccaccgccccagccaucugccacgacggcaaggcccacuuuccccgggagggcguguucgugagcaacggcacccacugguucgugacccagcggaacuucuacgagccccagaucaucaccaccgacaacaccuucgugagcggcaacugcgacguggugaucggcaucgugaacaacaccguguacgauccccugcagcccgagcuggacagcuucaaggaggagcuggacaaguacuucaagaaucacaccagccccgacguggaccugggcgacaucagcggcaucaacgccagcguggugaacauccagaaggagaucgaucggcugaacgagguggccaagaaccugaacgagagccugaucgaccugcaggagcugggcaaguacgagcaguacaucaaguggcccugguacaucuggcugggcuucaucgccggccugaucgccaucgugauggugaccaucaugcugugcugcaugaccagcugcugcagcugccugaagggcuguugcagcugcggcagcugcugcaaguucgacgaggacgacagcgagcccgugcugaagggcgugaagcugcacuacaccugaggacuaguuauaagacugacuagcccgaugggccucccaacgggcccuccuccccuccuugcaccgagauuaauagaucucaaaggcucuuuucagagccaccaaaaaaaaaaaaaaaaaaaaaaaaaaaaaaaaaaaaaaaaaaaaaaaaaaaaaaaaaaaaaaaaaaaaaaaaaaaaaaaaaaaaaaaaaaaaaaaaaaaaa

SEQ ID NO: 24333 - RNA, 4041 nt, Artificial Sequence
  SARS-CoV-2/Wuhan/WIV05/2019__EPI_ISL_402128 spike protein mRNA gc (1-1273)(D614G_I692V)
aggagaaagcuuaccauguucguguuccuggugcugcugccccuggugagcagccagugcgugaaccugaccacccggacccagcugccaccagccuacaccaacagcuucacccggggcgucuacuaccccgacaagguguuccggagcagcguccugcacagcacccaggaccuguuccugcccuucuucagcaacgugaccugguuccacgccauccacgugagcggcaccaacggcaccaagcgguucgacaaccccgugcugcccuucaacgacggcguguacuucgccagcaccgagaagagcaacaucauccggggcuggaucuucggcaccacccuggacagcaagacccagagccugcugaucgugaauaacgccaccaacguggugaucaaggugugcgaguuccaguucugcaacgaccccuuccugggcguguacuaccacaagaacaacaagagcuggauggagagcgaguuccggguguacagcagcgccaacaacugcaccuucgaguacgugagccagcccuuccugauggaccuggagggcaagcagggcaacuucaagaaccugcgggaguucguguucaagaacaucgacggcuacuucaagaucuacagcaagcacaccccaaucaaccuggugcgggaucugccccagggcuucucagcccuggagccccugguggaccugcccaucggcaucaacaucacccgguuccagacccugcuggcccugcaccggagcuaccugaccccaggcgacagcagcagcggguggacagcaggcgcggcugcuuacuacgugggcuaccugcagccccggaccuuccugcugaaguacaacgagaacggcaccaucaccgacgccguggacugcgcccuggacccucugagcgagaccaagugcacccugaagagcuucaccguggagaagggcaucuaccagaccagcaacuuccgggugcagcccaccgagagcaucgugcgguuccccaacaucaccaaccugugccccuucggcgagguguucaacgccacccgguucgccagcguguacgccuggaaccggaagcggaucagcaacugcguggccgacuacagcgugcuguacaacagcgccagcuucagcaccuucaagugcuacggcgugagccccaccaagcugaacgaccugugcuucaccaacguguacgccgacagcuucgugauccguggcgacgaggugcggcagaucgcacccggccagacaggcaagaucgccgacuacaacuacaagcugcccgacgacuucaccggcugcgugaucgccuggaacagcaacaaccucgacagcaaggugggcggcaacuacaacuaccuguaccggcuguuccggaagagcaaccugaagcccuucgagcgggacaucagcaccgagaucuaccaagccggcuccaccccuugcaacggcguggagggcuucaacugcuacuucccucugcagagcuacggcuuccagcccaccaacggcgugggcuaccagcccuaccgggugguggugcugagcuucgagcugcugcacgccccagccaccguguguggccccaagaagagcaccaaccuggugaagaacaagugcgugaacuucaacuucaacggccuuaccggcaccggcgugcugaccgagagcaacaagaaauuccugcccuuucagcaguucggccgggacaucgccgacaccaccgacgcugugcgggauccccagacccuggagauccuggacaucaccccuugcagcuucggcggcgugagcgugaucaccccaggcaccaacaccagcaaccagguggccgugcuguaccagggcgugaacugcaccgaggugcccguggccauccacgccgaccagcugacacccaccuggcgggucuacagcaccggcagcaacguguuccagacccgggccgguugccugaucggcgccgagcacgugaacaacagcuacgagugcgacauccccaucggcgccggcaucugugccagcuaccagacccagaccaauucaccccggagggcaaggagcguggccagccagagcgugaucgccuacaccaugagccugggcgccgagaacagcguggccuacagcaacaacagcaucgccauccccaccaacuucaccaucagcgugaccaccgagauucugcccgugagcaugaccaagaccagcguggacugcaccauguacaucugcggcgacagcaccgagugcagcaaccugcugcugcaguacggcagcuucugcacccagcugaaccgggcccugaccggcaucgccguggagcaggacaagaacacccaggagguguucgcccaggugaagcagaucuacaagaccccucccaucaaggacuucggcggcuucaacuucagccagauccugcccgaccccagcaagcccagcaagcggagcuucaucgaggaccugcuguucaacaaggugacccuagccgacgccggcuucaucaagcaguacggcgacugccucggcgacauagccgcccgggaccugaucugcgcccagaaguucaacggccugaccgugcugccuccccugcugaccgacgagaugaucgcccaguacaccagcgcccuguuagccggaaccaucaccagcggcuggacuuucggcgcuggagccgcucugcagauccccuucgccaugcagauggccuaccgguucaacggcaucggcgugacccagaacgugcuguacgagaaccagaagcugaucgccaaccaguucaacagcgccaucggcaagauccaggacagccugagcagcaccgcuagcgcccugggcaagcugcaggacguggugaaccagaacgcccaggcccugaacacccuggugaagcagcugagcagcaacuucggcgccaucagcagcgugcugaacgacauccugagccggcuggacaaggucgaggccgaggugcagaucgaccggcugaucacuggccggcugcagagccugcagaccuacgugacccagcagcugauccgggccgccgagauucgggccagcgccaaccuggccgccaccaagaugagcgagugcgugcugggccagagcaagcggguggacuucugcggcaagggcuaccaccugaugagcuuuccccagagcgcaccccacggagugguguuccugcacgugaccuacgugcccgcccaggagaagaacuucaccaccgccccagccaucugccacgacggcaaggcccacuuuccccgggagggcguguucgugagcaacggcacccacugguucgugacccagcggaacuucuacgagccccagaucaucaccaccgacaacaccuucgugagcggcaacugcgacguggugaucggcaucgugaacaacaccguguacgauccccugcagcccgagcuggacagcuucaaggaggagcuggacaaguacuucaagaaucacaccagccccgacguggaccugggcgacaucagcggcaucaacgccagcguggugaacauccagaaggagaucgaucggcugaacgagguggccaagaaccugaacgagagccugaucgaccugcaggagcugggcaaguacgagcaguacaucaaguggcccugguacaucuggcugggcuucaucgccggccugaucgccaucgugauggugaccaucaugcugugcugcaugaccagcugcugcagcugccugaagggcuguugcagcugcggcagcugcugcaaguucgacgaggacgacagcgagcccgugcugaagggcgugaagcugcacuacaccugaggacuaguuauaagacugacuagcccgaugggccucccaacgggcccuccuccccuccuugcaccgagauuaauagaucucaaaggcucuuuucagagccaccaaaaaaaaaaaaaaaaaaaaaaaaaaaaaaaaaaaaaaaaaaaaaaaaaaaaaaaaaaaaaaaaaaaaaaaaaaaaaaaaaaaaaaaaaaaaaaaaaaaaa

SEQ ID NO: 24334 - RNA, 4041 nt, Artificial Sequence
  SARS-CoV-2/Wuhan/WIV05/2019__EPI_ISL_402128 spike protein mRNA gc (1-1273)(D614G_M1229I)
aggagaaagcuuaccauguucguguuccuggugcugcugccccuggugagcagccagugcgugaaccugaccacccggacccagcugccaccagccuacaccaacagcuucacccggggcgucuacuaccccgacaagguguuccggagcagcguccugcacagcacccaggaccuguuccugcccuucuucagcaacgugaccugguuccacgccauccacgugagcggcaccaacggcaccaagcgguucgacaaccccgugcugcccuucaacgacggcguguacuucgccagcaccgagaagagcaacaucauccggggcuggaucuucggcaccacccuggacagcaagacccagagccugcugaucgugaauaacgccaccaacguggugaucaaggugugcgaguuccaguucugcaacgaccccuuccugggcguguacuaccacaagaacaacaagagcuggauggagagcgaguuccggguguacagcagcgccaacaacugcaccuucgaguacgugagccagcccuuccugauggaccuggagggcaagcagggcaacuucaagaaccugcgggaguucguguucaagaacaucgacggcuacuucaagaucuacagcaagcacaccccaaucaaccuggugcgggaucugccccagggcuucucagcccuggagccccugguggaccugcccaucggcaucaacaucacccgguuccagacccugcuggcccugcaccggagcuaccugaccccaggcgacagcagcagcggguggacagcaggcgcggcugcuuacuacgugggcuaccugcagccccggaccuuccugcugaaguacaacgagaacggcaccaucaccgacgccguggacugcgcccuggacccucugagcgagaccaagugcacccugaagagcuucaccguggagaagggcaucuaccagaccagcaacuuccgggugcagcccaccgagagcaucgugcgguuccccaacaucaccaaccugugccccuucggcgagguguucaacgccacccgguucgccagcguguacgccuggaaccggaagcggaucagcaacugcguggccgacuacagcgugcuguacaacagcgccagcuucagcaccuucaagugcuacggcgugagccccaccaagcugaacgaccugugcuucaccaacguguacgccgacagcuucgugauccguggcgacgaggugcggcagaucgcacccggccagacaggcaagaucgccgacuacaacuacaagcugcccgacgacuucaccggcugcgugaucgccuggaacagcaacaaccucgacagcaaggugggcggcaacuacaacuaccuguaccggcuguuccggaagagcaaccugaagcccuucgagcgggacaucagcaccgagaucuaccaagccggcuccaccccuugcaacggcguggagggcuucaacugcuacuucccucugcagagcuacggcuuccagcccaccaacggcgugggcuaccagcccuaccgggugguggugcugagcuucgagcugcugcacgccccagccaccguguguggccccaagaagagcaccaaccuggugaagaacaagugcgugaacuucaacuucaacggccuuaccggcaccggcgugcugaccgagagcaacaagaaauuccugcccuuucagcaguucggccgggacaucgccgacaccaccgacgcugugcgggauccccagacccuggagauccuggacaucaccccuugcagcuucggcggcgugagcgugaucaccccaggcaccaacaccagcaaccagguggccgugcuguaccagggcgugaacugcaccgaggugcccguggccauccacgccgaccagcugacacccaccuggcgggucuacagcaccggcagcaacguguuccagacccgggccgguugccugaucggcgccgagcacgugaacaacagcuacgagugcgacauccccaucggcgccggcaucugugccagcuaccagacccagaccaauucaccccggagggcaaggagcguggccagccagagcaucaucgccuacaccaugagccugggcgccgagaacagcguggccuacagcaacaacagcaucgccauccccaccaacuucaccaucagcgugaccaccgagauucugcccgugagcaugaccaagaccagcguggacugcaccauguacaucugcggcgacagcaccgagugcagcaaccugcugcugcaguacggcagcuucugcacccagcugaaccgggcccugaccggcaucgccguggagcaggacaagaacacccaggagguguucgcccaggugaagcagaucuacaagaccccucccaucaaggacuucggcggcuucaacuucagccagauccugcccgaccccagcaagcccagcaagcggagcuucaucgaggaccugcuguucaacaaggugacccuagccgacgccggcuucaucaagcaguacggcgacugccucggcgacauagccgcccgggaccugaucugcgcccagaaguucaacggccugaccgugcugccuccccugcugaccgacgagaugaucgcccaguacaccagcgcccuguuagccggaaccaucaccagcggcuggacuuucggcgcuggagccgcucugcagauccccuucgccaugcagauggccuaccgguucaacggcaucggcgugacccagaacgugcuguacgagaaccagaagcugaucgccaaccaguucaacagcgccaucggcaagauccaggacagccugagcagcaccgcuagcgcccugggcaagcugcaggacguggugaaccagaacgcccaggcccugaacacccuggugaagcagcugagcagcaacuucggcgccaucagcagcgugcugaacgacauccugagccggcuggacaaggucgaggccgaggugcagaucgaccggcugaucacuggccggcugcagagccugcagaccuacgugacccagcagcugauccgggccgccgagauucgggccagcgccaaccuggccgccaccaagaugagcgagugcgugcugggccagagcaagcggguggacuucugcggcaagggcuaccaccugaugagcuuuccccagagcgcaccccacggagugguguuccugcacgugaccuacgugcccgcccaggagaagaacuucaccaccgccccagccaucugccacgacggcaaggcccacuuuccccgggagggcguguucgugagcaacggcacccacugguucgugacccagcggaacuucuacgagccccagaucaucaccaccgacaacaccuucgugagcggcaacugcgacguggugaucggcaucgugaacaacaccguguacgauccccugcagcccgagcuggacagcuucaaggaggagcuggacaaguacuucaagaaucacaccagccccgacguggaccugggcgacaucagcggcaucaacgccagcguggugaacauccagaaggagaucgaucggcugaacgagguggccaagaaccugaacgagagccugaucgaccugcaggagcugggcaaguacgagcaguacaucaaguggcccugguacaucuggcugggcuucaucgccggccugaucgccaucgugaucgugaccaucaugcugugcugcaugaccagcugcugcagcugccugaagggcuguugcagcugcggcagcugcugcaaguucgacgaggacgacagcgagcccgugcugaagggcgugaagcugcacuacaccugaggacuaguuauaagacugacuagcccgaugggccucccaacgggcccuccuccccuccuugcaccgagauuaauagaucucaaaggcucuuuucagagccaccaaaaaaaaaaaaaaaaaaaaaaaaaaaaaaaaaaaaaaaaaaaaaaaaaaaaaaaaaaaaaaaaaaaaaaaaaaaaaaaaaaaaaaaaaaaaaaaaaaaaa

SEQ ID NO: 24335 - RNA, 4035 nt, Artificial Sequence
  SARS-CoV-2/Wuhan/WIV05/2019__EPI_ISL_402128 spike protein mRNA gc (1-1273)(H69del_V70del_A222V_Y453F_S477N_D614G_I692V)
aggagaaagcuuaccauguucguguuccuggugcugcugccccuggugagcagccagugcgugaaccugaccacccggacccagcugccaccagccuacaccaacagcuucacccggggcgucuacuaccccgacaagguguuccggagcagcguccugcacagcacccaggaccuguuccugcccuucuucagcaacgugaccugguuccacgccaucagcggcaccaacggcaccaagcgguucgacaaccccgugcugcccuucaacgacggcguguacuucgccagcaccgagaagagcaacaucauccggggcuggaucuucggcaccacccuggacagcaagacccagagccugcugaucgugaauaacgccaccaacguggugaucaaggugugcgaguuccaguucugcaacgaccccuuccugggcguguacuaccacaagaacaacaagagcuggauggagagcgaguuccggguguacagcagcgccaacaacugcaccuucgaguacgugagccagcccuuccugauggaccuggagggcaagcagggcaacuucaagaaccugcgggaguucguguucaagaacaucgacggcuacuucaagaucuacagcaagcacaccccaaucaaccuggugcgggaucugccccagggcuucucagugcuggagccccugguggaccugcccaucggcaucaacaucacccgguuccagacccugcuggcccugcaccggagcuaccugaccccaggcgacagcagcagcggguggacagcaggcgcggcugcuuacuacgugggcuaccugcagccccggaccuuccugcugaaguacaacgagaacggcaccaucaccgacgccguggacugcgcccuggacccucugagcgagaccaagugcacccugaagagcuucaccguggagaagggcaucuaccagaccagcaacuuccgggugcagcccaccgagagcaucgugcgguuccccaacaucaccaaccugugccccuucggcgagguguucaacgccacccgguucgccagcguguacgccuggaaccggaagcggaucagcaacugcguggccgacuacagcgugcuguacaacagcgccagcuucagcaccuucaagugcuacggcgugagccccaccaagcugaacgaccugugcuucaccaacguguacgccgacagcuucgugauccguggcgacgaggugcggcagaucgcacccggccagacaggcaagaucgccgacuacaacuacaagcugcccgacgacuucaccggcugcgugaucgccuggaacagcaacaaccucgacagcaaggugggcggcaacuacaacuaccuguuccggcuguuccggaagagcaaccugaagcccuucgagcgggacaucagcaccgagaucuaccaagccggcaacaccccuugcaacggcguggagggcuucaacugcuacuucccucugcagagcuacggcuuccagcccaccaacggcgugggcuaccagcccuaccgggugguggugcugagcuucgagcugcugcacgccccagccaccguguguggccccaagaagagcaccaaccuggugaagaacaagugcgugaacuucaacuucaacggccuuaccggcaccggcgugcugaccgagagcaacaagaaauuccugcccuuucagcaguucggccgggacaucgccgacaccaccgacgcugugcgggauccccagacccuggagauccuggacaucaccccuugcagcuucggcggcgugagcgugaucaccccaggcaccaacaccagcaaccagguggccgugcuguaccagggcgugaacugcaccgaggugcccguggccauccacgccgaccagcugacacccaccuggcgggucuacagcaccggcagcaacguguuccagacccgggccgguugccugaucggcgccgagcacgugaacaacagcuacgagugcgacauccccaucggcgccggcaucugugccagcuaccagacccagaccaauucaccccggagggcaaggagcguggccagccagagcgugaucgccuacaccaugagccugggcgccgagaacagcguggccuacagcaacaacagcaucgccauccccaccaacuucaccaucagcgugaccaccgagauucugcccgugagcaugaccaagaccagcguggacugcaccauguacaucugcggcgacagcaccgagugcagcaaccugcugcugcaguacggcagcuucugcacccagcugaaccgggcccugaccggcaucgccguggagcaggacaagaacacccaggagguguucgcccaggugaagcagaucuacaagaccccucccaucaaggacuucggcggcuucaacuucagccagauccugcccgaccccagcaagcccagcaagcggagcuucaucgaggaccugcuguucaacaaggugacccuagccgacgccggcuucaucaagcaguacggcgacugccucggcgacauagccgcccgggaccugaucugcgcccagaaguucaacggccugaccgugcugccuccccugcugaccgacgagaugaucgcccaguacaccagcgcccuguuagccggaaccaucaccagcggcuggacuuucggcgcuggagccgcucugcagauccccuucgccaugcagauggccuaccgguucaacggcaucggcgugacccagaacgugcuguacgagaaccagaagcugaucgccaaccaguucaacagcgccaucggcaagauccaggacagccugagcagcaccgcuagcgcccugggcaagcugcaggacguggugaaccagaacgcccaggcccugaacacccuggugaagcagcugagcagcaacuucggcgccaucagcagcgugcugaacgacauccugagccggcuggacaaggucgaggccgaggugcagaucgaccggcugaucacuggccggcugcagagccugcagaccuacgugacccagcagcugauccgggccgccgagauucgggccagcgccaaccuggccgccaccaagaugagcgagugcgugcugggccagagcaagcggguggacuucugcggcaagggcuaccaccugaugagcuuuccccagagcgcaccccacggagugguguuccugcacgugaccuacgugcccgcccaggagaagaacuucaccaccgccccagccaucugccacgacggcaaggcccacuuuccccgggagggcguguucgugagcaacggcacccacugguucgugacccagcggaacuucuacgagccccagaucaucaccaccgacaacaccuucgugagcggcaacugcgacguggugaucggcaucgugaacaacaccguguacgauccccugcagcccgagcuggacagcuucaaggaggagcuggacaaguacuucaagaaucacaccagccccgacguggaccugggcgacaucagcggcaucaacgccagcguggugaacauccagaaggagaucgaucggcugaacgagguggccaagaaccugaacgagagccugaucgaccugcaggagcugggcaaguacgagcaguacaucaaguggcccugguacaucuggcugggcuucaucgccggccugaucgccaucgugauggugaccaucaugcugugcugcaugaccagcugcugcagcugccugaagggcuguugcagcugcggcagcugcugcaaguucgacgaggacgacagcgagcccgugcugaagggcgugaagcugcacuacaccugaggacuaguuauaagacugacuagcccgaugggccucccaacgggcccuccuccccuccuugcaccgagauuaauagaucucaaaggcucuuuucagagccaccaaaaaaaaaaaaaaaaaaaaaaaaaaaaaaaaaaaaaaaaaaaaaaaaaaaaaaaaaaaaaaaaaaaaaaaaaaaaaaaaaaaaaaaaaaaaaaaaaaaaa

SEQ ID NO: 24336 - RNA, 4035 nt, Artificial Sequence
  SARS-CoV-2/Wuhan/WIV05/2019__EPI_ISL_402128 spike protein mRNA gc (1-1273)(H69del_V70del_Y453F_D614G_I692V_M1229I)
aggagaaagcuuaccauguucguguuccuggugcugcugccccuggugagcagccagugcgugaaccugaccacccggacccagcugccaccagccuacaccaacagcuucacccggggcgucuacuaccccgacaagguguuccggagcagcguccugcacagcacccaggaccuguuccugcccuucuucagcaacgugaccugguuccacgccaucagcggcaccaacggcaccaagcgguucgacaaccccgugcugcccuucaacgacggcguguacuucgccagcaccgagaagagcaacaucauccggggcuggaucuucggcaccacccuggacagcaagacccagagccugcugaucgugaauaacgccaccaacguggugaucaaggugugcgaguuccaguucugcaacgaccccuuccugggcguguacuaccacaagaacaacaagagcuggauggagagcgaguuccggguguacagcagcgccaacaacugcaccuucgaguacgugagccagcccuuccugauggaccuggagggcaagcagggcaacuucaagaaccugcgggaguucguguucaagaacaucgacggcuacuucaagaucuacagcaagcacaccccaaucaaccuggugcgggaucugccccagggcuucucagcccuggagccccugguggaccugcccaucggcaucaacaucacccgguuccagacccugcuggcccugcaccggagcuaccugaccccaggcgacagcagcagcggguggacagcaggcgcggcugcuuacuacgugggcuaccugcagccccggaccuuccugcugaaguacaacgagaacggcaccaucaccgacgccguggacugcgcccuggacccucugagcgagaccaagugcacccugaagagcuucaccguggagaagggcaucuaccagaccagcaacuuccgggugcagcccaccgagagcaucgugcgguuccccaacaucaccaaccugugccccuucggcgagguguucaacgccacccgguucgccagcguguacgccuggaaccggaagcggaucagcaacugcguggccgacuacagcgugcuguacaacagcgccagcuucagcaccuucaagugcuacggcgugagccccaccaagcugaacgaccugugcuucaccaacguguacgccgacagcuucgugauccguggcgacgaggugcggcagaucgcacccggccagacaggcaagaucgccgacuacaacuacaagcugcccgacgacuucaccggcugcgugaucgccuggaacagcaacaaccucgacagcaaggugggcggcaacuacaacuaccuguuccggcuguuccggaagagcaaccugaagcccuucgagcgggacaucagcaccgagaucuaccaagccggcuccaccccuugcaacggcguggagggcuucaacugcuacuucccucugcagagcuacggcuuccagcccaccaacggcgugggcuaccagcccuaccgggugguggugcugagcuucgagcugcugcacgccccagccaccguguguggccccaagaagagcaccaaccuggugaagaacaagugcgugaacuucaacuucaacggccuuaccggcaccggcgugcugaccgagagcaacaagaaauuccugcccuuucagcaguucggccgggacaucgccgacaccaccgacgcugugcgggauccccagacccuggagauccuggacaucaccccuugcagcuucggcggcgugagcgugaucaccccaggcaccaacaccagcaaccagguggccgugcuguaccagggcgugaacugcaccgaggugcccguggccauccacgccgaccagcugacacccaccuggcgggucuacagcaccggcagcaacguguuccagacccgggccgguugccugaucggcgccgagcacgugaacaacagcuacgagugcgacauccccaucggcgccggcaucugugccagcuaccagacccagaccaauucaccccggagggcaaggagcguggccagccagagcgugaucgccuacaccaugagccugggcgccgagaacagcguggccuacagcaacaacagcaucgccauccccaccaacuucaccaucagcgugaccaccgagauucugcccgugagcaugaccaagaccagcguggacugcaccauguacaucugcggcgacagcaccgagugcagcaaccugcugcugcaguacggcagcuucugcacccagcugaaccgggcccugaccggcaucgccguggagcaggacaagaacacccaggagguguucgcccaggugaagcagaucuacaagaccccucccaucaaggacuucggcggcuucaacuucagccagauccugcccgaccccagcaagcccagcaagcggagcuucaucgaggaccugcuguucaacaaggugacccuagccgacgccggcuucaucaagcaguacggcgacugccucggcgacauagccgcccgggaccugaucugcgcccagaaguucaacggccugaccgugcugccuccccugcugaccgacgagaugaucgcccaguacaccagcgcccuguuagccggaaccaucaccagcggcuggacuuucggcgcuggagccgcucugcagauccccuucgccaugcagauggccuaccgguucaacggcaucggcgugacccagaacgugcuguacgagaaccagaagcugaucgccaaccaguucaacagcgccaucggcaagauccaggacagccugagcagcaccgcuagcgcccugggcaagcugcaggacguggugaaccagaacgcccaggcccugaacacccuggugaagcagcugagcagcaacuucggcgccaucagcagcgugcugaacgacauccugagccggcuggacaaggucgaggccgaggugcagaucgaccggcugaucacuggccggcugcagagccugcagaccuacgugacccagcagcugauccgggccgccgagauucgggccagcgccaaccuggccgccaccaagaugagcgagugcgugcugggccagagcaagcggguggacuucugcggcaagggcuaccaccugaugagcuuuccccagagcgcaccccacggagugguguuccugcacgugaccuacgugcccgcccaggagaagaacuucaccaccgccccagccaucugccacgacggcaaggcccacuuuccccgggagggcguguucgugagcaacggcacccacugguucgugacccagcggaacuucuacgagccccagaucaucaccaccgacaacaccuucgugagcggcaacugcgacguggugaucggcaucgugaacaacaccguguacgauccccugcagcccgagcuggacagcuucaaggaggagcuggacaaguacuucaagaaucacaccagccccgacguggaccugggcgacaucagcggcaucaacgccagcguggugaacauccagaaggagaucgaucggcugaacgagguggccaagaaccugaacgagagccugaucgaccugcaggagcugggcaaguacgagcaguacaucaaguggcccugguacaucuggcugggcuucaucgccggccugaucgccaucgugaucgugaccaucaugcugugcugcaugaccagcugcugcagcugccugaagggcuguugcagcugcggcagcugcugcaaguucgacgaggacgacagcgagcccgugcugaagggcgugaagcugcacuacaccugaggacuaguuauaagacugacuagcccgaugggccucccaacgggcccuccuccccuccuugcaccgagauuaauagaucucaaaggcucuuuucagagccaccaaaaaaaaaaaaaaaaaaaaaaaaaaaaaaaaaaaaaaaaaaaaaaaaaaaaaaaaaaaaaaaaaaaaaaaaaaaaaaaaaaaaaaaaaaaaaaaaaaaaa

SEQ ID NO: 24337 - RNA, 4032 nt, Artificial Sequence
  SARS-CoV-2/Wuhan/WIV05/2019__EPI_ISL_402128 spike protein mRNA gc (1-1273)(H69del_V70del_Y144del_N501Y_A570D_D614G_P681H_T716I_S982 A_D1118H)
aggagaaagcuuaccauguucguguuccuggugcugcugccccuggugagcagccagugcgugaaccugaccacccggacccagcugccaccagccuacaccaacagcuucacccggggcgucuacuaccccgacaagguguuccggagcagcguccugcacagcacccaggaccuguuccugcccuucuucagcaacgugaccugguuccacgccaucagcggcaccaacggcaccaagcgguucgacaaccccgugcugcccuucaacgacggcguguacuucgccagcaccgagaagagcaacaucauccggggcuggaucuucggcaccacccuggacagcaagacccagagccugcugaucgugaauaacgccaccaacguggugaucaaggugugcgaguuccaguucugcaacgaccccuuccugggcguguaccacaagaacaacaagagcuggauggagagcgaguuccggguguacagcagcgccaacaacugcaccuucgaguacgugagccagcccuuccugauggaccuggagggcaagcagggcaacuucaagaaccugcgggaguucguguucaagaacaucgacggcuacuucaagaucuacagcaagcacaccccaaucaaccuggugcgggaucugccccagggcuucucagcccuggagccccugguggaccugcccaucggcaucaacaucacccgguuccagacccugcuggcccugcaccggagcuaccugaccccaggcgacagcagcagcggguggacagcaggcgcggcugcuuacuacgugggcuaccugcagccccggaccuuccugcugaaguacaacgagaacggcaccaucaccgacgccguggacugcgcccuggacccucugagcgagaccaagugcacccugaagagcuucaccguggagaagggcaucuaccagaccagcaacuuccgggugcagcccaccgagagcaucgugcgguuccccaacaucaccaaccugugccccuucggcgagguguucaacgccacccgguucgccagcguguacgccuggaaccggaagcggaucagcaacugcguggccgacuacagcgugcuguacaacagcgccagcuucagcaccuucaagugcuacggcgugagccccaccaagcugaacgaccugugcuucaccaacguguacgccgacagcuucgugauccguggcgacgaggugcggcagaucgcacccggccagacaggcaagaucgccgacuacaacuacaagcugcccgacgacuucaccggcugcgugaucgccuggaacagcaacaaccucgacagcaaggugggcggcaacuacaacuaccuguaccggcuguuccggaagagcaaccugaagcccuucgagcgggacaucagcaccgagaucuaccaagccggcuccaccccuugcaacggcguggagggcuucaacugcuacuucccucugcagagcuacggcuuccagcccaccuacggcgugggcuaccagcccuaccgggugguggugcugagcuucgagcugcugcacgccccagccaccguguguggccccaagaagagcaccaaccuggugaagaacaagugcgugaacuucaacuucaacggccuuaccggcaccggcgugcugaccgagagcaacaagaaauuccugcccuuucagcaguucggccgggacaucgacgacaccaccgacgcugugcgggauccccagacccuggagauccuggacaucaccccuugcagcuucggcggcgugagcgugaucaccccaggcaccaacaccagcaaccagguggccgugcuguaccagggcgugaacugcaccgaggugcccguggccauccacgccgaccagcugacacccaccuggcgggucuacagcaccggcagcaacguguuccagacccgggccgguugccugaucggcgccgagcacgugaacaacagcuacgagugcgacauccccaucggcgccggcaucugugccagcuaccagacccagaccaauucacaccggagggcaaggagcguggccagccagagcaucaucgccuacaccaugagccugggcgccgagaacagcguggccuacagcaacaacagcaucgccauccccaucaacuucaccaucagcgugaccaccgagauucugcccgugagcaugaccaagaccagcguggacugcaccauguacaucugcggcgacagcaccgagugcagcaaccugcugcugcaguacggcagcuucugcacccagcugaaccgggcccugaccggcaucgccguggagcaggacaagaacacccaggagguguucgcccaggugaagcagaucuacaagaccccucccaucaaggacuucggcggcuucaacuucagccagauccugcccgaccccagcaagcccagcaagcggagcuucaucgaggaccugcuguucaacaaggugacccuagccgacgccggcuucaucaagcaguacggcgacugccucggcgacauagccgcccgggaccugaucugcgcccagaaguucaacggccugaccgugcugccuccccugcugaccgacgagaugaucgcccaguacaccagcgcccuguuagccggaaccaucaccagcggcuggacuuucggcgcuggagccgcucugcagauccccuucgccaugcagauggccuaccgguucaacggcaucggcgugacccagaacgugcuguacgagaaccagaagcugaucgccaaccaguucaacagcgccaucggcaagauccaggacagccugagcagcaccgcuagcgcccugggcaagcugcaggacguggugaaccagaacgcccaggcccugaacacccuggugaagcagcugagcagcaacuucggcgccaucagcagcgugcugaacgacauccuggcccggcuggacaaggucgaggccgaggugcagaucgaccggcugaucacuggccggcugcagagccugcagaccuacgugacccagcagcugauccgggccgccgagauucgggccagcgccaaccuggccgccaccaagaugagcgagugcgugcugggccagagcaagcggguggacuucugcggcaagggcuaccaccugaugagcuuuccccagagcgcaccccacggagugguguuccugcacgugaccuacgugcccgcccaggagaagaacuucaccaccgccccagccaucugccacgacggcaaggcccacuuuccccgggagggcguguucgugagcaacggcacccacugguucgugacccagcggaacuucuacgagccccagaucaucaccacccacaacaccuucgugagcggcaacugcgacguggugaucggcaucgugaacaacaccguguacgauccccugcagcccgagcuggacagcuucaaggaggagcuggacaaguacuucaagaaucacaccagccccgacguggaccugggcgacaucagcggcaucaacgccagcguggugaacauccagaaggagaucgaucggcugaacgagguggccaagaaccugaacgagagccugaucgaccugcaggagcugggcaaguacgagcaguacaucaaguggcccugguacaucuggcugggcuucaucgccggccugaucgccaucgugauggugaccaucaugcugugcugcaugaccagcugcugcagcugccugaagggcuguugcagcugcggcagcugcugcaaguucgacgaggacgacagcgagcccgugcugaagggcgugaagcugcacuacaccugaggacuaguuauaagacugacuagcccgaugggccucccaacgggcccuccuccccuccuugcaccgagauuaauagaucucaaaggcucuuuucagagccaccaaaaaaaaaaaaaaaaaaaaaaaaaaaaaaaaaaaaaaaaaaaaaaaaaaaaaaaaaaaaaaaaaaaaaaaaaaaaaaaaaaaaaaaaaaaaaaaaaaaaa

SEQ ID NO: 24338 - RNA, 4041 nt, Artificial Sequence
  SARS-CoV-2/Wuhan/WIV05/2019__EPI_ISL_402128 spike protein mRNA gc (1-1273)(K417N_E484K_N501Y_D614G)
aggagaaagcuuaccauguucguguuccuggugcugcugccccuggugagcagccagugcgugaaccugaccacccggacccagcugccaccagccuacaccaacagcuucacccggggcgucuacuaccccgacaagguguuccggagcagcguccugcacagcacccaggaccuguuccugcccuucuucagcaacgugaccugguuccacgccauccacgugagcggcaccaacggcaccaagcgguucgacaaccccgugcugcccuucaacgacggcguguacuucgccagcaccgagaagagcaacaucauccggggcuggaucuucggcaccacccuggacagcaagacccagagccugcugaucgugaauaacgccaccaacguggugaucaaggugugcgaguuccaguucugcaacgaccccuuccugggcguguacuaccacaagaacaacaagagcuggauggagagcgaguuccggguguacagcagcgccaacaacugcaccuucgaguacgugagccagcccuuccugauggaccuggagggcaagcagggcaacuucaagaaccugcgggaguucguguucaagaacaucgacggcuacuucaagaucuacagcaagcacaccccaaucaaccuggugcgggaucugccccagggcuucucagcccuggagccccugguggaccugcccaucggcaucaacaucacccgguuccagacccugcuggcccugcaccggagcuaccugaccccaggcgacagcagcagcggguggacagcaggcgcggcugcuuacuacgugggcuaccugcagccccggaccuuccugcugaaguacaacgagaacggcaccaucaccgacgccguggacugcgcccuggacccucugagcgagaccaagugcacccugaagagcuucaccguggagaagggcaucuaccagaccagcaacuuccgggugcagcccaccgagagcaucgugcgguuccccaacaucaccaaccugugccccuucggcgagguguucaacgccacccgguucgccagcguguacgccuggaaccggaagcggaucagcaacugcguggccgacuacagcgugcuguacaacagcgccagcuucagcaccuucaagugcuacggcgugagccccaccaagcugaacgaccugugcuucaccaacguguacgccgacagcuucgugauccguggcgacgaggugcggcagaucgcacccggccagacaggcaacaucgccgacuacaacuacaagcugcccgacgacuucaccggcugcgugaucgccuggaacagcaacaaccucgacagcaaggugggcggcaacuacaacuaccuguaccggcuguuccggaagagcaaccugaagcccuucgagcgggacaucagcaccgagaucuaccaagccggcuccaccccuugcaacggcgugaagggcuucaacugcuacuucccucugcagagcuacggcuuccagcccaccuacggcgugggcuaccagcccuaccgggugguggugcugagcuucgagcugcugcacgccccagccaccguguguggccccaagaagagcaccaaccuggugaagaacaagugcgugaacuucaacuucaacggccuuaccggcaccggcgugcugaccgagagcaacaagaaauuccugcccuuucagcaguucggccgggacaucgccgacaccaccgacgcugugcgggauccccagacccuggagauccuggacaucaccccuugcagcuucggcggcgugagcgugaucaccccaggcaccaacaccagcaaccagguggccgugcuguaccagggcgugaacugcaccgaggugcccguggccauccacgccgaccagcugacacccaccuggcgggucuacagcaccggcagcaacguguuccagacccgggccgguugccugaucggcgccgagcacgugaacaacagcuacgagugcgacauccccaucggcgccggcaucugugccagcuaccagacccagaccaauucaccccggagggcaaggagcguggccagccagagcaucaucgccuacaccaugagccugggcgccgagaacagcguggccuacagcaacaacagcaucgccauccccaccaacuucaccaucagcgugaccaccgagauucugcccgugagcaugaccaagaccagcguggacugcaccauguacaucugcggcgacagcaccgagugcagcaaccugcugcugcaguacggcagcuucugcacccagcugaaccgggcccugaccggcaucgccguggagcaggacaagaacacccaggagguguucgcccaggugaagcagaucuacaagaccccucccaucaaggacuucggcggcuucaacuucagccagauccugcccgaccccagcaagcccagcaagcggagcuucaucgaggaccugcuguucaacaaggugacccuagccgacgccggcuucaucaagcaguacggcgacugccucggcgacauagccgcccgggaccugaucugcgcccagaaguucaacggccugaccgugcugccuccccugcugaccgacgagaugaucgcccaguacaccagcgcccuguuagccggaaccaucaccagcggcuggacuuucggcgcuggagccgcucugcagauccccuucgccaugcagauggccuaccgguucaacggcaucggcgugacccagaacgugcuguacgagaaccagaagcugaucgccaaccaguucaacagcgccaucggcaagauccaggacagccugagcagcaccgcuagcgcccugggcaagcugcaggacguggugaaccagaacgcccaggcccugaacacccuggugaagcagcugagcagcaacuucggcgccaucagcagcgugcugaacgacauccugagccggcuggacaaggucgaggccgaggugcagaucgaccggcugaucacuggccggcugcagagccugcagaccuacgugacccagcagcugauccgggccgccgagauucgggccagcgccaaccuggccgccaccaagaugagcgagugcgugcugggccagagcaagcggguggacuucugcggcaagggcuaccaccugaugagcuuuccccagagcgcaccccacggagugguguuccugcacgugaccuacgugcccgcccaggagaagaacuucaccaccgccccagccaucugccacgacggcaaggcccacuuuccccgggagggcguguucgugagcaacggcacccacugguucgugacccagcggaacuucuacgagccccagaucaucaccaccgacaacaccuucgugagcggcaacugcgacguggugaucggcaucgugaacaacaccguguacgauccccugcagcccgagcuggacagcuucaaggaggagcuggacaaguacuucaagaaucacaccagccccgacguggaccugggcgacaucagcggcaucaacgccagcguggugaacauccagaaggagaucgaucggcugaacgagguggccaagaaccugaacgagagccugaucgaccugcaggagcugggcaaguacgagcaguacaucaaguggcccugguacaucuggcugggcuucaucgccggccugaucgccaucgugauggugaccaucaugcugugcugcaugaccagcugcugcagcugccugaagggcuguugcagcugcggcagcugcugcaaguucgacgaggacgacagcgagcccgugcugaagggcgugaagcugcacuacaccugaggacuaguuauaagacugacuagcccgaugggccucccaacgggcccuccuccccuccuugcaccgagauuaauagaucucaaaggcucuuuucagagccaccaaaaaaaaaaaaaaaaaaaaaaaaaaaaaaaaaaaaaaaaaaaaaaaaaaaaaaaaaaaaaaaaaaaaaaaaaaaaaaaaaaaaaaaaaaaaaaaaaaaaa

SEQ ID NO: 24339 - RNA, 4032 nt, Artificial Sequence
  SARS-CoV-2/Wuhan/WIV05/2019__EPI_ISL_402128 spike protein mRNA gc (1-1273)(L18F_D80A_D215G_L242del_A243del_L244del_R246I_K417N_E484 K_N501Y_D614G_A701V)
aggagaaagcuuaccauguucguguuccuggugcugcugccccuggugagcagccagugcgugaacuucaccacccggacccagcugccaccagccuacaccaacagcuucacccggggcgucuacuaccccgacaagguguuccggagcagcguccugcacagcacccaggaccuguuccugcccuucuucagcaacgugaccugguuccacgccauccacgugagcggcaccaacggcaccaagcgguucgccaaccccgugcugcccuucaacgacggcguguacuucgccagcaccgagaagagcaacaucauccggggcuggaucuucggcaccacccuggacagcaagacccagagccugcugaucgugaauaacgccaccaacguggugaucaaggugugcgaguuccaguucugcaacgaccccuuccugggcguguacuaccacaagaacaacaagagcuggauggagagcgaguuccggguguacagcagcgccaacaacugcaccuucgaguacgugagccagcccuuccugauggaccuggagggcaagcagggcaacuucaagaaccugcgggaguucguguucaagaacaucgacggcuacuucaagaucuacagcaagcacaccccaaucaaccuggugcggggccugccccagggcuucucagcccuggagccccugguggaccugcccaucggcaucaacaucacccgguuccagacccugcacaucagcuaccugaccccaggcgacagcagcagcggguggacagcaggcgcggcugcuuacuacgugggcuaccugcagccccggaccuuccugcugaaguacaacgagaacggcaccaucaccgacgccguggacugcgcccuggacccucugagcgagaccaagugcacccugaagagcuucaccguggagaagggcaucuaccagaccagcaacuuccgggugcagcccaccgagagcaucgugcgguuccccaacaucaccaaccugugccccuucggcgagguguucaacgccacccgguucgccagcguguacgccuggaaccggaagcggaucagcaacugcguggccgacuacagcgugcuguacaacagcgccagcuucagcaccuucaagugcuacggcgugagccccaccaagcugaacgaccugugcuucaccaacguguacgccgacagcuucgugauccguggcgacgaggugcggcagaucgcacccggccagacaggcaacaucgccgacuacaacuacaagcugcccgacgacuucaccggcugcgugaucgccuggaacagcaacaaccucgacagcaaggugggcggcaacuacaacuaccuguaccggcuguuccggaagagcaaccugaagcccuucgagcgggacaucagcaccgagaucuaccaagccggcuccaccccuugcaacggcgugaagggcuucaacugcuacuucccucugcagagcuacggcuuccagcccaccuacggcgugggcuaccagcccuaccgggugguggugcugagcuucgagcugcugcacgccccagccaccguguguggccccaagaagagcaccaaccuggugaagaacaagugcgugaacuucaacuucaacggccuuaccggcaccggcgugcugaccgagagcaacaagaaauuccugcccuuucagcaguucggccgggacaucgccgacaccaccgacgcugugcgggauccccagacccuggagauccuggacaucaccccuugcagcuucggcggcgugagcgugaucaccccaggcaccaacaccagcaaccagguggccgugcuguaccagggcgugaacugcaccgaggugcccguggccauccacgccgaccagcugacacccaccuggcgggucuacagcaccggcagcaacguguuccagacccgggccgguugccugaucggcgccgagcacgugaacaacagcuacgagugcgacauccccaucggcgccggcaucugugccagcuaccagacccagaccaauucaccccggagggcaaggagcguggccagccagagcaucaucgccuacaccaugagccugggcguggagaacagcguggccuacagcaacaacagcaucgccauccccaccaacuucaccaucagcgugaccaccgagauucugcccgugagcaugaccaagaccagcguggacugcaccauguacaucugcggcgacagcaccgagugcagcaaccugcugcugcaguacggcagcuucugcacccagcugaaccgggcccugaccggcaucgccguggagcaggacaagaacacccaggagguguucgcccaggugaagcagaucuacaagaccccucccaucaaggacuucggcggcuucaacuucagccagauccugcccgaccccagcaagcccagcaagcggagcuucaucgaggaccugcuguucaacaaggugacccuagccgacgccggcuucaucaagcaguacggcgacugccucggcgacauagccgcccgggaccugaucugcgcccagaaguucaacggccugaccgugcugccuccccugcugaccgacgagaugaucgcccaguacaccagcgcccuguuagccggaaccaucaccagcggcuggacuuucggcgcuggagccgcucugcagauccccuucgccaugcagauggccuaccgguucaacggcaucggcgugacccagaacgugcuguacgagaaccagaagcugaucgccaaccaguucaacagcgccaucggcaagauccaggacagccugagcagcaccgcuagcgcccugggcaagcugcaggacguggugaaccagaacgcccaggcccugaacacccuggugaagcagcugagcagcaacuucggcgccaucagcagcgugcugaacgacauccugagccggcuggacaaggucgaggccgaggugcagaucgaccggcugaucacuggccggcugcagagccugcagaccuacgugacccagcagcugauccgggccgccgagauucgggccagcgccaaccuggccgccaccaagaugagcgagugcgugcugggccagagcaagcggguggacuucugcggcaagggcuaccaccugaugagcuuuccccagagcgcaccccacggagugguguuccugcacgugaccuacgugcccgcccaggagaagaacuucaccaccgccccagccaucugccacgacggcaaggcccacuuuccccgggagggcguguucgugagcaacggcacccacugguucgugacccagcggaacuucuacgagccccagaucaucaccaccgacaacaccuucgugagcggcaacugcgacguggugaucggcaucgugaacaacaccguguacgauccccugcagcccgagcuggacagcuucaaggaggagcuggacaaguacuucaagaaucacaccagccccgacguggaccugggcgacaucagcggcaucaacgccagcguggugaacauccagaaggagaucgaucggcugaacgagguggccaagaaccugaacgagagccugaucgaccugcaggagcugggcaaguacgagcaguacaucaaguggcccugguacaucuggcugggcuucaucgccggccugaucgccaucgugauggugaccaucaugcugugcugcaugaccagcugcugcagcugccugaagggcuguugcagcugcggcagcugcugcaaguucgacgaggacgacagcgagcccgugcugaagggcgugaagcugcacuacaccugaggacuaguuauaagacugacuagcccgaugggccucccaacgggcccuccuccccuccuugcaccgagauuaauagaucucaaaggcucuuuucagagccaccaaaaaaaaaaaaaaaaaaaaaaaaaaaaaaaaaaaaaaaaaaaaaaaaaaaaaaaaaaaaaaaaaaaaaaaaaaaaaaaaaaaaaaaaaaaaaaaaaaaaa

SEQ ID NO: 24340 - RNA, 4041 nt, Artificial Sequence
  SARS-CoV-2/Wuhan/WIV05/2019__EPI_ISL_402128 spike protein mRNA gc (1-1273)(E484K_D614G)
aggagaaagcuuaccauguucguguuccuggugcugcugccccuggugagcagccagugcgugaaccugaccacccggacccagcugccaccagccuacaccaacagcuucacccggggcgucuacuaccccgacaagguguuccggagcagcguccugcacagcacccaggaccuguuccugcccuucuucagcaacgugaccugguuccacgccauccacgugagcggcaccaacggcaccaagcgguucgacaaccccgugcugcccuucaacgacggcguguacuucgccagcaccgagaagagcaacaucauccggggcuggaucuucggcaccacccuggacagcaagacccagagccugcugaucgugaauaacgccaccaacguggugaucaaggugugcgaguuccaguucugcaacgaccccuuccugggcguguacuaccacaagaacaacaagagcuggauggagagcgaguuccggguguacagcagcgccaacaacugcaccuucgaguacgugagccagcccuuccugauggaccuggagggcaagcagggcaacuucaagaaccugcgggaguucguguucaagaacaucgacggcuacuucaagaucuacagcaagcacaccccaaucaaccuggugcgggaucugccccagggcuucucagcccuggagccccugguggaccugcccaucggcaucaacaucacccgguuccagacccugcuggcccugcaccggagcuaccugaccccaggcgacagcagcagcggguggacagcaggcgcggcugcuuacuacgugggcuaccugcagccccggaccuuccugcugaaguacaacgagaacggcaccaucaccgacgccguggacugcgcccuggacccucugagcgagaccaagugcacccugaagagcuucaccguggagaagggcaucuaccagaccagcaacuuccgggugcagcccaccgagagcaucgugcgguuccccaacaucaccaaccugugccccuucggcgagguguucaacgccacccgguucgccagcguguacgccuggaaccggaagcggaucagcaacugcguggccgacuacagcgugcuguacaacagcgccagcuucagcaccuucaagugcuacggcgugagccccaccaagcugaacgaccugugcuucaccaacguguacgccgacagcuucgugauccguggcgacgaggugcggcagaucgcacccggccagacaggcaagaucgccgacuacaacuacaagcugcccgacgacuucaccggcugcgugaucgccuggaacagcaacaaccucgacagcaaggugggcggcaacuacaacuaccuguaccggcuguuccggaagagcaaccugaagcccuucgagcgggacaucagcaccgagaucuaccaagccggcuccaccccuugcaacggcgugaagggcuucaacugcuacuucccucugcagagcuacggcuuccagcccaccaacggcgugggcuaccagcccuaccgggugguggugcugagcuucgagcugcugcacgccccagccaccguguguggccccaagaagagcaccaaccuggugaagaacaagugcgugaacuucaacuucaacggccuuaccggcaccggcgugcugaccgagagcaacaagaaauuccugcccuuucagcaguucggccgggacaucgccgacaccaccgacgcugugcgggauccccagacccuggagauccuggacaucaccccuugcagcuucggcggcgugagcgugaucaccccaggcaccaacaccagcaaccagguggccgugcuguaccagggcgugaacugcaccgaggugcccguggccauccacgccgaccagcugacacccaccuggcgggucuacagcaccggcagcaacguguuccagacccgggccgguugccugaucggcgccgagcacgugaacaacagcuacgagugcgacauccccaucggcgccggcaucugugccagcuaccagacccagaccaauucaccccggagggcaaggagcguggccagccagagcaucaucgccuacaccaugagccugggcgccgagaacagcguggccuacagcaacaacagcaucgccauccccaccaacuucaccaucagcgugaccaccgagauucugcccgugagcaugaccaagaccagcguggacugcaccauguacaucugcggcgacagcaccgagugcagcaaccugcugcugcaguacggcagcuucugcacccagcugaaccgggcccugaccggcaucgccguggagcaggacaagaacacccaggagguguucgcccaggugaagcagaucuacaagaccccucccaucaaggacuucggcggcuucaacuucagccagauccugcccgaccccagcaagcccagcaagcggagcuucaucgaggaccugcuguucaacaaggugacccuagccgacgccggcuucaucaagcaguacggcgacugccucggcgacauagccgcccgggaccugaucugcgcccagaaguucaacggccugaccgugcugccuccccugcugaccgacgagaugaucgcccaguacaccagcgcccuguuagccggaaccaucaccagcggcuggacuuucggcgcuggagccgcucugcagauccccuucgccaugcagauggccuaccgguucaacggcaucggcgugacccagaacgugcuguacgagaaccagaagcugaucgccaaccaguucaacagcgccaucggcaagauccaggacagccugagcagcaccgcuagcgcccugggcaagcugcaggacguggugaaccagaacgcccaggcccugaacacccuggugaagcagcugagcagcaacuucggcgccaucagcagcgugcugaacgacauccugagccggcuggacaaggucgaggccgaggugcagaucgaccggcugaucacuggccggcugcagagccugcagaccuacgugacccagcagcugauccgggccgccgagauucgggccagcgccaaccuggccgccaccaagaugagcgagugcgugcugggccagagcaagcggguggacuucugcggcaagggcuaccaccugaugagcuuuccccagagcgcaccccacggagugguguuccugcacgugaccuacgugcccgcccaggagaagaacuucaccaccgccccagccaucugccacgacggcaaggcccacuuuccccgggagggcguguucgugagcaacggcacccacugguucgugacccagcggaacuucuacgagccccagaucaucaccaccgacaacaccuucgugagcggcaacugcgacguggugaucggcaucgugaacaacaccguguacgauccccugcagcccgagcuggacagcuucaaggaggagcuggacaaguacuucaagaaucacaccagccccgacguggaccugggcgacaucagcggcaucaacgccagcguggugaacauccagaaggagaucgaucggcugaacgagguggccaagaaccugaacgagagccugaucgaccugcaggagcugggcaaguacgagcaguacaucaaguggcccugguacaucuggcugggcuucaucgccggccugaucgccaucgugauggugaccaucaugcugugcugcaugaccagcugcugcagcugccugaagggcuguugcagcugcggcagcugcugcaaguucgacgaggacgacagcgagcccgugcugaagggcgugaagcugcacuacaccugaggacuaguuauaagacugacuagcccgaugggccucccaacgggcccuccuccccuccuugcaccgagauuaauagaucucaaaggcucuuuucagagccaccaaaaaaaaaaaaaaaaaaaaaaaaaaaaaaaaaaaaaaaaaaaaaaaaaaaaaaaaaaaaaaaaaaaaaaaaaaaaaaaaaaaaaaaaaaaaaaaaaaaaa

SEQ ID NO: 24341 - RNA, 4041 nt, Artificial Sequence
  SARS-CoV-2/Wuhan/WIV05/2019__EPI_ISL_402128 spike protein mRNA gc (1-1273)(L18F_T20N_P26S_D138Y_R190S_K417T_E484K_N501Y_D614G_H655Y _T1027I)
aggagaaagcuuaccauguucguguuccuggugcugcugccccuggugagcagccagugcgugaacuucaccaaccggacccagcugccaagcgccuacaccaacagcuucacccggggcgucuacuaccccgacaagguguuccggagcagcguccugcacagcacccaggaccuguuccugcccuucuucagcaacgugaccugguuccacgccauccacgugagcggcaccaacggcaccaagcgguucgacaaccccgugcugcccuucaacgacggcguguacuucgccagcaccgagaagagcaacaucauccggggcuggaucuucggcaccacccuggacagcaagacccagagccugcugaucgugaauaacgccaccaacguggugaucaaggugugcgaguuccaguucugcaacuaccccuuccugggcguguacuaccacaagaacaacaagagcuggauggagagcgaguuccggguguacagcagcgccaacaacugcaccuucgaguacgugagccagcccuuccugauggaccuggagggcaagcagggcaacuucaagaaccugagcgaguucguguucaagaacaucgacggcuacuucaagaucuacagcaagcacaccccaaucaaccuggugcgggaucugccccagggcuucucagcccuggagccccugguggaccugcccaucggcaucaacaucacccgguuccagacccugcuggcccugcaccggagcuaccugaccccaggcgacagcagcagcggguggacagcaggcgcggcugcuuacuacgugggcuaccugcagccccggaccuuccugcugaaguacaacgagaacggcaccaucaccgacgccguggacugcgcccuggacccucugagcgagaccaagugcacccugaagagcuucaccguggagaagggcaucuaccagaccagcaacuuccgggugcagcccaccgagagcaucgugcgguuccccaacaucaccaaccugugccccuucggcgagguguucaacgccacccgguucgccagcguguacgccuggaaccggaagcggaucagcaacugcguggccgacuacagcgugcuguacaacagcgccagcuucagcaccuucaagugcuacggcgugagccccaccaagcugaacgaccugugcuucaccaacguguacgccgacagcuucgugauccguggcgacgaggugcggcagaucgcacccggccagacaggcaccaucgccgacuacaacuacaagcugcccgacgacuucaccggcugcgugaucgccuggaacagcaacaaccucgacagcaaggugggcggcaacuacaacuaccuguaccggcuguuccggaagagcaaccugaagcccuucgagcgggacaucagcaccgagaucuaccaagccggcuccaccccuugcaacggcgugaagggcuucaacugcuacuucccucugcagagcuacggcuuccagcccaccuacggcgugggcuaccagcccuaccgggugguggugcugagcuucgagcugcugcacgccccagccaccguguguggccccaagaagagcaccaaccuggugaagaacaagugcgugaacuucaacuucaacggccuuaccggcaccggcgugcugaccgagagcaacaagaaauuccugcccuuucagcaguucggccgggacaucgccgacaccaccgacgcugugcgggauccccagacccuggagauccuggacaucaccccuugcagcuucggcggcgugagcgugaucaccccaggcaccaacaccagcaaccagguggccgugcuguaccagggcgugaacugcaccgaggugcccguggccauccacgccgaccagcugacacccaccuggcgggucuacagcaccggcagcaacguguuccagacccgggccgguugccugaucggcgccgaguacgugaacaacagcuacgagugcgacauccccaucggcgccggcaucugugccagcuaccagacccagaccaauucaccccggagggcaaggagcguggccagccagagcaucaucgccuacaccaugagccugggcgccgagaacagcguggccuacagcaacaacagcaucgccauccccaccaacuucaccaucagcgugaccaccgagauucugcccgugagcaugaccaagaccagcguggacugcaccauguacaucugcggcgacagcaccgagugcagcaaccugcugcugcaguacggcagcuucugcacccagcugaaccgggcccugaccggcaucgccguggagcaggacaagaacacccaggagguguucgcccaggugaagcagaucuacaagaccccucccaucaaggacuucggcggcuucaacuucagccagauccugcccgaccccagcaagcccagcaagcggagcuucaucgaggaccugcuguucaacaaggugacccuagccgacgccggcuucaucaagcaguacggcgacugccucggcgacauagccgcccgggaccugaucugcgcccagaaguucaacggccugaccgugcugccuccccugcugaccgacgagaugaucgcccaguacaccagcgcccuguuagccggaaccaucaccagcggcuggacuuucggcgcuggagccgcucugcagauccccuucgccaugcagauggccuaccgguucaacggcaucggcgugacccagaacgugcuguacgagaaccagaagcugaucgccaaccaguucaacagcgccaucggcaagauccaggacagccugagcagcaccgcuagcgcccugggcaagcugcaggacguggugaaccagaacgcccaggcccugaacacccuggugaagcagcugagcagcaacuucggcgccaucagcagcgugcugaacgacauccugagccggcuggacaaggucgaggccgaggugcagaucgaccggcugaucacuggccggcugcagagccugcagaccuacgugacccagcagcugauccgggccgccgagauucgggccagcgccaaccuggccgccaucaagaugagcgagugcgugcugggccagagcaagcggguggacuucugcggcaagggcuaccaccugaugagcuuuccccagagcgcaccccacggagugguguuccugcacgugaccuacgugcccgcccaggagaagaacuucaccaccgccccagccaucugccacgacggcaaggcccacuuuccccgggagggcguguucgugagcaacggcacccacugguucgugacccagcggaacuucuacgagccccagaucaucaccaccgacaacaccuucgugagcggcaacugcgacguggugaucggcaucgugaacaacaccguguacgauccccugcagcccgagcuggacagcuucaaggaggagcuggacaaguacuucaagaaucacaccagccccgacguggaccugggcgacaucagcggcaucaacgccagcguggugaacauccagaaggagaucgaucggcugaacgagguggccaagaaccugaacgagagccugaucgaccugcaggagcugggcaaguacgagcaguacaucaaguggcccugguacaucuggcugggcuucaucgccggccugaucgccaucgugauggugaccaucaugcugugcugcaugaccagcugcugcagcugccugaagggcuguugcagcugcggcagcugcugcaaguucgacgaggacgacagcgagcccgugcugaagggcgugaagcugcacuacaccugaggacuaguuauaagacugacuagcccgaugggccucccaacgggcccuccuccccuccuugcaccgagauuaauagaucucaaaggcucuuuucagagccaccaaaaaaaaaaaaaaaaaaaaaaaaaaaaaaaaaaaaaaaaaaaaaaaaaaaaaaaaaaaaaaaaaaaaaaaaaaaaaaaaaaaaaaaaaaaaaaaaaaaaa

SEQ ID NO: 24342 - RNA, 4041 nt, Artificial Sequence
  SARS-CoV-2/Wuhan/WIV05/2019__EPI_ISL_402128 spike protein mRNA gc (1-1273)(S13I_W152C_L452R_D614G)
aggagaaagcuuaccauguucguguuccuggugcugcugccccuggugagcauccagugcgugaaccugaccacccggacccagcugccaccagccuacaccaacagcuucacccggggcgucuacuaccccgacaagguguuccggagcagcguccugcacagcacccaggaccuguuccugcccuucuucagcaacgugaccugguuccacgccauccacgugagcggcaccaacggcaccaagcgguucgacaaccccgugcugcccuucaacgacggcguguacuucgccagcaccgagaagagcaacaucauccggggcuggaucuucggcaccacccuggacagcaagacccagagccugcugaucgugaauaacgccaccaacguggugaucaaggugugcgaguuccaguucugcaacgaccccuuccugggcguguacuaccacaagaacaacaagagcugcauggagagcgaguuccggguguacagcagcgccaacaacugcaccuucgaguacgugagccagcccuuccugauggaccuggagggcaagcagggcaacuucaagaaccugcgggaguucguguucaagaacaucgacggcuacuucaagaucuacagcaagcacaccccaaucaaccuggugcgggaucugccccagggcuucucagcccuggagccccugguggaccugcccaucggcaucaacaucacccgguuccagacccugcuggcccugcaccggagcuaccugaccccaggcgacagcagcagcggguggacagcaggcgcggcugcuuacuacgugggcuaccugcagccccggaccuuccugcugaaguacaacgagaacggcaccaucaccgacgccguggacugcgcccuggacccucugagcgagaccaagugcacccugaagagcuucaccguggagaagggcaucuaccagaccagcaacuuccgggugcagcccaccgagagcaucgugcgguuccccaacaucaccaaccugugccccuucggcgagguguucaacgccacccgguucgccagcguguacgccuggaaccggaagcggaucagcaacugcguggccgacuacagcgugcuguacaacagcgccagcuucagcaccuucaagugcuacggcgugagccccaccaagcugaacgaccugugcuucaccaacguguacgccgacagcuucgugauccguggcgacgaggugcggcagaucgcacccggccagacaggcaagaucgccgacuacaacuacaagcugcccgacgacuucaccggcugcgugaucgccuggaacagcaacaaccucgacagcaaggugggcggcaacuacaacuaccgcuaccggcuguuccggaagagcaaccugaagcccuucgagcgggacaucagcaccgagaucuaccaagccggcuccaccccuugcaacggcguggagggcuucaacugcuacuucccucugcagagcuacggcuuccagcccaccaacggcgugggcuaccagcccuaccgggugguggugcugagcuucgagcugcugcacgccccagccaccguguguggccccaagaagagcaccaaccuggugaagaacaagugcgugaacuucaacuucaacggccuuaccggcaccggcgugcugaccgagagcaacaagaaauuccugcccuuucagcaguucggccgggacaucgccgacaccaccgacgcugugcgggauccccagacccuggagauccuggacaucaccccuugcagcuucggcggcgugagcgugaucaccccaggcaccaacaccagcaaccagguggccgugcuguaccagggcgugaacugcaccgaggugcccguggccauccacgccgaccagcugacacccaccuggcgggucuacagcaccggcagcaacguguuccagacccgggccgguugccugaucggcgccgagcacgugaacaacagcuacgagugcgacauccccaucggcgccggcaucugugccagcuaccagacccagaccaauucaccccggagggcaaggagcguggccagccagagcaucaucgccuacaccaugagccugggcgccgagaacagcguggccuacagcaacaacagcaucgccauccccaccaacuucaccaucagcgugaccaccgagauucugcccgugagcaugaccaagaccagcguggacugcaccauguacaucugcggcgacagcaccgagugcagcaaccugcugcugcaguacggcagcuucugcacccagcugaaccgggcccugaccggcaucgccguggagcaggacaagaacacccaggagguguucgcccaggugaagcagaucuacaagaccccucccaucaaggacuucggcggcuucaacuucagccagauccugcccgaccccagcaagcccagcaagcggagcuucaucgaggaccugcuguucaacaaggugacccuagccgacgccggcuucaucaagcaguacggcgacugccucggcgacauagccgcccgggaccugaucugcgcccagaaguucaacggccugaccgugcugccuccccugcugaccgacgagaugaucgcccaguacaccagcgcccuguuagccggaaccaucaccagcggcuggacuuucggcgcuggagccgcucugcagauccccuucgccaugcagauggccuaccgguucaacggcaucggcgugacccagaacgugcuguacgagaaccagaagcugaucgccaaccaguucaacagcgccaucggcaagauccaggacagccugagcagcaccgcuagcgcccugggcaagcugcaggacguggugaaccagaacgcccaggcccugaacacccuggugaagcagcugagcagcaacuucggcgccaucagcagcgugcugaacgacauccugagccggcuggacaaggucgaggccgaggugcagaucgaccggcugaucacuggccggcugcagagccugcagaccuacgugacccagcagcugauccgggccgccgagauucgggccagcgccaaccuggccgccaccaagaugagcgagugcgugcugggccagagcaagcggguggacuucugcggcaagggcuaccaccugaugagcuuuccccagagcgcaccccacggagugguguuccugcacgugaccuacgugcccgcccaggagaagaacuucaccaccgccccagccaucugccacgacggcaaggcccacuuuccccgggagggcguguucgugagcaacggcacccacugguucgugacccagcggaacuucuacgagccccagaucaucaccaccgacaacaccuucgugagcggcaacugcgacguggugaucggcaucgugaacaacaccguguacgauccccugcagcccgagcuggacagcuucaaggaggagcuggacaaguacuucaagaaucacaccagccccgacguggaccugggcgacaucagcggcaucaacgccagcguggugaacauccagaaggagaucgaucggcugaacgagguggccaagaaccugaacgagagccugaucgaccugcaggagcugggcaaguacgagcaguacaucaaguggcccugguacaucuggcugggcuucaucgccggccugaucgccaucgugauggugaccaucaugcugugcugcaugaccagcugcugcagcugccugaagggcuguugcagcugcggcagcugcugcaaguucgacgaggacgacagcgagcccgugcugaagggcgugaagcugcacuacaccugaggacuaguuauaagacugacuagcccgaugggccucccaacgggcccuccuccccuccuugcaccgagauuaauagaucucaaaggcucuuuucagagccaccaaaaaaaaaaaaaaaaaaaaaaaaaaaaaaaaaaaaaaaaaaaaaaaaaaaaaaaaaaaaaaaaaaaaaaaaaaaaaaaaaaaaaaaaaaaaaaaaaaaaa

SEQ ID NO: 24343 - RNA, 4041 nt, Artificial Sequence
  SARS-CoV-2/Wuhan/WIV05/2019__EPI_ISL_402128 spike protein mRNA gc (1-1273)
aggagaaagcuuaccauguucguguuccuggugcugcugccccuggugagcagccagugcgugaaccugaccacccggacccagcugcccccugccuacaccaacagcuucacccggggcguguacuaccccgacaagguguuccggagcagcgugcugcacagcacccaggaccuguuccugcccuucuucagcaacgugaccugguuccacgccauccacgugagcggcaccaacggcaccaagcgguucgacaacccagugcugcccuucaacgacggcguguacuucgccagcaccgagaagucaaacaucauccggggcuggaucuucggcaccacccuggacagcaagacacagagccugcugaucgugaacaacgccaccaacguggugaucaaggugugcgaguuucaguucugcaacgaccccuuccugggcguguacuaccacaagaacaacaagagcuggauggagagcgaguuccgggucuacagcagcgcuaacaauugcaccuucgaguacgugagccagcccuuccugauggaccucgagggcaagcagggcaacuucaagaaccugcgggaguucguguucaagaacaucgauggcuacuucaagaucuacagcaagcacacccccaucaaccuggugcgggaccugccccagggauucagcgcccuggagccucugguggaccugcccaucggcaucaacaucaccagguuccagacccugcuggcccugcaccggagcuaccugacccccggcgacagcagcagcggcuggaccgccggcgccgccgcauacuacgugggcuaccugcagccacggaccuuccugcugaaguacaacgagaacggcaccaucaccgacgccguggacugcgcccuggacccccugagcgagaccaagugcacccuaaagagcuucaccguggagaagggcaucuaccagaccagcaacuuccgggugcagcccacugagagcaucgugcgguuccccaacauuaccaaccugugucccuucggcgagguguucaacgccacccgguucgccagcguguacgccuggaaccggaagcggaucagcaacugcguggccgacuacagcgugcuguacaacagcgccagcuucagcaccuucaagugcuacggcgugagcccuaccaagcugaacgaccugugcuucaccaacguguacgcugacagcuucgugauccggggcgacgaggugcggcagaucgcccccggccagaccggcaagaucgccgacuacaacuacaagcugcccgacgacuucaccggcugcgugaucgccuggaacagcaacaaccuggacagcaaggugggcggcaacuacaacuaccuguaccggcuguuccguaagagcaaccugaagccauucgagcgggacaucagcaccgagaucuaccaggccggcagcacccccugcaacgguguggagggcuuuaacugcuacuucccccugcagagcuacggcuuccagcccaccaacggcgugggcuaccagcccuaccgggugguggugcugagcuucgagcugcugcacgcccccgccaccgugugcggcccuaaaaagagcaccaaccuggugaagaacaagugcgugaacuucaauuucaacggccugaccggcaccggcgugcugaccgagagcaacaagaaguuccugcccuuccagcaguucggccgggauaucgccgacaccaccgacgcagugcgggacccccagacccuggagauccuggacaucaccccaugcagcuucggcggcgugagcgucaucacccccggcacaaacaccagcaaccagguggccgugcuguaccaggacgugaacugcaccgaggugcccguggccauccacgccgaccagcugacccccaccuggcggguguacagcaccggaagcaacguguuccagacccgggccggcugccugaucggcgccgagcacgugaacaacuccuacgagugcgacauccccaucggcgcuggcaucugcgccagcuaccagacccagaccaacagcccccggcgggcccggagcguggccagccagagcaucaucgccuacaccaugagcuuaggcgccgagaacagcguggccuacagcaacaacagcaucgcgaucccuaccaacuucaccaucagcgugaccaccgagauacugcccgugagcaugaccaagaccagcguggacuguaccauguacaucugcggcgacagcaccgagugcagcaaccugcugcugcaguacggcagcuucugcacccagcugaaccgggcccugaccggcaucgccguggagcaggacaagaacacccaagagguguucgcccaggugaagcagaucuacaagacucccccaaucaaggacuucggcggcuucaacuucagccagauccugcccgaccccagcaagcccagcaagcggagcuucaucgaggaccugcuguucaacaaggugacccuggccgacgccggcuucaucaagcaguacggcgauugccugggcgacaucgccgcucgggaccugaucugcgcccagaaguucaacgggcugaccgugcugcccccucugcugaccgacgagaugaucgcccaguacaccagcgcccugcuugccggcaccaucaccagcggcuggaccuucggcgccggcgcagcccugcagauccccuucgccaugcagauggccuaccgguucaacggcaucggcgugacccagaacgugcuguacgagaaccagaagcugaucgccaaccaguucaacagcgccaucggcaagauccaggacagccugagcagcaccgccagcgcccugggcaagcugcaggacguggugaaccagaacgcucaggcccugaacacccuggugaagcagcugagcagcaacuucggcgccaucagcucagugcugaaugacauccugagcaggcuggacaagguggaggccgaggugcagaucgaccggcugaucaccggccggcugcagagccugcagaccuacgugacccagcagcugauccgggccgccgagauccgggccagcgccaaccuggcagccaccaagaugagcgagugcgugcugggccagagcaagcggguggacuuuugcggcaagggcuaccaccugaugagcuucccccagagcgccccacacggcgugguguuccuccacgucacauacgugcccgcccaggagaagaacuucaccaccgcccccgccauuugccacgacggcaaggcucacuucccccgggagggcguguucgugagcaacggaacccacugguucgugacccagcggaacuucuacgagccccagaucaucaccaccgacaacaccuucgugagcggcaacugcgacguggugaucggcaucgugaacaacaccguguacgacccccugcagccugagcuggacagcuucaaggaggagcuggacaaguacuucaagaaccacaccagccccgauguggaccugggcgacaucagcggcaucaacgccagcguggugaacauccagaaggagaucgaccggcugaacgagguggccaagaaccugaacgagagccugaucgaccugcaggagcugggcaaguacgagcaguacaucaaguggcccugguacaucuggcugggcuucaucgccggccugaucgccaucgugauggugaccaucaugcugugcugcaugaccagcugcuguagcugccugaagggcugcugcagcugcggcagcugcugcaaguucgacgaggacgacagcgagccagugcugaagggcgugaagcugcacuacaccugaggacuaguuauaagacugacuagcccgaugggccucccaacgggcccuccuccccuccuugcaccgagauuaauagaucucaaaggcucuuuucagagccaccaaaaaaaaaaaaaaaaaaaaaaaaaaaaaaaaaaaaaaaaaaaaaaaaaaaaaaaaaaaaaaaaaaaaaaaaaaaaaaaaaaaaaaaaaaaaaaaaaaaaa

SEQ ID NO: 24344 - RNA, 4041 nt, Artificial Sequence
  SARS-CoV-2/Wuhan/WIV05/2019__EPI_ISL_402128 spike protein mRNA gc (1-1273)(D614G)
aggagaaagcuuaccauguucguguuccuggugcugcugccccuggugagcagccagugcgugaaccugaccacccggacccagcugcccccugccuacaccaacagcuucacccggggcguguacuaccccgacaagguguuccggagcagcgugcugcacagcacccaggaccuguuccugcccuucuucagcaacgugaccugguuccacgccauccacgugagcggcaccaacggcaccaagcgguucgacaacccagugcugcccuucaacgacggcguguacuucgccagcaccgagaagucaaacaucauccggggcuggaucuucggcaccacccuggacagcaagacacagagccugcugaucgugaacaacgccaccaacguggugaucaaggugugcgaguuucaguucugcaacgaccccuuccugggcguguacuaccacaagaacaacaagagcuggauggagagcgaguuccgggucuacagcagcgcuaacaauugcaccuucgaguacgugagccagcccuuccugauggaccucgagggcaagcagggcaacuucaagaaccugcgggaguucguguucaagaacaucgauggcuacuucaagaucuacagcaagcacacccccaucaaccuggugcgggaccugccccagggauucagcgcccuggagccucugguggaccugcccaucggcaucaacaucaccagguuccagacccugcuggcccugcaccggagcuaccugacccccggcgacagcagcagcggcuggaccgccggcgccgccgcauacuacgugggcuaccugcagccacggaccuuccugcugaaguacaacgagaacggcaccaucaccgacgccguggacugcgcccuggacccccugagcgagaccaagugcacccuaaagagcuucaccguggagaagggcaucuaccagaccagcaacuuccgggugcagcccacugagagcaucgugcgguuccccaacauuaccaaccugugucccuucggcgagguguucaacgccacccgguucgccagcguguacgccuggaaccggaagcggaucagcaacugcguggccgacuacagcgugcuguacaacagcgccagcuucagcaccuucaagugcuacggcgugagcccuaccaagcugaacgaccugugcuucaccaacguguacgcugacagcuucgugauccggggcgacgaggugcggcagaucgcccccggccagaccggcaagaucgccgacuacaacuacaagcugcccgacgacuucaccggcugcgugaucgccuggaacagcaacaaccuggacagcaaggugggcggcaacuacaacuaccuguaccggcuguuccguaagagcaaccugaagccauucgagcgggacaucagcaccgagaucuaccaggccggcagcacccccugcaacgguguggagggcuuuaacugcuacuucccccugcagagcuacggcuuccagcccaccaacggcgugggcuaccagcccuaccgggugguggugcugagcuucgagcugcugcacgcccccgccaccgugugcggcccuaaaaagagcaccaaccuggugaagaacaagugcgugaacuucaauuucaacggccugaccggcaccggcgugcugaccgagagcaacaagaaguuccugcccuuccagcaguucggccgggauaucgccgacaccaccgacgcagugcgggacccccagacccuggagauccuggacaucaccccaugcagcuucggcggcgugagcgucaucacccccggcacaaacaccagcaaccagguggccgugcuguaccagggagugaacugcaccgaggugcccguggccauccacgccgaccagcugacccccaccuggcggguguacagcaccggcagcaacguguuccagacccgggccggcugccugaucggcgccgagcacgugaacaacuccuacgagugcgacauccccaucggcgcuggcaucugcgccagcuaccagacccagaccaacagcccccggcgggcccggagcguggccagccagagcaucaucgccuacaccaugagcuuaggcgccgagaacagcguggccuacagcaacaacagcaucgcgaucccuaccaacuucaccaucagcgugaccaccgagauacugcccgugagcaugaccaagaccagcguggacuguaccauguacaucugcggcgacagcaccgagugcagcaaccugcugcugcaguacggcagcuucugcacccagcugaaccgggcccugaccggcaucgccguggagcaggacaagaacacccaagagguguucgcccaggugaagcagaucuacaagacucccccaaucaaggacuucggcggcuucaacuucagccagauccugcccgaccccagcaagcccagcaagcggagcuucaucgaggaccugcuguucaacaaggugacccuggccgacgccggcuucaucaagcaguacggcgacugccugggggauaucgccgcucgggaccugaucugcgcccagaaguucaacggccugaccgugcugcccccucugcugaccgacgagaugaucgcccaguacaccagcgcccugcuugccggcaccaucaccagcggcuggaccuucggcgccggcgcagcccugcagauccccuucgccaugcagauggccuaccgguucaacggcaucggcgugacccagaacgugcuguacgagaaccagaagcugaucgccaaccaguucaacagcgccaucggcaagauccaggacagccugagcagcaccgccagcgcccugggcaagcugcaggacguggugaaccagaacgcucaggcccugaacacccuggugaagcagcugagcagcaacuucggcgccaucagcucagugcugaaugacauccugagcaggcuggacaagguggaggccgaggugcagaucgaccggcugaucaccggccggcugcagagccugcagaccuacgugacccagcagcugauccgggccgccgagauccgggccagcgccaaccuggcagccaccaagaugagcgagugcgugcugggccagagcaagcggguggacuuuugcggcaagggcuaccaccugaugagcuucccccagagcgccccacacggcgugguguuccuccacgucacauacgugcccgcccaggagaagaacuucaccaccgcccccgccauuugccacgacggcaaggcucacuucccccgggagggaguguucgugagcaacggcacccacugguucgugacccagcggaacuucuacgagccccagaucaucaccaccgacaacaccuucgugagcggcaacugcgacguggugaucggcaucgugaacaacaccguguacgacccccugcagccugagcuggacagcuucaaggaggagcuggacaaguacuucaagaaccacaccagccccgacguggaucugggcgacaucagcggcaucaacgccagcguggugaacauccagaaggagaucgaccggcugaacgagguggccaagaaccugaacgagagccugaucgaccugcaggagcugggcaaguacgagcaguacaucaaguggcccugguacaucuggcugggcuucaucgccggccugaucgccaucgugauggugaccaucaugcugugcugcaugaccagcugcuguagcugccugaagggcugcugcagcugcggcagcugcugcaaguucgacgaggacgacagcgagccagugcugaagggcgugaagcugcacuacaccugaggacuaguuauaagacugacuagcccgaugggccucccaacgggcccuccuccccuccuugcaccgagauuaauagaucucaaaggcucuuuucagagccaccaaaaaaaaaaaaaaaaaaaaaaaaaaaaaaaaaaaaaaaaaaaaaaaaaaaaaaaaaaaaaaaaaaaaaaaaaaaaaaaaaaaaaaaaaaaaaaaaaaaaa

SEQ ID NO: 24345 - RNA, 4041 nt, Artificial Sequence
  SARS-CoV-2/Wuhan/WIV05/2019__EPI_ISL_402128 spike protein mRNA gc (1-1273)(A222V_D614G)
aggagaaagcuuaccauguucguguuccuggugcugcugccccuggugagcagccagugcgugaaccugaccacccggacccagcugcccccugccuacaccaacagcuucacccggggcguguacuaccccgacaagguguuccggagcagcgugcugcacagcacccaggaccuguuccugcccuucuucagcaacgugaccugguuccacgccauccacgugagcggcaccaacggcaccaagcgguucgacaacccagugcugcccuucaacgacggcguguacuucgccagcaccgagaagucaaacaucauccggggcuggaucuucggcaccacccuggacagcaagacacagagccugcugaucgugaacaacgccaccaacguggugaucaaggugugcgaguuucaguucugcaacgaccccuuccugggcguguacuaccacaagaacaacaagagcuggauggagagcgaguuccgggucuacagcagcgcuaacaauugcaccuucgaguacgugagccagcccuuccugauggaccucgagggcaagcagggcaacuucaagaaccugcgggaguucguguucaagaacaucgauggcuacuucaagaucuacagcaagcacacccccaucaaccuggugcgggaccugccccagggauucagcgugcuggagccucugguggaccugcccaucggcaucaacaucaccagguuccagacccugcuggcccugcaccggagcuaccugacccccggcgacagcagcagcggcuggaccgccggcgccgccgccuacuacgugggcuaccugcagccacggaccuuccugcugaaguacaacgagaacggcaccaucaccgacgcaguggacugcgcccuggacccccugagcgagaccaagugcacccuaaagagcuucaccguggagaagggcaucuaccagaccagcaacuuccgggugcagcccacugagagcaucgugcgguuccccaacauuaccaaccugugucccuucggcgagguguucaacgccacccgguucgccagcguguacgccuggaaccggaagcggaucagcaacugcguggccgacuacagcgugcuguacaacagcgccagcuucagcaccuucaagugcuacggcgugagcccuaccaagcugaacgaccugugcuucaccaacguguacgccgacagcuucgugauccggggcgacgaggugcggcagaucgcucccggccagaccggcaagaucgccgacuacaacuacaagcugcccgacgacuucaccggcugcgugaucgccuggaacagcaacaaccuggacagcaaggugggcggcaacuacaacuaccuguaccggcuguuccguaagagcaaccugaagccauucgagcgggacaucagcaccgagaucuaccaggccggcagcacccccugcaacgguguggagggcuuuaacugcuacuucccccugcagagcuacggcuuccagcccaccaacggcgugggcuaccagcccuaccgggugguggugcugagcuucgagcugcugcacgcccccgccaccgugugcggcccuaaaaagagcaccaaccuggugaagaacaagugcgugaacuucaauuucaacggccugaccggcaccggcgugcugaccgagagcaacaagaaguuccugcccuuccagcaguucggccgggauaucgccgacaccaccgacgccgugcgggacccccagacccuggagauccuggacaucaccccaugcagcuucggcggcgucagcgugaucacccccggcacaaacaccagcaaccagguggcagugcuguaccagggagugaacugcaccgaggugcccguggccauccacgccgaccagcugacccccaccuggcggguguacagcaccggcagcaacguguuccagacccgggccggcugccugaucggcgccgagcacgugaacaacuccuacgagugcgacauccccaucggcgccggcaucugcgcuagcuaccagacccagaccaacagcccccggcgggcccggagcguggccagccagagcaucaucgccuacaccaugagcuuaggcgccgagaacagcguggccuacagcaacaacagcaucgccaucccuaccaacuucaccaucagcgugaccaccgagauacugcccgugagcaugaccaagaccagcguggacuguaccauguacaucugcggcgacagcaccgagugcagcaaccugcugcugcaguacggcagcuucugcacccagcugaaccgggcgcugaccggcaucgccguggagcaggacaagaacacccaagagguguucgcccaggugaagcagaucuacaagacucccccaaucaaggacuucggcggcuucaacuucagccagauccugcccgaccccagcaagcccagcaagcggagcuucaucgaggaccugcuguucaacaaggugacccuggccgacgccggcuucaucaagcaguacggcgacugccugggggauaucgccgcccgggaccugaucugcgcucagaaguucaacggccugaccgugcugcccccucugcugaccgacgagaugaucgcccaguacaccagcgcccugcuugccggcaccaucaccagcggcuggaccuucggcgccggcgccgcacugcagauccccuucgccaugcagauggccuaccgguucaacggcaucggcgugacccagaacgugcuguacgagaaccagaagcugaucgccaaccaguucaacagcgccaucggcaagauccaggacagccugagcagcaccgccagcgcccugggcaagcugcaggacguggugaaccagaacgcccaggcucugaacacccuggugaagcagcugagcagcaacuucggcgccaucagcucagugcugaaugacauccugagcaggcuggacaagguggaggccgaggugcagaucgaccggcugaucaccggccggcugcagagccugcagaccuacgugacccagcagcugauccgggccgccgagauccgggccagcgccaaccuggccgcaaccaagaugagcgagugcgugcugggccagagcaagcggguggacuuuugcggcaagggcuaccaccugaugagcuucccccagagcgccccacacggcguggucuuccuccacgugacauacgugcccgcccaggagaagaacuucaccaccgcccccgccauuugccacgacggcaaggcccacuucccccgggagggaguguucgugagcaacggcacccacugguucgugacccagcggaacuucuacgagccccagaucaucaccaccgacaacaccuucgugagcggcaacugcgacguggugaucggcaucgugaacaacaccguguacgacccccugcagccugagcuggacagcuucaaggaggagcuggacaaguacuucaagaaccacaccagccccgacguggaucugggcgacaucagcggcaucaacgcuagcguggugaacauccagaaggagaucgaccggcugaacgagguggccaagaaccugaacgagagccugaucgaccugcaggagcugggcaaguacgagcaguacaucaaguggcccugguacaucuggcugggcuucaucgccggccugaucgccaucgugauggugaccaucaugcugugcugcaugaccagcugcuguagcugccugaagggcugcugcagcugcggcagcugcugcaaguucgacgaggacgacagcgagccagugcugaagggcgugaagcugcacuacaccugaggacuaguuauaagacugacuagcccgaugggccucccaacgggcccuccuccccuccuugcaccgagauuaauagaucucaaaggcucuuuucagagccaccaaaaaaaaaaaaaaaaaaaaaaaaaaaaaaaaaaaaaaaaaaaaaaaaaaaaaaaaaaaaaaaaaaaaaaaaaaaaaaaaaaaaaaaaaaaaaaaaaaaaa

SEQ ID NO: 24346 - RNA, 4041 nt, Artificial Sequence
  SARS-CoV-2/Wuhan/WIV05/2019__EPI_ISL_402128 spike protein mRNA gc (1-1273)(N439K_D614G)
aggagaaagcuuaccauguucguguuccuggugcugcugccccuggugagcagccagugcgugaaccugaccacccggacccagcugcccccugccuacaccaacagcuucacccggggcguguacuaccccgacaagguguuccggagcagcgugcugcacagcacccaggaccuguuccugcccuucuucagcaacgugaccugguuccacgccauccacgugagcggcaccaacggcaccaagcgguucgacaacccagugcugcccuucaacgacggcguguacuucgccagcaccgagaagucaaacaucauccggggcuggaucuucggcaccacccuggacagcaagacacagagccugcugaucgugaacaacgccaccaacguggugaucaaggugugcgaguuucaguucugcaacgaccccuuccugggcguguacuaccacaagaacaacaagagcuggauggagagcgaguuccgggucuacagcagcgcuaacaauugcaccuucgaguacgugagccagcccuuccugauggaccucgagggcaagcagggcaacuucaagaaccugcgggaguucguguucaagaacaucgauggcuacuucaagaucuacagcaagcacacccccaucaaccuggugcgggaccugccccagggauucagcgcccuggagccucugguggaccugcccaucggcaucaacaucaccagguuccagacccugcuggcccugcaccggagcuaccugacccccggcgacagcagcagcggcuggaccgccggcgccgccgcauacuacgugggcuaccugcagccacggaccuuccugcugaaguacaacgagaacggcaccaucaccgacgccguggacugcgcccuggacccccugagcgagaccaagugcacccuaaagagcuucaccguggagaagggcaucuaccagaccagcaacuuccgggugcagcccacugagagcaucgugcgguuccccaacauuaccaaccugugucccuucggcgagguguucaacgccacccgguucgccagcguguacgccuggaaccggaagcggaucagcaacugcguggccgacuacagcgugcuguacaacagcgccagcuucagcaccuucaagugcuacggcgugagcccuaccaagcugaacgaccugugcuucaccaacguguacgcugacagcuucgugauccggggcgacgaggugcggcagaucgcccccggccagaccggcaagaucgccgacuacaacuacaagcugcccgacgacuucaccggcugcgugaucgccuggaacagcaagaaccuggacagcaaggugggcggcaacuacaacuaccuguaccggcuguuccguaagagcaaccugaagccauucgagcgggacaucagcaccgagaucuaccaggccggcagcacccccugcaacgguguggagggcuuuaacugcuacuucccccugcagagcuacggcuuccagcccaccaacggcgugggcuaccagcccuaccgggugguggugcugagcuucgagcugcugcacgcccccgccaccgugugcggcccuaaaaagagcaccaaccuggugaagaacaagugcgugaacuucaacuucaauggccugaccggcaccggcgugcugaccgagagcaacaagaaguuccugcccuuccagcaguucggccgggauaucgccgacaccaccgacgcagugcgggacccccagacccuggagauccuggacaucaccccaugcagcuucggcggcgugagcgucaucacccccggcacaaacaccagcaaccagguggccgugcuguaccagggagugaacugcaccgaggugcccguggccauccacgccgaccagcugacccccaccuggcggguguacagcaccggcagcaacguguuccagacccgggccggcugccugaucggcgccgagcacgugaacaacuccuacgagugcgacauccccaucggcgcuggcaucugcgccagcuaccagacccagaccaacagcccccggcgggcccggagcguggccagccagagcaucaucgccuacaccaugagcuuaggcgccgagaacagcguggccuacagcaacaacagcaucgcgaucccuaccaacuucaccaucagcgugaccaccgagauacugcccgugagcaugaccaagaccagcguggacuguaccauguacaucugcggcgacagcaccgagugcagcaaccugcugcugcaguacggcagcuucugcacccagcugaaccgggcccugaccggcaucgccguggagcaggacaagaacacccaagagguguucgcccaggugaagcagaucuacaagacucccccaaucaaggacuucggcggcuucaacuucagccagauccugcccgaccccagcaagcccagcaagcggagcuucaucgaggaccugcuguucaacaaggugacccuggccgacgccggcuucaucaagcaguacggcgacugccugggggauaucgccgcucgggaccugaucugcgcccagaaguucaacggccugaccgugcugcccccucugcugaccgacgagaugaucgcccaguacaccagcgcccugcuugccggcaccaucaccagcggcuggaccuucggcgccggcgcagcccugcagauccccuucgccaugcagauggccuaccgguucaacggcaucggcgugacccagaacgugcuguacgagaaccagaagcugaucgccaaccaguucaacagcgccaucggcaagauccaggacagccugagcagcaccgccagcgcccugggcaagcugcaggacguggugaaccagaacgcucaggcccugaacacccuggugaagcagcugagcagcaacuucggcgccaucagcucagugcugaacgacauccugagcaggcuggacaagguggaggccgaggugcagaucgaccggcugaucaccggccggcugcagagccugcagaccuacgugacccagcagcugauccgggccgccgagauccgggccagcgccaaucuggcagccaccaagaugagcgagugcgugcugggccagagcaagcggguggacuuuugcggcaagggcuaccaccugaugagcuucccccagagcgccccacacggcgugguguuccuccacgucacauacgugcccgcccaggagaagaacuucaccaccgcccccgccauuugccacgacggcaaggcucacuucccccgggagggaguguucgugagcaacggcacccacugguucgugacccagcggaacuucuacgagccccagaucaucaccaccgacaacaccuucgugagcggcaacugcgacguggugaucggcaucgugaacaacaccguguacgacccccugcagccugagcuggacagcuucaaggaggagcuggacaaguacuucaagaaccacaccagccccgacguggaucugggcgacaucagcggcaucaacgccagcguggugaacauccagaaggagaucgaccggcugaacgagguggccaagaaccugaacgagagccugaucgaccugcaggagcugggcaaguacgagcaguacaucaaguggcccugguacaucuggcugggcuucaucgccggccugaucgccaucgugauggugaccaucaugcugugcugcaugaccagcugcuguagcugccugaagggcugcugcagcugcggcagcugcugcaaguucgacgaggacgacagcgagccagugcugaagggcgugaagcugcacuacaccugaggacuaguuauaagacugacuagcccgaugggccucccaacgggcccuccuccccuccuugcaccgagauuaauagaucucaaaggcucuuuucagagccaccaaaaaaaaaaaaaaaaaaaaaaaaaaaaaaaaaaaaaaaaaaaaaaaaaaaaaaaaaaaaaaaaaaaaaaaaaaaaaaaaaaaaaaaaaaaaaaaaaaaaa

SEQ ID NO: 24347 - RNA, 4041 nt, Artificial Sequence
  SARS-CoV-2/Wuhan/WIV05/2019__EPI_ISL_402128 spike protein mRNA gc (1-1273)(S477N_D614G)
aggagaaagcuuaccauguucguguuccuggugcugcugccccuggugagcagccagugcgugaaccugaccacccggacccagcugcccccugccuacaccaacagcuucacccggggcguguacuaccccgacaagguguuccggagcagcgugcugcacagcacccaggaccuguuccugcccuucuucagcaacgugaccugguuccacgccauccacgugagcggcaccaacggcaccaagcgguucgacaacccagugcugcccuucaacgacggcguguacuucgccagcaccgagaagucaaacaucauccggggcuggaucuucggcaccacccuggacagcaagacacagagccugcugaucgugaacaacgccaccaacguggugaucaaggugugcgaguuucaguucugcaacgaccccuuccugggcguguacuaccacaagaacaacaagagcuggauggagagcgaguuccgggucuacagcagcgcuaacaauugcaccuucgaguacgugagccagcccuuccugauggaccucgagggcaagcagggcaacuucaagaaccugcgggaguucguguucaagaacaucgauggcuacuucaagaucuacagcaagcacacccccaucaaccuggugcgggaccugccccagggauucagcgcccuggagccucugguggaccugcccaucggcaucaacaucaccagguuccagacccugcuggcccugcaccggagcuaccugacccccggcgacagcagcagcggcuggaccgccggcgccgccgcauacuacgugggcuaccugcagccacggaccuuccugcugaaguacaacgagaacggcaccaucaccgacgccguggacugcgcccuggacccccugagcgagaccaagugcacccuaaagagcuucaccguggagaagggcaucuaccagaccagcaacuuccgggugcagcccacugagagcaucgugcgguuccccaacauuaccaaccugugucccuucggcgagguguucaacgccacccgguucgccagcguguacgccuggaaccggaagcggaucagcaacugcguggccgacuacagcgugcuguacaacagcgccagcuucagcaccuucaagugcuacggcgugagcccuaccaagcugaacgaccugugcuucaccaacguguacgcugacagcuucgugauccggggcgacgaggugcggcagaucgcccccggccagaccggcaagaucgccgacuacaacuacaagcugcccgacgacuucaccggcugcgugaucgccuggaacagcaacaaccuggacagcaaggugggcggcaacuacaacuaccuguaccggcuguuccguaagagcaaccugaagccauucgagcgggacaucagcaccgagaucuaccaggccggcaacacccccugcaacgguguggagggcuuuaacugcuacuucccccugcagagcuacggcuuccagcccaccaacggcgugggcuaccagcccuaccgggugguggugcugagcuucgagcugcugcacgcccccgccaccgugugcggcccuaaaaagagcaccaaccuggugaagaacaagugcgugaauuucaacuucaacggccugaccggcaccggcgugcugaccgagagcaacaagaaguuccugcccuuccagcaguucggccgggauaucgccgacaccaccgacgcagugcgggacccccagacccuggagauccuggacaucaccccaugcagcuucggcggcgugagcgucaucacccccggcacaaacaccagcaaccagguggccgugcuguaccagggagugaacugcaccgaggugcccguggccauccacgccgaccagcugacccccaccuggcggguguacagcaccggcagcaacguguuccagacccgggccggcugccugaucggcgccgagcacgugaacaacagcuacgagugcgacauccccaucggcgcuggcaucugcgccuccuaccagacccagaccaacagcccccggcgggcccggagcguggccagccagagcaucaucgccuacaccaugagcuuaggcgccgagaacagcguggccuacagcaacaacagcaucgcgaucccuaccaacuucaccaucagcgugaccaccgagauacugcccgugagcaugaccaagaccagcguggacuguaccauguacaucugcggcgacagcaccgagugcagcaaccugcugcugcaguacggcagcuucugcacccagcugaaccgggcccugaccggcaucgccguggagcaggacaagaacacccaagagguguucgcccaggugaagcagaucuacaagacucccccaaucaaggacuucggcggcuucaacuucagccagauccugcccgaccccagcaagcccagcaagcggagcuucaucgaggaccugcuguucaacaaggugacccuggccgacgccggcuucaucaagcaguacggcgacugccugggggauaucgccgcucgggaccugaucugcgcccagaaguucaacggccugaccgugcugcccccucugcugaccgacgagaugaucgcccaguacaccagcgcccugcuugccggcaccaucaccagcggcuggaccuucggcgccggcgcagcccugcagauccccuucgccaugcagauggccuaccgguucaacggcaucggcgugacccagaacgugcuguacgagaaccagaagcugaucgccaaccaguucaacagcgccaucggcaagauccaggacagccugagcagcaccgccagcgcccugggcaagcugcaggacguggugaaccagaacgcucaggcccugaacacccuggugaagcagcugagcagcaauuucggcgccaucagcagcgugcugaacgacauccugucaaggcuggacaagguggaggccgaggugcagaucgaccggcugaucaccggccggcugcagagccugcagaccuacgugacccagcagcugauccgggccgccgagauccgggccagcgccaaccuggcagccaccaagaugagcgagugcgugcugggccagagcaagcggguggacuuuugcggcaagggcuaccaccugaugagcuucccccagagcgccccacacggcgugguguuccuccacgucacauacgugcccgcccaggagaagaacuucaccaccgcccccgccauuugccacgacggcaaggcucacuucccccgggagggaguguucgugagcaacggcacccacugguucgugacccagcggaacuucuacgagccccagaucaucaccaccgacaacaccuucgugagcggcaacugcgacguggugaucggcaucgugaacaacaccguguacgacccccugcagccugagcuggacagcuucaaggaggagcuggacaaguacuucaagaaccacaccagccccgacguggaucugggcgacaucagcggcaucaacgccagcguggugaacauccagaaggagaucgaccggcugaacgagguggccaagaaccugaacgagagccugaucgaccugcaggagcugggcaaguacgagcaguacaucaaguggcccugguacaucuggcugggcuucaucgccggccugaucgccaucgugauggugaccaucaugcugugcugcaugaccagcugcuguagcugccugaagggcugcugcagcugcggcagcugcugcaaguucgacgaggacgacagcgagccagugcugaagggcgugaagcugcacuacaccugaggacuaguuauaagacugacuagcccgaugggccucccaacgggcccuccuccccuccuugcaccgagauuaauagaucucaaaggcucuuuucagagccaccaaaaaaaaaaaaaaaaaaaaaaaaaaaaaaaaaaaaaaaaaaaaaaaaaaaaaaaaaaaaaaaaaaaaaaaaaaaaaaaaaaaaaaaaaaaaaaaaaaaaa

SEQ ID NO: 24348 - RNA, 4041 nt, Artificial Sequence
  SARS-CoV-2/Wuhan/WIV05/2019__EPI_ISL_402128 spike protein mRNA gc (1-1273)(N501Y_D614G)
aggagaaagcuuaccauguucguguuccuggugcugcugccccuggugagcagccagugcgugaaccugaccacccggacccagcugcccccugccuacaccaacagcuucacccggggcguguacuaccccgacaagguguuccggagcagcgugcugcacagcacccaggaccuguuccugcccuucuucagcaacgugaccugguuccacgccauccacgugagcggcaccaacggcaccaagcgguucgacaacccagugcugcccuucaacgacggcguguacuucgccagcaccgagaagucaaacaucauccggggcuggaucuucggcaccacccuggacagcaagacacagagccugcugaucgugaacaacgccaccaacguggugaucaaggugugcgaguuucaguucugcaacgaccccuuccugggcguguacuaccacaagaacaacaagagcuggauggagagcgaguuccgggucuacagcagcgcuaacaauugcaccuucgaguacgugagccagcccuuccugauggaccucgagggcaagcagggcaacuucaagaaccugcgggaguucguguucaagaacaucgauggcuacuucaagaucuacagcaagcacacccccaucaaccuggugcgggaccugccccagggauucagcgcccuggagccucugguggaccugcccaucggcaucaacaucaccagguuccagacccugcuggcccugcaccggagcuaccugacccccggcgacagcagcagcggcuggaccgccggcgccgccgcauacuacgugggcuaccugcagccacggaccuuccugcugaaguacaacgagaacggcaccaucaccgacgccguggacugcgcccuggacccccugagcgagaccaagugcacccuaaagagcuucaccguggagaagggcaucuaccagaccagcaacuuccgggugcagcccacugagagcaucgugcgguuccccaacauuaccaaccugugucccuucggcgagguguucaacgccacccgguucgccagcguguacgccuggaaccggaagcggaucagcaacugcguggccgacuacagcgugcuguacaacagcgccagcuucagcaccuucaagugcuacggcgugagcccuaccaagcugaacgaccugugcuucaccaacguguacgcugacagcuucgugauccggggcgacgaggugcggcagaucgcccccggccagaccggcaagaucgccgacuacaacuacaagcugcccgacgacuucaccggcugcgugaucgccuggaacagcaacaaccuggacagcaaggugggcggcaacuacaacuaccuguaccggcuguuccguaagagcaaccugaagccauucgagcgggacaucagcaccgagaucuaccaggccggcagcacccccugcaacgguguggagggcuuuaacugcuacuucccccugcagagcuacggcuuccagcccaccuacggcgugggcuaccagcccuaccgggugguggugcugagcuucgagcugcugcacgcccccgccaccgugugcggcccuaaaaagagcaccaaccuggugaagaacaagugcgugaacuucaacuucaauggccugaccggcaccggcgugcugaccgagagcaacaagaaguuccugcccuuccagcaguucggccgggauaucgccgacaccaccgacgcagugcgggacccccagacccuggagauccuggacaucaccccaugcagcuucggcggcgugagcgucaucacccccggcacaaacaccagcaaccagguggccgugcuguaccagggagugaacugcaccgaggugcccguggccauccacgccgaccagcugacccccaccuggcggguguacagcaccggcagcaacguguuccagacccgggccggcugccugaucggcgccgagcacgugaacaacuccuacgagugcgacauccccaucggcgcuggcaucugcgccagcuaccagacccagaccaacagcccccggcgggcccggagcguggccagccagagcaucaucgccuacaccaugagcuuaggcgccgagaacagcguggccuacagcaacaacagcaucgcgaucccuaccaacuucaccaucagcgugaccaccgagauacugcccgugagcaugaccaagaccagcguggacuguaccauguacaucugcggcgacagcaccgagugcagcaaccugcugcugcaguacggcagcuucugcacccagcugaaccgggcccugaccggcaucgccguggagcaggacaagaacacccaagagguguucgcccaggugaagcagaucuacaagacucccccaaucaaggacuucggcggcuucaacuucagccagauccugcccgaccccagcaagcccagcaagcggagcuucaucgaggaccugcuguucaacaaggugacccuggccgacgccggcuucaucaagcaguacggcgacugccugggggauaucgccgcucgggaccugaucugcgcccagaaguucaacggccugaccgugcugcccccucugcugaccgacgagaugaucgcccaguacaccagcgcccugcuugccggcaccaucaccagcggcuggaccuucggcgccggcgcagcccugcagauccccuucgccaugcagauggccuaccgguucaacggcaucggcgugacccagaacgugcuguacgagaaccagaagcugaucgccaaccaguucaacagcgccaucggcaagauccaggacagccugagcagcaccgccagcgcccugggcaagcugcaggacguggugaaccagaacgcucaggcccugaacacccuggugaagcagcugagcagcaacuucggcgccaucagcucagugcugaacgacauccugagcaggcuggacaagguggaggccgaggugcagaucgaccggcugaucaccggccggcugcagagccugcagaccuacgugacccagcagcugauccgggccgccgagauccgggccagcgccaaucuggcagccaccaagaugagcgagugcgugcugggccagagcaagcggguggacuuuugcggcaagggcuaccaccugaugagcuucccccagagcgccccacacggcgugguguuccuccacgucacauacgugcccgcccaggagaagaacuucaccaccgcccccgccauuugccacgacggcaaggcucacuucccccgggagggaguguucgugagcaacggcacccacugguucgugacccagcggaacuucuacgagccccagaucaucaccaccgacaacaccuucgugagcggcaacugcgacguggugaucggcaucgugaacaacaccguguacgacccccugcagccugagcuggacagcuucaaggaggagcuggacaaguacuucaagaaccacaccagccccgacguggaucugggcgacaucagcggcaucaacgccagcguggugaacauccagaaggagaucgaccggcugaacgagguggccaagaaccugaacgagagccugaucgaccugcaggagcugggcaaguacgagcaguacaucaaguggcccugguacaucuggcugggcuucaucgccggccugaucgccaucgugauggugaccaucaugcugugcugcaugaccagcugcuguagcugccugaagggcugcugcagcugcggcagcugcugcaaguucgacgaggacgacagcgagccagugcugaagggcgugaagcugcacuacaccugaggacuaguuauaagacugacuagcccgaugggccucccaacgggcccuccuccccuccuugcaccgagauuaauagaucucaaaggcucuuuucagagccaccaaaaaaaaaaaaaaaaaaaaaaaaaaaaaaaaaaaaaaaaaaaaaaaaaaaaaaaaaaaaaaaaaaaaaaaaaaaaaaaaaaaaaaaaaaaaaaaaaaaaa

SEQ ID NO: 24349 - RNA, 4035 nt, Artificial Sequence
  SARS-CoV-2/Wuhan/WIV05/2019__EPI_ISL_402128 spike protein mRNA gc (1-1273)(H69del_V70del_D614G)
aggagaaagcuuaccauguucguguuccuggugcugcugccccuggugagcagccagugcgugaaccugaccacccggacccagcugcccccugccuacaccaacagcuucacccggggcguguacuaccccgacaagguguuccggagcagcgugcugcacagcacccaggaccuguuccugcccuucuucagcaacgugaccugguuccacgccaucagcggcaccaacggcaccaagcgguucgacaacccagugcugcccuucaacgacggcguguacuucgccagcaccgagaagucaaacaucauccggggcuggaucuucggcaccacccuggacagcaagacacagagccugcugaucgugaacaacgccaccaacguggugaucaaggugugcgaguuucaguucugcaacgaccccuuccugggcguguacuaccacaagaacaacaagagcuggauggagagcgaguuccggguguacagcagcgcuaacaauugcaccuucgaguacgucagccagcccuuccugauggaccucgagggcaagcagggcaacuucaagaaccugcgggaguucguguucaagaacaucgauggcuacuucaagaucuacagcaagcacacccccaucaaccuggugcgggaccugccccagggauucagcgcccuggagccucugguggaccugcccaucggcaucaacaucaccagguuccagacccugcuggcccugcaccggagcuaccugacccccggcgacagcagcagcggcuggaccgccggcgccgccgcauacuacgugggcuaccugcagccacggaccuuccugcugaaguacaacgagaacggcaccaucaccgacgccguggacugcgcccuggacccccugagcgagaccaagugcacccuaaagagcuucaccguggagaagggcaucuaccagaccagcaacuuccgggugcagcccacugagagcaucgugcgguuccccaacauuaccaaccugugucccuucggcgagguguucaacgccacccgguucgccagcguguacgccuggaaccggaagcggaucagcaacugcguggccgacuacagcgugcuguacaacagcgccagcuucagcaccuucaagugcuacggcgugagcccuaccaagcugaacgaccugugcuucaccaacguguacgcugacagcuucgugauccggggcgacgaggugcggcagaucgcccccggccagaccggcaagaucgccgacuacaacuacaagcugcccgacgacuucaccggcugcgugaucgccuggaacagcaacaaccuggacagcaaggugggcggcaacuacaacuaccuguaccggcuguuccguaagagcaaccugaagccauucgagcgggacaucagcaccgagaucuaccaggccggcagcacccccugcaacgguguggagggcuuuaacugcuacuucccccugcagagcuacggcuuccagcccaccaacggcgugggcuaccagcccuaccgggugguggugcugagcuucgagcugcugcacgcccccgccaccgugugcggcccuaaaaagagcaccaaccuggugaagaacaagugcgugaacuucaauuucaacggccugaccggcaccggcgugcugaccgagagcaacaagaaguuccugcccuuccagcaguucggccgggauaucgccgacaccaccgacgcagugcgggacccccagacccuggagauccuggacaucaccccaugcagcuucggcggcgugagcgugaucacccccggcacaaacaccagcaaccaggucgccgugcuguaccagggagugaacugcaccgaggugcccguggccauccacgccgaccagcugacccccaccuggcggguguacagcaccggcagcaacguguuccagacccgggccggcugccugaucggcgccgagcacgugaacaacuccuacgagugcgacauccccaucggcgcuggcaucugcgccagcuaccagacccagaccaacagcccccggcgggcccggagcguggccagccagagcaucaucgccuacaccaugagcuuaggcgccgagaacagcguggccuacagcaacaacagcaucgcgaucccuaccaacuucaccaucagcgugaccaccgagauacugcccgugagcaugaccaagaccagcguggacuguaccauguacaucugcggcgacagcaccgagugcagcaaccugcugcugcaguacggcagcuucugcacccagcugaaccgggcccugaccggcaucgccguggagcaggacaagaacacccaagagguguucgcccaggugaagcagaucuacaagacucccccaaucaaggacuucggcggcuucaacuucagccagauccugcccgaccccagcaagcccagcaagcggagcuucaucgaggaccugcuguucaacaaggugacccuggccgacgccggcuucaucaagcaguacggcgacugccugggggauaucgccgcucgggaccugaucugcgcccagaaguucaacggccugaccgugcugcccccucugcugaccgacgagaugaucgcccaguacaccagcgcccugcuugccggcaccaucaccagcggcuggaccuucggcgccggcgcagcccugcagauccccuucgccaugcagauggccuaccgguucaacggcaucggcgugacccagaacgugcuguacgagaaccagaagcugaucgccaaccaguucaacagcgccaucggcaagauccaggacagccugagcagcaccgccagcgcccugggcaagcugcaggacguggugaaccagaacgcucaggcccugaacacccuggugaagcagcugagcagcaacuucggcgccaucagcucagugcugaaugacauccugagcaggcuggacaagguggaggccgaggugcagaucgaccggcugaucaccggccggcugcagagccugcagaccuacgugacccagcagcugauccgggccgccgagauccgggccagcgccaaccuggcagccaccaagaugagcgagugcgugcugggccagagcaagcggguggacuuuugcggcaagggcuaccaccugaugagcuucccccagagcgccccacacggcgugguguuccuccacgugacauacguccccgcccaggagaagaacuucaccaccgcccccgccauuugccacgacggcaaggcucacuucccccgggagggaguguucgugagcaacggcacccacugguucgugacccagcggaacuucuacgagccccagaucaucaccaccgacaacaccuucgugagcggcaacugcgacguggugaucggcaucgugaacaacaccguguacgacccccugcagccugagcuggacagcuucaaggaggagcuggacaaguacuucaagaaccacaccagccccgacguggaucugggcgacaucagcggcaucaacgccagcguggugaacauccagaaggagaucgaccggcugaacgagguggccaagaaccugaacgagagccugaucgaccugcaggagcugggcaaguacgagcaguacaucaaguggcccugguacaucuggcugggcuucaucgccggccugaucgccaucgugauggugaccaucaugcugugcugcaugaccagcugcuguagcugccugaagggcugcugcagcugcggcagcugcugcaaguucgacgaggacgacagcgagccagugcugaagggcgugaagcugcacuacaccugaggacuaguuauaagacugacuagcccgaugggccucccaacgggcccuccuccccuccuugcaccgagauuaauagaucucaaaggcucuuuucagagccaccaaaaaaaaaaaaaaaaaaaaaaaaaaaaaaaaaaaaaaaaaaaaaaaaaaaaaaaaaaaaaaaaaaaaaaaaaaaaaaaaaaaaaaaaaaaaaaaaaaaaa

SEQ ID NO: 24350 - RNA, 4041 nt, Artificial Sequence
  SARS-CoV-2/Wuhan/WIV05/2019__EPI_ISL_402128 spike protein mRNA gc (1-1273)(Y453F_D614G)
aggagaaagcuuaccauguucguguuccuggugcugcugccccuggugagcagccagugcgugaaccugaccacccggacccagcugcccccugccuacaccaacagcuucacccggggcguguacuaccccgacaagguguuccggagcagcgugcugcacagcacccaggaccuguuccugcccuucuucagcaacgugaccugguuccacgccauccacgugagcggcaccaacggcaccaagcgguucgacaacccagugcugcccuucaacgacggcguguacuucgccagcaccgagaagucaaacaucauccggggcuggaucuucggcaccacccuggacagcaagacacagagccugcugaucgugaacaacgccaccaacguggugaucaaggugugcgaguuucaguucugcaacgaccccuuccugggcguguacuaccacaagaacaacaagagcuggauggagagcgaguuccgggucuacagcagcgcuaacaauugcaccuucgaguacgugagccagcccuuccugauggaccucgagggcaagcagggcaacuucaagaaccugcgggaguucguguucaagaacaucgauggcuacuucaagaucuacagcaagcacacccccaucaaccuggugcgggaccugccccagggauucagcgcccuggagccucugguggaccugcccaucggcaucaacaucaccagguuccagacccugcuggcccugcaccggagcuaccugacccccggcgacagcagcagcggcuggaccgccggcgccgccgcauacuacgugggcuaccugcagccacggaccuuccugcugaaguacaacgagaacggcaccaucaccgacgccguggacugcgcccuggacccccugagcgagaccaagugcacccuaaagagcuucaccguggagaagggcaucuaccagaccagcaacuuccgggugcagcccacugagagcaucgugcgguuccccaacauuaccaaccugugucccuucggcgagguguucaacgccacccgguucgccagcguguacgccuggaaccggaagcggaucagcaacugcguggccgacuacagcgugcuguacaacagcgccagcuucagcaccuucaagugcuacggcgugagcccuaccaagcugaacgaccugugcuucaccaacguguacgcugacagcuucgugauccggggcgacgaggugcggcagaucgcccccggccagaccggcaagaucgccgacuacaacuacaagcugcccgacgacuucaccggcugcgugaucgccuggaacagcaacaaccuggacagcaaggugggcggcaacuacaacuaccuguuccggcuguuccguaagagcaaccugaagccauuugagcgggacaucagcaccgagaucuaccaggccggcagcacccccugcaacgguguggagggcuucaacugcuacuucccccugcagagcuacggcuuccagcccaccaacggcgugggcuaccagcccuaccgggugguggugcugagcuucgagcugcugcacgcccccgccaccgugugcggcccuaaaaagagcaccaaccuggugaagaacaagugcgugaacuucaauuucaacggccugaccggcaccggcgugcugaccgagagcaacaagaaguuccugcccuuccagcaguucggccgggauaucgccgacaccaccgacgcagugcgggacccccagacccuggagauccuggacaucaccccaugcagcuucggcggcgugagcgucaucacccccggcacaaacaccagcaaccagguggccgugcuguaccagggagugaacugcaccgaggugcccguggccauccacgccgaccagcugacccccaccuggcggguguacagcaccggcagcaacguguuccagacccgggccggcugccugaucggcgccgagcacgugaacaacuccuacgagugcgacauccccaucggcgcuggcaucugcgccagcuaccagacccagaccaacagcccccggcgggcccggagcguggccagccagagcaucaucgccuacaccaugagcuuaggcgccgagaacagcguggccuacagcaacaacagcaucgcgaucccuaccaacuucaccaucagcgugaccaccgagauacugcccgugagcaugaccaagaccagcguggacuguaccauguacaucugcggcgacagcaccgagugcagcaaccugcugcugcaguacggcagcuucugcacccagcugaaccgggcccugaccggcaucgccguggagcaggacaagaacacccaagagguguucgcccaggugaagcagaucuacaagacucccccaaucaaggacuucggcggcuucaacuucagccagauccugcccgaccccagcaagcccagcaagcggagcuucaucgaggaccugcuguucaacaaggugacccuggccgacgccggcuucaucaagcaguacggcgacugccugggggauaucgccgcucgggaccugaucugcgcccagaaguucaacggccugaccgugcugcccccucugcugaccgacgagaugaucgcccaguacaccagcgcccugcuugccggcaccaucaccagcggcuggaccuucggcgccggcgcagcccugcagauccccuucgccaugcagauggccuaccgguucaacggcaucggcgugacccagaacgugcuguacgagaaccagaagcugaucgccaaccaguucaacagcgccaucggcaagauccaggacagccugagcagcaccgccagcgcccugggcaagcugcaggacguggugaaccagaacgcucaggcccugaacacccuggugaagcagcugagcagcaacuuuggcgccaucagcucagugcugaaugacauccugagcaggcuggacaagguggaggccgaggugcagaucgaccggcugaucaccggccggcugcagagccugcagaccuacgugacccagcagcugauccgggccgccgagauccgggccagcgccaaccuggcagccaccaagaugagcgagugcgugcugggccagagcaagcggguggacuucugcggcaagggcuaccaccugaugagcuucccccagagcgccccacacggcgugguguuccuccacgucacauacgugcccgcccaggagaagaacuucaccaccgcccccgccauuugccacgacggcaaggcucacuucccccgggagggaguguucgugagcaacggcacccacugguucgugacccagcggaacuucuacgagccccagaucaucaccaccgacaacaccuucgugagcggcaacugcgacguggugaucggcaucgugaacaacaccguguacgacccccugcagccugagcuggacagcuucaaggaggagcuggacaaguacuucaagaaccacaccagccccgacguggaucugggcgacaucagcggcaucaacgccagcguggugaacauccagaaggagaucgaccggcugaacgagguggccaagaaccugaacgagagccugaucgaccugcaggagcugggcaaguacgagcaguacaucaaguggcccugguacaucuggcugggcuucaucgccggccugaucgccaucgugauggugaccaucaugcugugcugcaugaccagcugcuguagcugccugaagggcugcugcagcugcggcagcugcugcaaguucgacgaggacgacagcgagccagugcugaagggcgugaagcugcacuacaccugaggacuaguuauaagacugacuagcccgaugggccucccaacgggcccuccuccccuccuugcaccgagauuaauagaucucaaaggcucuuuucagagccaccaaaaaaaaaaaaaaaaaaaaaaaaaaaaaaaaaaaaaaaaaaaaaaaaaaaaaaaaaaaaaaaaaaaaaaaaaaaaaaaaaaaaaaaaaaaaaaaaaaaaa

SEQ ID NO: 24351 - RNA, 4041 nt, Artificial Sequence
  SARS-CoV-2/Wuhan/WIV05/2019__EPI_ISL_402128 spike protein mRNA gc (1-1273)(D614G_I692V)
aggagaaagcuuaccauguucguguuccuggugcugcugccccuggugagcagccagugcgugaaccugaccacccggacccagcugcccccugccuacaccaacagcuucacccggggcguguacuaccccgacaagguguuccggagcagcgugcugcacagcacccaggaccuguuccugcccuucuucagcaacgugaccugguuccacgccauccacgugagcggcaccaacggcaccaagcgguucgacaacccagugcugcccuucaacgacggcguguacuucgccagcaccgagaagucaaacaucauccggggcuggaucuucggcaccacccuggacagcaagacacagagccugcugaucgugaacaacgccaccaacguggugaucaaggugugcgaguuucaguucugcaacgaccccuuccugggcguguacuaccacaagaacaacaagagcuggauggagagcgaguuccgggucuacagcagcgcuaacaauugcaccuucgaguacgugagccagcccuuccugauggaccucgagggcaagcagggcaacuucaagaaccugcgggaguucguguucaagaacaucgauggcuacuucaagaucuacagcaagcacacccccaucaaccuggugcgggaccugccccagggauucagcgcccuggagccucugguggaccugcccaucggcaucaacaucaccagguuccagacccugcuggcccugcaccggagcuaccugacccccggcgacagcagcagcggcuggaccgccggcgccgccgcauacuacgugggcuaccugcagccacggaccuuccugcugaaguacaacgagaacggcaccaucaccgacgccguggacugcgcccuggacccccugagcgagaccaagugcacccuaaagagcuucaccguggagaagggcaucuaccagaccagcaacuuccgggugcagcccacugagagcaucgugcgguuccccaacauuaccaaccugugucccuucggcgagguguucaacgccacccgguucgccagcguguacgccuggaaccggaagcggaucagcaacugcguggccgacuacagcgugcuguacaacagcgccagcuucagcaccuucaagugcuacggcgugagcccuaccaagcugaacgaccugugcuucaccaacguguacgcugacagcuucgugauccggggcgacgaggugcggcagaucgcccccggccagaccggcaagaucgccgacuacaacuacaagcugcccgacgacuucaccggcugcgugaucgccuggaacagcaacaaccuggacagcaaggugggcggcaacuacaacuaccuguaccggcuguuccguaagagcaaccugaagccauucgagcgggacaucagcaccgagaucuaccaggccggcagcacccccugcaacgguguggagggcuuuaacugcuacuucccccugcagagcuacggcuuccagcccaccaacggcgugggcuaccagcccuaccgggugguggugcugagcuucgagcugcugcacgcccccgccaccgugugcggcccuaaaaagagcaccaaccuggugaagaacaagugcgugaacuucaauuucaacggccugaccggcaccggcgugcugaccgagagcaacaagaaguuccugcccuuccagcaguucggccgggauaucgccgacaccaccgacgcagugcgggacccccagacccuggagauccuggacaucaccccaugcagcuucggcggcgugagcgucaucacccccggcacaaacaccagcaaccagguggccgugcuguaccagggagugaacugcaccgaggugcccguggccauccacgccgaccagcugacccccaccuggcggguguacagcaccggcagcaacguguuccagacccgggccggcugccugaucggcgccgagcacgugaacaacuccuacgagugcgacauccccaucggcgcuggcaucugcgccagcuaccagacccagaccaacagcccccggcgggcccggagcguggccagccagagcgugaucgccuacaccaugagcuuaggcgccgagaacagcguggccuacagcaacaacagcaucgcgaucccuaccaacuucaccaucagcgugaccaccgagauccugcccgugagcaugaccaagaccagcguggacuguaccauguacauaugcggcgacagcaccgagugcagcaaccugcugcugcaguacggcagcuucugcacccagcugaaccgggcccugaccggcaucgccguggagcaggacaagaacacccaagagguguucgcccaggugaagcagaucuacaagacucccccaaucaaggacuucggcggcuucaacuucagccagauccugcccgaccccagcaagcccagcaagcggagcuucaucgaggaccugcuguucaacaaggugacccuggccgacgccggcuucaucaagcaguacggcgacugccugggggauaucgccgcucgggaccugaucugcgcccagaaguucaacggccugaccgugcugcccccucugcugaccgacgagaugaucgcccaguacaccagcgcccugcuugccggcaccaucaccagcggcuggaccuucggcgccggcgcagcccugcagauccccuucgccaugcagauggccuaccgguucaacggcaucggcgugacccagaacgugcuguacgagaaccagaagcugaucgccaaccaguucaacagcgccaucggcaagauccaggacagccugagcagcaccgccagcgcccugggcaagcugcaggacguggugaaccagaacgcucaggcccugaacacccuggugaagcagcugagcagcaacuucggcgccaucagcucagugcugaaugacauccugagcaggcuggacaagguggaggccgaggugcagaucgaccggcugaucaccggccggcugcagagccugcagaccuacgugacccagcagcugauccgggccgccgagauccgggccagcgccaaccuggcagccaccaagaugagcgagugcgugcugggccagagcaagcggguggacuuuugcggcaagggcuaccaccugaugagcuucccccagagcgccccacacggcguggucuuccuccacgugacauacgugcccgcccaggagaagaacuucaccaccgcccccgccaucugccacgacggcaaggcucacuucccccgggagggaguguucgugagcaacggcacccacugguucgugacccagcggaacuucuacgagccccagauuaucaccaccgacaacaccuucgugagcggcaacugcgacguggugaucggcaucgugaacaacaccguguacgacccccugcagccugagcuggacagcuucaaggaggagcuggacaaguacuucaagaaccacaccagccccgacguggaucugggcgacaucagcggcaucaacgccagcguggugaacauccagaaggagaucgaccggcugaacgagguggccaagaaccugaacgagagccugaucgaccugcaggagcugggcaaguacgagcaguacaucaaguggcccugguacaucuggcugggcuucaucgccggccugaucgccaucgugauggugaccaucaugcugugcugcaugaccagcugcuguagcugccugaagggcugcugcagcugcggcagcugcugcaaguucgacgaggacgacagcgagccagugcugaagggcgugaagcugcacuacaccugaggacuaguuauaagacugacuagcccgaugggccucccaacgggcccuccuccccuccuugcaccgagauuaauagaucucaaaggcucuuuucagagccaccaaaaaaaaaaaaaaaaaaaaaaaaaaaaaaaaaaaaaaaaaaaaaaaaaaaaaaaaaaaaaaaaaaaaaaaaaaaaaaaaaaaaaaaaaaaaaaaaaaaaa

SEQ ID NO: 24352 - RNA, 4041 nt, Artificial Sequence
  SARS-CoV-2/Wuhan/WIV05/2019__EPI_ISL_402128 spike protein mRNA gc (1-1273)(D614G_M1229I)
aggagaaagcuuaccauguucguguuccuggugcugcugccccuggugagcagccagugcgugaaccugaccacccggacccagcugcccccugccuacaccaacagcuucacccggggcguguacuaccccgacaagguguuccggagcagcgugcugcacagcacccaggaccuguuccugcccuucuucagcaacgugaccugguuccacgccauccacgugagcggcaccaacggcaccaagcgguucgacaacccagugcugcccuucaacgacggcguguacuucgccagcaccgagaagucaaacaucauccggggcuggaucuucggcaccacccuggacagcaagacacagagccugcugaucgugaacaacgccaccaacguggugaucaaggugugcgaguuucaguucugcaacgaccccuuccugggcguguacuaccacaagaacaacaagagcuggauggagagcgaguuccgggucuacagcagcgcuaacaauugcaccuucgaguacgugagccagcccuuccugauggaccucgagggcaagcagggcaacuucaagaaccugcgggaguucguguucaagaacaucgauggcuacuucaagaucuacagcaagcacacccccaucaaccuggugcgggaccugccccagggauucagcgcccuggagccucugguggaccugcccaucggcaucaacaucaccagguuccagacccugcuggcccugcaccggagcuaccugacccccggcgacagcagcagcggcuggaccgccggcgccgccgcauacuacgugggcuaccugcagccacggaccuuccugcugaaguacaacgagaacggcaccaucaccgacgccguggacugcgcccuggacccccugagcgagaccaagugcacccuaaagagcuucaccguggagaagggcaucuaccagaccagcaacuuccgggugcagcccacugagagcaucgugcgguuccccaacauuaccaaccugugucccuucggcgagguguucaacgccacccgguucgccagcguguacgccuggaaccggaagcggaucagcaacugcguggccgacuacagcgugcuguacaacagcgccagcuucagcaccuucaagugcuacggcgugagcccuaccaagcugaacgaccugugcuucaccaacguguacgcugacagcuucgugauccggggcgacgaggugcggcagaucgcccccggccagaccggcaagaucgccgacuacaacuacaagcugcccgacgacuucaccggcugcgugaucgccuggaacagcaacaaccuggacagcaaggugggcggcaacuacaacuaccuguaccggcuguuccguaagagcaaccugaagccauucgagcgggacaucagcaccgagaucuaccaggccggcagcacccccugcaacgguguggagggcuuuaacugcuacuucccccugcagagcuacggcuuccagcccaccaacggcgugggcuaccagcccuaccgggugguggugcugagcuucgagcugcugcacgcccccgccaccgugugcggcccuaaaaagagcaccaaccuggugaagaacaagugcgugaacuucaauuucaacggccugaccggcaccggcgugcugaccgagagcaacaagaaguuccugcccuuccagcaguucggccgggauaucgccgacaccaccgacgcagugcgggacccccagacccuggagauccuggacaucaccccaugcagcuucggcggcgugagcgucaucacccccggcacaaacaccagcaaccagguggccgugcuguaccagggagugaacugcaccgaggugcccguggccauccacgccgaccagcugacccccaccuggcggguguacagcaccggcagcaacguguuccagacccgggccggcugccugaucggcgccgagcacgugaacaacuccuacgagugcgacauccccaucggcgcuggcaucugcgccagcuaccagacccagaccaacagcccccggcgggcccggagcguggccagccagagcaucaucgccuacaccaugagcuuaggcgccgagaacagcguggccuacagcaacaacagcaucgcgaucccuaccaacuucaccaucagcgugaccaccgagauacugcccgugagcaugaccaagaccagcguggacuguaccauguacaucugcggcgacagcaccgagugcagcaaccugcugcugcaguacggcagcuucugcacccagcugaaccgggcccugaccggcaucgccguggagcaggacaagaacacccaagagguguucgcccaggugaagcagaucuacaagacucccccaaucaaggacuucggcggcuucaacuucagccagauccugcccgaccccagcaagcccagcaagcggagcuucaucgaggaccugcuguucaacaaggugacccuggccgacgccggcuucaucaagcaguacggcgacugccugggggauaucgccgcucgggaccugaucugcgcccagaaguucaacggccugaccgugcugcccccucugcugaccgacgagaugaucgcccaguacaccagcgcccugcuugccggcaccaucaccagcggcuggaccuucggcgccggcgcagcccugcagauccccuucgccaugcagauggccuaccgguucaacggcaucggcgugacccagaacgugcuguacgagaaccagaagcugaucgccaaccaguucaacagcgccaucggcaagauccaggacagccugagcagcaccgccagcgcccugggcaagcugcaggacguggugaaccagaacgcucaggcccugaacacccuggugaagcagcugagcagcaacuucggcgccaucagcucagugcugaaugacauccugagcaggcuggacaagguggaggccgaggugcagaucgaccggcugaucaccggccggcugcagagccugcagaccuacgugacccagcagcugauccgggccgccgagauccgggccagcgccaaccuggcagccaccaagaugagcgagugcgugcugggccagagcaagcggguggacuuuugcggcaagggcuaccaccugaugagcuucccccagagcgccccacacggcgugguguuccuccacgucacauacgugcccgcccaggagaagaacuucaccaccgcccccgccauuugccacgacggcaaggcucacuucccccgggagggaguguucgugagcaacggcacccacugguucgugacccagcggaacuucuacgagccccagaucaucaccaccgacaacaccuucgugagcggcaacugcgacguggugaucggcaucgugaacaacaccguguacgacccccugcagccugagcuggacagcuucaaggaggagcuggacaaguacuucaagaaccacaccagccccgacguggaucugggcgacaucagcggcaucaacgccagcguggugaacauccagaaggagaucgaccggcugaacgagguggccaagaaccugaacgagagccugaucgaccugcaggagcugggcaaguacgagcaguacaucaaguggcccugguacaucuggcugggcuucaucgccggccugaucgccaucgugaucgugaccaucaugcugugcugcaugaccagcugcuguagcugccugaagggcugcugcagcugcggcagcugcugcaaguucgacgaggacgacagcgagccagugcugaagggcgugaagcugcacuacaccugaggacuaguuauaagacugacuagcccgaugggccucccaacgggcccuccuccccuccuugcaccgagauuaauagaucucaaaggcucuuuucagagccaccaaaaaaaaaaaaaaaaaaaaaaaaaaaaaaaaaaaaaaaaaaaaaaaaaaaaaaaaaaaaaaaaaaaaaaaaaaaaaaaaaaaaaaaaaaaaaaaaaaaaa

SEQ ID NO: 24353 - RNA, 4035 nt, Artificial Sequence
  SARS-CoV-2/Wuhan/WIV05/2019__EPI_ISL_402128 spike protein mRNA gc (1-1273)(H69del_V70del_A222V_Y453F_S477N_D614G_I692V)
aggagaaagcuuaccauguucguguuccuggugcugcugccccuggugagcagccagugcgugaaccugaccacccggacccagcugcccccugccuacaccaacagcuucacccggggcguguacuaccccgacaagguguuccggagcagcgugcugcacagcacccaggaccuguuccugcccuucuucagcaacgugaccugguuccacgccaucagcggcaccaacggcaccaagcgguucgacaacccagugcugcccuucaacgacggcguguacuucgccagcaccgagaagucaaacaucauccggggcuggaucuucggcaccacccuggacagcaagacacagagccugcugaucgugaacaacgccaccaacguggugaucaaggugugcgaguuucaguucugcaacgaccccuuccugggcguguacuaccacaagaacaacaagagcuggauggagagcgaguuccggguguacagcagcgcuaacaauugcaccuucgaguacgucagccagcccuuccugauggaccucgagggcaagcagggcaacuucaagaaccugcgggaguucguguucaagaacaucgauggcuacuucaagaucuacagcaagcacacccccaucaaccuggugcgggaccugccccagggauucagcgugcuggagccucugguggaccugcccaucggcaucaacaucaccagguuccagacccugcuggcccugcaccggagcuaccugacccccggcgacagcagcagcggcuggaccgccggcgccgccgccuacuacgugggcuaccugcagccacggaccuuccugcugaaguacaacgagaacggcaccaucaccgacgcaguggacugcgcccuggacccccugagcgagaccaagugcacccuaaagagcuucaccguggagaagggcaucuaccagaccagcaacuuccgggugcagcccacugagagcaucgugcgguuccccaacauuaccaaccugugucccuucggcgagguguucaacgccacccgguucgccagcguguacgccuggaaccggaagcggaucagcaacugcguggccgacuacagcgugcuguacaacagcgccagcuucagcaccuucaagugcuacggcgugagcccuaccaagcugaacgaccugugcuucaccaacguguacgccgacagcuucgugauccggggcgacgaggugcggcagaucgcucccggccagaccggcaagaucgccgacuacaacuacaagcugcccgacgacuucaccggcugcgugaucgccuggaacagcaacaaccuggacagcaaggugggcggcaacuacaacuaccuguuccggcuguuccguaagagcaaccugaagccauuugagcgggacaucagcaccgagaucuaccaggccggcaacacccccugcaacgguguggagggcuucaacugcuacuucccccugcagagcuacggcuuccagcccaccaacggcgugggcuaccagcccuaccgggugguggugcugagcuucgagcugcugcacgcccccgccaccgugugcggcccuaaaaagagcaccaaccuggugaagaacaagugcgugaauuucaacuucaacggccugaccggcaccggcgugcugaccgagagcaacaagaaguuccugcccuuccagcaguucggccgggauaucgccgacaccaccgacgccgugcgggacccccagacccuggagauccuggacaucaccccaugcagcuucggcggcgugagcgucaucacccccggcacaaacaccagcaaccagguggcagugcuguaccagggagugaacugcaccgaggugcccguggccauccacgccgaccagcugacccccaccuggcggguguacagcaccggcagcaacguguuccagacccgggccggcugccugaucggcgccgagcacgugaacaacagcuacgagugcgacauccccaucggcgccggcaucugcgcuuccuaccagacccagaccaacagcccccggcgggcccggagcguggccagccagagcgugaucgccuacaccaugagcuuaggcgccgagaacagcguggccuacagcaacaacagcaucgccaucccuaccaacuucaccaucagcgugaccaccgagauccugcccgugagcaugaccaagaccagcguggacuguaccauguacauaugcggcgacagcaccgagugcagcaaccugcugcugcaguacggcagcuucugcacccagcugaaccgggcgcugaccggcaucgccguggagcaggacaagaacacccaagagguguucgcccaggugaagcagaucuacaagacucccccaaucaaggacuucggcggcuucaacuucagccagauccugcccgaccccagcaagcccagcaagcggagcuucaucgaggaccugcuguucaacaaggugacccuggccgacgccggcuucaucaagcaguacggcgacugccugggggauaucgccgcccgggaccugaucugcgcucagaaguucaacggccugaccgugcugcccccucugcugaccgacgagaugaucgcccaguacaccagcgcccugcuugccggcaccaucaccagcggcuggaccuucggcgccggcgccgcacugcagauccccuucgccaugcagauggccuaccgguucaacggcaucggcgugacccagaacgugcuguacgagaaccagaagcugaucgccaaccaguucaacagcgccaucggcaagauccaggacagccugagcagcaccgccagcgcccugggcaagcugcaggacguggugaaccagaacgcccaggcucugaacacccuggugaagcagcugagcagcaauuuuggcgccaucagcagcgugcugaacgacauccugucaaggcuggacaagguggaggccgaggugcagaucgaccggcugaucaccggccggcugcagagccugcagaccuacgugacccagcagcugauccgggccgccgagauccgggccagcgccaaccuggccgcaaccaagaugagcgagugcgugcugggccagagcaagcggguggacuucugcggcaagggcuaccaccugaugagcuucccccagagcgccccacacggcguggucuuccuccacgugacauacgugcccgcccaggagaagaacuucaccaccgcccccgccaucugccacgacggcaaggcccacuucccccgggagggaguguucgugagcaacggcacccacugguucgugacccagcggaacuucuacgagccccagauuaucaccaccgacaacaccuucgugagcggcaacugcgacguggugaucggcaucgugaacaacaccguguacgacccccugcagccugagcuggacagcuucaaggaggagcuggacaaguacuucaagaaccacaccagccccgacguggaucugggcgacaucagcggcaucaacgcuagcguggugaacauccagaaggagaucgaccggcugaacgagguggccaagaaccugaacgagagccugaucgaccugcaggagcugggcaaguacgagcaguacaucaaguggcccugguacaucuggcugggcuucaucgccggccugaucgccaucgugauggugaccaucaugcugugcugcaugaccagcugcuguagcugccugaagggcugcugcagcugcggcagcugcugcaaguucgacgaggacgacagcgagccagugcugaagggcgugaagcugcacuacaccugaggacuaguuauaagacugacuagcccgaugggccucccaacgggcccuccuccccuccuugcaccgagauuaauagaucucaaaggcucuuuucagagccaccaaaaaaaaaaaaaaaaaaaaaaaaaaaaaaaaaaaaaaaaaaaaaaaaaaaaaaaaaaaaaaaaaaaaaaaaaaaaaaaaaaaaaaaaaaaaaaaaaaaaa

SEQ ID NO: 24354 - RNA, 4035 nt, Artificial Sequence
  SARS-CoV-2/Wuhan/WIV05/2019__EPI_ISL_402128 spike protein mRNA gc (1-1273)(H69del_V70del_Y453F_D614G_I692V_M1229I)
aggagaaagcuuaccauguucguguuccuggugcugcugccccuggugagcagccagugcgugaaccugaccacccggacccagcugcccccugccuacaccaacagcuucacccggggcguguacuaccccgacaagguguuccggagcagcgugcugcacagcacccaggaccuguuccugcccuucuucagcaacgugaccugguuccacgccaucagcggcaccaacggcaccaagcgguucgacaacccagugcugcccuucaacgacggcguguacuucgccagcaccgagaagucaaacaucauccggggcuggaucuucggcaccacccuggacagcaagacacagagccugcugaucgugaacaacgccaccaacguggugaucaaggugugcgaguuucaguucugcaacgaccccuuccugggcguguacuaccacaagaacaacaagagcuggauggagagcgaguuccggguguacagcagcgcuaacaauugcaccuucgaguacgucagccagcccuuccugauggaccucgagggcaagcagggcaacuucaagaaccugcgggaguucguguucaagaacaucgauggcuacuucaagaucuacagcaagcacacccccaucaaccuggugcgggaccugccccagggauucagcgcccuggagccucugguggaccugcccaucggcaucaacaucaccagguuccagacccugcuggcccugcaccggagcuaccugacccccggcgacagcagcagcggcuggaccgccggcgccgccgcauacuacgugggcuaccugcagccacggaccuuccugcugaaguacaacgagaacggcaccaucaccgacgccguggacugcgcccuggacccccugagcgagaccaagugcacccuaaagagcuucaccguggagaagggcaucuaccagaccagcaacuuccgggugcagcccacugagagcaucgugcgguuccccaacauuaccaaccugugucccuucggcgagguguucaacgccacccgguucgccagcguguacgccuggaaccggaagcggaucagcaacugcguggccgacuacagcgugcuguacaacagcgccagcuucagcaccuucaagugcuacggcgugagcccuaccaagcugaacgaccugugcuucaccaacguguacgcugacagcuucgugauccggggcgacgaggugcggcagaucgcccccggccagaccggcaagaucgccgacuacaacuacaagcugcccgacgacuucaccggcugcgugaucgccuggaacagcaacaaccuggacagcaaggugggcggcaacuacaacuaccuguuccggcuguuccguaagagcaaccugaagccauuugagcgggacaucagcaccgagaucuaccaggccggcagcacccccugcaacgguguggagggcuucaacugcuacuucccccugcagagcuacggcuuccagcccaccaacggcgugggcuaccagcccuaccgggugguggugcugagcuucgagcugcugcacgcccccgccaccgugugcggcccuaaaaagagcaccaaccuggugaagaacaagugcgugaacuucaauuucaacggccugaccggcaccggcgugcugaccgagagcaacaagaaguuccugcccuuccagcaguucggccgggauaucgccgacaccaccgacgcagugcgggacccccagacccuggagauccuggacaucaccccaugcagcuucggcggcgugagcgugaucacccccggcacaaacaccagcaaccaggucgccgugcuguaccagggagugaacugcaccgaggugcccguggccauccacgccgaccagcugacccccaccuggcggguguacagcaccggcagcaacguguuccagacccgggccggcugccugaucggcgccgagcacgugaacaacuccuacgagugcgacauccccaucggcgcuggcaucugcgccagcuaccagacccagaccaacagcccccggcgggcccggagcguggccagccagagcgugaucgccuacaccaugagcuuaggcgccgagaacagcguggccuacagcaacaacagcaucgcgaucccuaccaacuucaccaucagcgugaccaccgagauccugcccgugagcaugaccaagaccagcguggacuguaccauguacauaugcggcgacagcaccgagugcagcaaccugcugcugcaguacggcagcuucugcacccagcugaaccgggcccugaccggcaucgccguggagcaggacaagaacacccaagagguguucgcccaggugaagcagaucuacaagacucccccaaucaaggacuucggcggcuucaacuucagccagauccugcccgaccccagcaagcccagcaagcggagcuucaucgaggaccugcuguucaacaaggugacccuggccgacgccggcuucaucaagcaguacggcgacugccugggggauaucgccgcucgggaccugaucugcgcccagaaguucaacggccugaccgugcugcccccucugcugaccgacgagaugaucgcccaguacaccagcgcccugcuugccggcaccaucaccagcggcuggaccuucggcgccggcgcagcccugcagauccccuucgccaugcagauggccuaccgguucaacggcaucggcgugacccagaacgugcuguacgagaaccagaagcugaucgccaaccaguucaacagcgccaucggcaagauccaggacagccugagcagcaccgccagcgcccugggcaagcugcaggacguggugaaccagaacgcucaggcccugaacacccuggugaagcagcugagcagcaacuuuggcgccaucagcucagugcugaaugacauccugagcaggcuggacaagguggaggccgaggugcagaucgaccggcugaucaccggccggcugcagagccugcagaccuacgugacccagcagcugauccgggccgccgagauccgggccagcgccaaccuggcagccaccaagaugagcgagugcgugcugggccagagcaagcggguggacuucugcggcaagggcuaccaccugaugagcuucccccagagcgccccacacggcgugguguuccuccacgucacauacgugcccgcccaggagaagaacuucaccaccgcccccgccaucugccacgacggcaaggcucacuucccccgggagggaguguucgugagcaacggcacccacugguucgugacccagcggaacuucuacgagccccagauuaucaccaccgacaacaccuucgugagcggcaacugcgacguggugaucggcaucgugaacaacaccguguacgacccccugcagccugagcuggacagcuucaaggaggagcuggacaaguacuucaagaaccacaccagccccgacguggaucugggcgacaucagcggcaucaacgccagcguggugaacauccagaaggagaucgaccggcugaacgagguggccaagaaccugaacgagagccugaucgaccugcaggagcugggcaaguacgagcaguacaucaaguggcccugguacaucuggcugggcuucaucgccggccugaucgccaucgugaucgugaccaucaugcugugcugcaugaccagcugcuguagcugccugaagggcugcugcagcugcggcagcugcugcaaguucgacgaggacgacagcgagccagugcugaagggcgugaagcugcacuacaccugaggacuaguuauaagacugacuagcccgaugggccucccaacgggcccuccuccccuccuugcaccgagauuaauagaucucaaaggcucuuuucagagccaccaaaaaaaaaaaaaaaaaaaaaaaaaaaaaaaaaaaaaaaaaaaaaaaaaaaaaaaaaaaaaaaaaaaaaaaaaaaaaaaaaaaaaaaaaaaaaaaaaaaaa

SEQ ID NO: 24355 - RNA, 4032 nt, Artificial Sequence
  SARS-CoV-2/Wuhan/WIV05/2019__EPI_ISL_402128 spike protein mRNA gc (1-1273)(H69del_V70del_Y144del_N501Y_A570D_D614G_P681H_T716I_S982 A_D1118H)
aggagaaagcuuaccauguucguguuccuggugcugcugccccuggugagcagccagugcgugaaccugaccacccggacccagcugcccccugccuacaccaacagcuucacccggggcguguacuaccccgacaagguguuccggagcagcgugcugcacagcacccaggaccuguuccugcccuucuucagcaacgugaccugguuccacgccaucagcggcaccaacggcaccaagcgguucgacaacccagugcugcccuucaacgacggcguguacuucgccagcaccgagaagucaaacaucauccggggcuggaucuucggcaccacccuggacagcaagacacagagccugcugaucgugaacaacgccaccaacguggugaucaaggugugcgaguuucaguucugcaacgaccccuuccugggcguguaccacaagaacaacaagagcuggauggagagcgaguuccggguguacagcagcgcuaacaauugcaccuucgaguacgucagccagcccuuccugauggaccucgagggcaagcagggcaacuucaagaaccugcgggaguucguguucaagaacaucgauggcuacuucaagaucuacagcaagcacacccccaucaaccuggugcgggaccugccccagggauucagcgcccuggagccucugguggaccugcccaucggcaucaacaucaccagguuccagacccugcuggcccugcaccggagcuaccugacccccggcgacagcagcagcggcuggaccgccggcgccgccgcauacuacgugggcuaccugcagccacggaccuuccugcugaaguacaacgagaacggcaccaucaccgacgccguggacugcgcccuggacccccugagcgagaccaagugcacccuaaagagcuucaccguggagaagggcaucuaccagaccagcaacuuccgggugcagcccacugagagcaucgugcgguuccccaacauuaccaaccugugucccuucggcgagguguucaacgccacccgguucgccagcguguacgccuggaaccggaagcggaucagcaacugcguggccgacuacagcgugcuguacaacagcgccagcuucagcaccuucaagugcuacggcgugagcccuaccaagcugaacgaccugugcuucaccaacguguacgcugacagcuucgugauccggggcgacgaggugcggcagaucgcccccggccagaccggcaagaucgccgacuacaacuacaagcugcccgacgacuucaccggcugcgugaucgccuggaacagcaacaaccuggacagcaaggugggcggcaacuacaacuaccuguaccggcuguuccguaagagcaaccugaagccauucgagcgggacaucagcaccgagaucuaccaggccggcagcacccccugcaacgguguggagggcuuuaacugcuacuucccccugcagagcuacggcuuccagcccaccuacggcgugggcuaccagcccuaccgggugguggugcugagcuucgagcugcugcacgcccccgccaccgugugcggcccuaaaaagagcaccaaccuggugaagaacaagugcgugaacuucaacuucaauggccugaccggcaccggcgugcugaccgagagcaacaagaaguuccugcccuuccagcaguucggccgggauaucgacgacaccaccgacgccgugcgggacccccagacccuggagauccuggacaucaccccaugcagcuucggcggcgugagcgugaucacccccggcacaaacaccagcaaccaggucgcagugcuguaccagggagugaacugcaccgaggugcccguggccauccacgccgaccagcugacccccaccuggcggguguacagcaccggcagcaacguguuccagacccgggccggcugccugaucggcgccgagcacgugaacaacuccuacgagugcgacauccccaucggcgccggcaucugcgcuagcuaccagacccagaccaacagccaccggcgggcccggagcguggccagccagagcaucaucgccuacaccaugagcuuaggcgccgagaacagcguggccuacagcaacaacagcaucgccauccccaucaacuucaccauaagcgugaccaccgagauccugccugugagcaugaccaagaccagcguggacuguaccauguacaucugcggcgacagcaccgagugcagcaaccugcugcugcaguacggcagcuucugcacccagcugaaccgggcgcugaccggcaucgccguggagcaggacaagaacacccaagagguguucgcccaggugaagcagaucuacaagaccccacccaucaaggacuucggcggcuucaacuucagccagauccugcccgaccccagcaagcccagcaagcggagcuucaucgaggaccugcuguucaacaaggugacucuggccgacgccggcuucaucaagcaguacggcgauugccugggggacaucgccgcccgggaccugaucugcgcucagaaguucaacggccugaccgugcugccuccccugcugaccgacgagaugaucgcccaguacaccagcgcccugcuugccggcaccaucaccagcggcuggaccuucggcgccggcgccgcacugcagauccccuucgccaugcagauggccuaccgguucaacggcaucggcgugacccagaacgugcuguacgagaaccagaagcugaucgccaaccaguucaacagcgccaucggcaagauccaggacagccugagcagcaccgccagcgcccugggcaagcugcaggacguggugaaccagaacgcccaggcucugaacacccuggugaagcagcugagcagcaacuucggcgccaucagcucagugcugaacgacauccuggccaggcuggacaagguggaggccgaggugcagaucgaccggcugaucaccggccggcugcagagccugcagaccuacgugacccagcagcugauccgggccgccgagauucgggccagcgccaaucuggcagccaccaagaugagcgagugcgugcugggccagagcaagcggguggacuuuugcggcaagggcuaccaccugaugagcuucccccagagcgcuccccacggcgugguguuccuccacgugaccuacgucccagcccaggagaagaacuucacaaccgcccccgccaucugccacgacggcaaggcccacuucccccgggagggaguguucgugagcaacggcacccacugguucgugacccagcggaacuucuacgagccccagaucaucaccacccacaacaccuucgugagcggcaacugcgacguggugaucggcaucgugaacaacaccguguacgacccccugcagcccgagcuggacagcuucaaggaggagcuggacaaguacuucaagaaccacaccagcccugacguggaucugggcgacaucagcggcaucaacgccagcguggugaacauccagaaggagaucgaccggcugaacgagguggccaagaaccugaacgagagccugaucgaccugcaggagcugggcaaguacgagcaguacaucaaguggcccugguacaucuggcugggcuucaucgccggccugaucgccaucgugauggugaccaucaugcugugcugcaugaccagcugcuguagcugccugaagggcugcugcagcugcggcagcugcugcaaguucgacgaggacgacagcgagcccgugcugaagggcgugaagcugcacuacaccugaggacuaguuauaagacugacuagcccgaugggccucccaacgggcccuccuccccuccuugcaccgagauuaauagaucucaaaggcucuuuucagagccaccaaaaaaaaaaaaaaaaaaaaaaaaaaaaaaaaaaaaaaaaaaaaaaaaaaaaaaaaaaaaaaaaaaaaaaaaaaaaaaaaaaaaaaaaaaaaaaaaaaaaa

SEQ ID NO: 24356 - RNA, 4041 nt, Artificial Sequence
  SARS-CoV-2/Wuhan/WIV05/2019__EPI_ISL_402128 spike protein mRNA gc (1-1273)(K417N_E484K_N501Y_D614G)
aggagaaagcuuaccauguucguguuccuggugcugcugccccuggugagcagccagugcgugaaccugaccacccggacccagcugcccccugccuacaccaacagcuucacccggggcguguacuaccccgacaagguguuccggagcagcgugcugcacagcacccaggaccuguuccugcccuucuucagcaacgugaccugguuccacgccauccacgugagcggcaccaacggcaccaagcgguucgacaacccagugcugcccuucaacgacggcguguacuucgccagcaccgagaagucaaacaucauccggggcuggaucuucggcaccacccuggacagcaagacacagagccugcugaucgugaacaacgccaccaacguggugaucaaggugugcgaguuucaguucugcaacgaccccuuccugggcguguacuaccacaagaacaacaagagcuggauggagagcgaguuccgggucuacagcagcgcuaacaauugcaccuucgaguacgugagccagcccuuccugauggaccucgagggcaagcagggcaacuucaagaaccugcgggaguucguguucaagaacaucgauggcuacuucaagaucuacagcaagcacacccccaucaaccuggugcgggaccugccccagggauucagcgcccuggagccucugguggaccugcccaucggcaucaacaucaccagguuccagacccugcuggcccugcaccggagcuaccugacccccggcgacagcagcagcggcuggaccgccggcgccgccgcauacuacgugggcuaccugcagccacggaccuuccugcugaaguacaacgagaacggcaccaucaccgacgccguggacugcgcccuggacccccugagcgagaccaagugcacccuaaagagcuucaccguggagaagggcaucuaccagaccagcaacuuccgggugcagcccacugagagcaucgugcgguuccccaacauuaccaaccugugucccuucggcgagguguucaacgccacccgguucgccagcguguacgccuggaaccggaagcggaucagcaacugcguggccgacuacagcgugcuguacaacagcgccagcuucagcaccuucaagugcuacggcgugagcccuaccaagcugaacgaccugugcuucaccaacguguacgcugacagcuucgugauccggggcgacgaggugcggcagaucgcccccggccagaccggcaacaucgccgacuacaacuacaagcugcccgacgacuucaccggcugcgugaucgccuggaacagcaacaaccuggacagcaaggugggcggcaacuacaacuaccuguaccggcuguuccguaagagcaaccugaagccauucgagcgggacaucagcaccgagaucuaccaggccggcagcacccccugcaacggugugaagggcuuuaacugcuacuucccccugcagagcuacggcuuccagcccaccuacggcgugggcuaccagcccuaccgggugguggugcugagcuucgagcugcugcacgcccccgccaccgugugcggcccuaaaaagagcaccaaccuggugaagaacaagugcgugaacuucaauuucaacggccugaccggcaccggcgugcugaccgagagcaacaagaaguuccugcccuuccagcaguucggccgggauaucgccgacaccaccgacgcagugcgggacccccagacccuggagauccuggacaucaccccaugcagcuucggcggcgugagcgucaucacccccggcacaaacaccagcaaccagguggccgugcuguaccagggagugaacugcaccgaggugcccguggccauccacgccgaccagcugacccccaccuggcggguguacagcaccggcagcaacguguuccagacccgggccggcugccugaucggcgccgagcacgugaacaacuccuacgagugcgacauccccaucggcgcuggcaucugcgccagcuaccagacccagaccaacagcccccggcgggcccggagcguggccagccagagcaucaucgccuacaccaugagcuuaggcgccgagaacagcguggccuacagcaacaacagcaucgcgaucccuaccaacuucaccaucagcgugaccaccgagauacugcccgugagcaugaccaagaccagcguggacuguaccauguacaucugcggcgacagcaccgagugcagcaaccugcugcugcaguacggcagcuucugcacccagcugaaccgggcccugaccggcaucgccguggagcaggacaagaacacccaagagguguucgcccaggugaagcagaucuacaagacucccccaaucaaggacuucggcggcuucaacuucagccagauccugcccgaccccagcaagcccagcaagcggagcuucaucgaggaccugcuguucaacaaggugacccuggccgacgccggcuucaucaagcaguacggcgacugccugggggauaucgccgcucgggaccugaucugcgcccagaaguucaacggccugaccgugcugcccccucugcugaccgacgagaugaucgcccaguacaccagcgcccugcuugccggcaccaucaccagcggcuggaccuucggcgccggcgcagcccugcagauccccuucgccaugcagauggccuaccgguucaacggcaucggcgugacccagaacgugcuguacgagaaccagaagcugaucgccaaccaguucaacagcgccaucggcaagauccaggacagccugagcagcaccgccagcgcccugggcaagcugcaggacguggugaaccagaacgcucaggcccugaacacccuggugaagcagcugagcagcaacuucggcgccaucagcucagugcugaaugacauccugagcaggcuggacaagguggaggccgaggugcagaucgaccggcugaucaccggccggcugcagagccugcagaccuacgugacccagcagcugauccgggccgccgagauccgggccagcgccaaccuggcagccaccaagaugagcgagugcgugcugggccagagcaagcggguggacuuuugcggcaagggcuaccaccugaugagcuucccccagagcgccccacacggcgugguguuccuccacgucacauacgugcccgcccaggagaagaacuucaccaccgcccccgccauuugccacgacggcaaggcucacuucccccgggagggaguguucgugagcaacggcacccacugguucgugacccagcggaacuucuacgagccccagaucaucaccaccgacaacaccuucgugagcggcaacugcgacguggugaucggcaucgugaacaacaccguguacgacccccugcagccugagcuggacagcuucaaggaggagcuggacaaguacuucaagaaccacaccagccccgacguggaucugggcgacaucagcggcaucaacgccagcguggugaacauccagaaggagaucgaccggcugaacgagguggccaagaaccugaacgagagccugaucgaccugcaggagcugggcaaguacgagcaguacaucaaguggcccugguacaucuggcugggcuucaucgccggccugaucgccaucgugauggugaccaucaugcugugcugcaugaccagcugcuguagcugccugaagggcugcugcagcugcggcagcugcugcaaguucgacgaggacgacagcgagccagugcugaagggcgugaagcugcacuacaccugaggacuaguuauaagacugacuagcccgaugggccucccaacgggcccuccuccccuccuugcaccgagauuaauagaucucaaaggcucuuuucagagccaccaaaaaaaaaaaaaaaaaaaaaaaaaaaaaaaaaaaaaaaaaaaaaaaaaaaaaaaaaaaaaaaaaaaaaaaaaaaaaaaaaaaaaaaaaaaaaaaaaaaaa

SEQ ID NO: 24357 - RNA, 4032 nt, Artificial Sequence
  SARS-CoV-2/Wuhan/WIV05/2019__EPI_ISL_402128 spike protein mRNA gc (1-1273)(L18F_D80A_D215G_L242del_A243del_L244del_R246I_K417N_E484 K_N501Y_D614G_A701V)
aggagaaagcuuaccauguucguguuccuggugcugcugccccuggugagcagccagugcgugaacuucaccacccggacccagcugcccccugccuacaccaacagcuucacccggggcguguacuaccccgacaagguguuccggagcagcgugcugcacagcacccaggaccuguuccugcccuucuucagcaacgugaccugguuccacgccauccacgugagcggcaccaacggcaccaagcgguucgccaacccagugcugcccuucaacgacggcguguacuucgccagcaccgagaagucaaacaucauccggggcuggaucuuuggcaccacccuggacagcaagacacagagccugcugaucgugaacaacgcuaccaacguggugaucaaggugugcgaguuccaguucugcaacgaccccuuccugggcguguacuaccacaagaacaacaagagcuggauggagagcgaguuccgggucuacagcagcgccaacaauugcaccuucgaguacgugagccagcccuuccugauggaccuggagggcaagcagggcaacuucaagaaccuccgggaguucguguucaagaacaucgacggcuacuucaagaucuacagcaagcacacccccaucaaccuggugcggggacugccccagggcuucagcgcccuggagccucugguggaucugcccaucggcaucaacaucaccagguuccagacccugcacaucagcuaccugacccccggcgacagcagcagcggcuggaccgccggcgccgccgcauacuacgugggcuaccugcagccacggaccuuccugcugaaguacaacgagaacggcaccaucaccgacgccguggacugcgcccuggacccccugagcgagaccaagugcacccuuaagagcuucaccguggagaagggcaucuaccagaccagcaacuuccgggugcagcccacugagagcauugugcgguuccccaacaucaccaaccugugucccuucggcgagguguucaacgccacccgguucgccagcguguacgccuggaaccggaagcggaucagcaacugcguggccgacuacagcgugcuguacaacagcgccagcuucagcaccuucaagugcuacggcgugagcccuaccaagcugaacgaccugugcuucaccaacguguacgcugacagcuucgugauccggggcgacgaggugcggcagaucgcccccggccagaccggcaacaucgccgacuacaacuacaagcugcccgacgacuucaccggcugcgugaucgccuggaacagcaacaaccuggacagcaaggugggcggcaacuacaacuaccuguaccggcuauuccguaagagcaaccugaagccauuugagcgggacaucagcaccgagaucuaccaggccgguagcacccccugcaacggcgugaagggcuucaacugcuacuucccccugcagagcuacggcuuccagcccaccuacggcgugggcuaccagcccuaccgggugguggugcugagcuucgagcugcugcacgcccccgccaccgugugcggcccuaaaaagagcaccaaccuggugaagaacaagugcgugaacuucaauuucaacggccugaccggcaccggcgugcugaccgagagcaacaagaaguuccugcccuuccagcaguucggccgggacaucgccgacaccaccgaugcagugcgggacccccagacccuggagauccuggacaucaccccaugcagcuucggcggcgugagcgucaucacccccggaacaaacaccagcaaccagguggccgugcuguaccagggcgugaacugcaccgaggugcccguggccauccacgccgaccagcugacccccaccuggcggguguacagcaccggcagcaacguguuccagacccgggccggcugccugaucggcgccgagcacgugaacaacuccuacgagugcgacauccccaucggcgcuggcaucugcgccagcuaccagacccagaccaacagcccccggcgggcccggagcguggccagccagagcaucaucgccuacaccaugagccugggcguggagaacagcguggccuacagcaacaacagcaucgccaucccuaccaacuucaccauaagcgugaccaccgagauccugcccgugagcaugaccaagaccagcguggacuguaccauguacaucugcggcgacagcaccgagugcagcaaccuguuacugcaguacggcagcuucugcacccagcugaaccgggcgcugaccggcaucgccguggagcaggacaagaacacccaagagguguucgcccaggugaagcagaucuacaagacucccccaaucaaggacuucggcggcuucaacuucagccagauccugcccgaccccagcaagcccagcaagcggagcuucaucgaggaccugcuguucaacaaggugacccuggccgacgccggcuucaucaagcaguacggggacugccugggcgacaucgccgcccgggaccugaucugcgcucagaaguucaacggccugaccgugcugcccccucugcugaccgaugagaugaucgcccaguacaccagcgcccugcuggccggcaccaucaccagcggcuggaccuucggcgccggcgccgcacugcagauccccuucgccaugcagauggccuaccgguucaacggcaucggcgugacccagaacgugcuguacgagaaccagaagcugaucgccaaccaguucaacagcgccaucggcaagauccaggacagccugagcagcaccgccagcgcccugggcaagcugcaggacguggugaaccagaacgcccaggcucugaacacccuggugaagcagcugagcagcaacuuuggcgccaucagcucagugcugaaugacauccugagccggcuggacaagguggaggccgaggugcagaucgacaggcugaucaccggccggcugcagagccugcagaccuacgugacccagcagcugauccgggccgccgagauucgggccagcgccaaccuggccgcaaccaagaugagcgagugcgugcugggccagagcaagcggguggacuucugcggcaagggcuaccaccugaugagcuucccccagagcgccccacacggcguggucuuccugcacgugacauacgugcccgcccaggagaagaacuucaccaccgcccccgccaucugccacgacggaaaggcccacuucccccgggagggcguguucgugagcaacggcacccacugguucgugacccagcggaacuucuacgagccccagaucaucaccaccgacaacaccuucgugagcggcaacugcgacguggugaucggcaucgugaacaacaccguguacgacccccugcagccugagcuggacagcuucaaggaggagcucgacaaguacuucaagaaccacaccagccccgacguggaccugggcgacaucagcggcaucaacgcuagcguggugaacauccagaaggagaucgaucggcugaacgagguggccaagaaccugaacgagagccugaucgaccugcaggagcugggcaaguacgagcaguacaucaaguggcccugguacaucuggcugggcuucaucgccggccugaucgccaucgugauggugaccaucaugcugugcugcaugaccagcugcuguagcugccugaagggcugcugcagcugcggcagcugcugcaaguucgacgaggacgacagcgagccagugcugaagggcgugaagcugcacuacaccugaggacuaguuauaagacugacuagcccgaugggccucccaacgggcccuccuccccuccuugcaccgagauuaauagaucucaaaggcucuuuucagagccaccaaaaaaaaaaaaaaaaaaaaaaaaaaaaaaaaaaaaaaaaaaaaaaaaaaaaaaaaaaaaaaaaaaaaaaaaaaaaaaaaaaaaaaaaaaaaaaaaaaaaa

SEQ ID NO: 24358 - RNA, 4041 nt, Artificial Sequence
  SARS-CoV-2/Wuhan/WIV05/2019__EPI_ISL_402128 spike protein mRNA gc (1-1273)(E484K_D614G)
aggagaaagcuuaccauguucguguuccuggugcugcugccccuggugagcagccagugcgugaaccugaccacccggacccagcugcccccugccuacaccaacagcuucacccggggcguguacuaccccgacaagguguuccggagcagcgugcugcacagcacccaggaccuguuccugcccuucuucagcaacgugaccugguuccacgccauccacgugagcggcaccaacggcaccaagcgguucgacaacccagugcugcccuucaacgacggcguguacuucgccagcaccgagaagucaaacaucauccggggcuggaucuucggcaccacccuggacagcaagacacagagccugcugaucgugaacaacgccaccaacguggugaucaaggugugcgaguuucaguucugcaacgaccccuuccugggcguguacuaccacaagaacaacaagagcuggauggagagcgaguuccgggucuacagcagcgcuaacaauugcaccuucgaguacgugagccagcccuuccugauggaccucgagggcaagcagggcaacuucaagaaccugcgggaguucguguucaagaacaucgauggcuacuucaagaucuacagcaagcacacccccaucaaccuggugcgggaccugccccagggauucagcgcccuggagccucugguggaccugcccaucggcaucaacaucaccagguuccagacccugcuggcccugcaccggagcuaccugacccccggcgacagcagcagcggcuggaccgccggcgccgccgcauacuacgugggcuaccugcagccacggaccuuccugcugaaguacaacgagaacggcaccaucaccgacgccguggacugcgcccuggacccccugagcgagaccaagugcacccuaaagagcuucaccguggagaagggcaucuaccagaccagcaacuuccgggugcagcccacugagagcaucgugcgguuccccaacauuaccaaccugugucccuucggcgagguguucaacgccacccgguucgccagcguguacgccuggaaccggaagcggaucagcaacugcguggccgacuacagcgugcuguacaacagcgccagcuucagcaccuucaagugcuacggcgugagcccuaccaagcugaacgaccugugcuucaccaacguguacgcugacagcuucgugauccggggcgacgaggugcggcagaucgcccccggccagaccggcaagaucgccgacuacaacuacaagcugcccgacgacuucaccggcugcgugaucgccuggaacagcaacaaccuggacagcaaggugggcggcaacuacaacuaccuguaccggcuguuccguaagagcaaccugaagccauucgagcgggacaucagcaccgagaucuaccaggccggcagcacccccugcaacggugugaagggcuuuaacugcuacuucccccugcagagcuacggcuuccagcccaccaacggcgugggcuaccagcccuaccgggugguggugcugagcuucgagcugcugcacgcccccgccaccgugugcggcccuaaaaagagcaccaaccuggugaagaacaagugcgugaacuucaauuucaacggccugaccggcaccggcgugcugaccgagagcaacaagaaguuccugcccuuccagcaguucggccgggauaucgccgacaccaccgacgcagugcgggacccccagacccuggagauccuggacaucaccccaugcagcuucggcggcgugagcgucaucacccccggcacaaacaccagcaaccagguggccgugcuguaccagggagugaacugcaccgaggugcccguggccauccacgccgaccagcugacccccaccuggcggguguacagcaccggcagcaacguguuccagacccgggccggcugccugaucggcgccgagcacgugaacaacuccuacgagugcgacauccccaucggcgcuggcaucugcgccagcuaccagacccagaccaacagcccccggcgggcccggagcguggccagccagagcaucaucgccuacaccaugagcuuaggcgccgagaacagcguggccuacagcaacaacagcaucgcgaucccuaccaacuucaccaucagcgugaccaccgagauacugcccgugagcaugaccaagaccagcguggacuguaccauguacaucugcggcgacagcaccgagugcagcaaccugcugcugcaguacggcagcuucugcacccagcugaaccgggcccugaccggcaucgccguggagcaggacaagaacacccaagagguguucgcccaggugaagcagaucuacaagacucccccaaucaaggacuucggcggcuucaacuucagccagauccugcccgaccccagcaagcccagcaagcggagcuucaucgaggaccugcuguucaacaaggugacccuggccgacgccggcuucaucaagcaguacggcgacugccugggggauaucgccgcucgggaccugaucugcgcccagaaguucaacggccugaccgugcugcccccucugcugaccgacgagaugaucgcccaguacaccagcgcccugcuugccggcaccaucaccagcggcuggaccuucggcgccggcgcagcccugcagauccccuucgccaugcagauggccuaccgguucaacggcaucggcgugacccagaacgugcuguacgagaaccagaagcugaucgccaaccaguucaacagcgccaucggcaagauccaggacagccugagcagcaccgccagcgcccugggcaagcugcaggacguggugaaccagaacgcucaggcccugaacacccuggugaagcagcugagcagcaacuucggcgccaucagcucagugcugaaugacauccugagcaggcuggacaagguggaggccgaggugcagaucgaccggcugaucaccggccggcugcagagccugcagaccuacgugacccagcagcugauccgggccgccgagauccgggccagcgccaaccuggcagccaccaagaugagcgagugcgugcugggccagagcaagcggguggacuuuugcggcaagggcuaccaccugaugagcuucccccagagcgccccacacggcgugguguuccuccacgucacauacgugcccgcccaggagaagaacuucaccaccgcccccgccauuugccacgacggcaaggcucacuucccccgggagggaguguucgugagcaacggcacccacugguucgugacccagcggaacuucuacgagccccagaucaucaccaccgacaacaccuucgugagcggcaacugcgacguggugaucggcaucgugaacaacaccguguacgacccccugcagccugagcuggacagcuucaaggaggagcuggacaaguacuucaagaaccacaccagccccgacguggaucugggcgacaucagcggcaucaacgccagcguggugaacauccagaaggagaucgaccggcugaacgagguggccaagaaccugaacgagagccugaucgaccugcaggagcugggcaaguacgagcaguacaucaaguggcccugguacaucuggcugggcuucaucgccggccugaucgccaucgugauggugaccaucaugcugugcugcaugaccagcugcuguagcugccugaagggcugcugcagcugcggcagcugcugcaaguucgacgaggacgacagcgagccagugcugaagggcgugaagcugcacuacaccugaggacuaguuauaagacugacuagcccgaugggccucccaacgggcccuccuccccuccuugcaccgagauuaauagaucucaaaggcucuuuucagagccaccaaaaaaaaaaaaaaaaaaaaaaaaaaaaaaaaaaaaaaaaaaaaaaaaaaaaaaaaaaaaaaaaaaaaaaaaaaaaaaaaaaaaaaaaaaaaaaaaaaaaa

SEQ ID NO: 24359 - RNA, 4041 nt, Artificial Sequence
  SARS-CoV-2/Wuhan/WIV05/2019__EPI_ISL_402128 spike protein mRNA gc (1-1273)(L18F_T20N_P26S_D138Y_R190S_K417T_E484K_N501Y_D614G_H655Y _T1027I)
aggagaaagcuuaccauguucguguuccuggugcugcugccccuggugagcagccagugcgugaacuucaccaaccggacccagcugcccagcgccuacaccaacagcuucacccggggcguguacuacccugacaagguguuccggagcagcgugcugcacagcacccaggaccuguuccugcccuucuucagcaacgugaccugguuccacgccauccacgugagcggcaccaacggcaccaagcgguucgacaaccccgugcugccauucaacgacggcguguacuucgccagcaccgagaagucaaacaucauccggggcuggaucuuuggcaccacccuggacagcaagacccagagccugcugaucgugaacaacgccacaaacguggugaucaaggugugcgaguuccaguucugcaacuaccccuuccugggcguguacuaccacaagaacaacaagagcuggauggagagcgaguuccgggucuacagcagcgcuaauaacugcaccuucgaguacgugagccagcccuuccugauggaccuggagggcaagcagggcaacuucaagaaccucagcgaguucguguucaagaacaucgacggcuacuucaagaucuacagcaagcacacccccaucaaccuggugcgggaucugccccagggauucagcgcccuggagccccugguggaccugccuaucggcaucaacaucacccgguuccagacccugcuggcccugcacaggagcuaccugacccccggcgacagcagcagcggcuggaccgccggcgccgccgcauacuacgugggcuaccugcagccccggaccuuccugcugaaguacaacgagaacggcaccaucaccgacgccguggacugcgcccuggacccacugagcgagaccaagugcacccuaaagagcuucaccguggagaagggcaucuaccagaccagcaacuuccgggugcagcccaccgagagcaucgugcgguuccccaacauuacuaaccugugucccuucggcgagguguucaacgccacccgguucgccagcguguacgccuggaaccggaagcggaucagcaacugcguggccgacuacagcgugcuguacaacagcgccagcuucagcaccuucaagugcuacggcgugagccccaccaagcugaacgaccugugcuucaccaacguguacgcugacagcuucgugauccggggcgacgaggugcggcagaucgccccuggccagaccggcaccaucgccgacuacaacuacaagcugcccgacgacuucaccggcugcgugaucgccuggaacagcaacaaccuggacagcaaggugggcggcaacuacaacuaccuguaccggcuguuccguaagagcaaccugaagcccuuugagcgggacaucagcaccgagaucuaccaggccggcagcaccccaugcaacggugugaagggcuucaacugcuacuucccccugcagagcuacggcuuccagcccaccuacggcgugggcuaccagcccuaccgggugguggugcugagcuucgagcugcugcacgcccccgccaccgugugcggccccaaaaagagcaccaaccuggugaagaacaagugcgugaacuucaauuucaacggccugaccggcaccggcgugcugaccgagagcaacaagaaguuccugccuuuccagcaguucggccgggacaucgccgauaccaccgacgcagugcgggacccccagacccuggagauccuggacaucacccccugcagcuucggcggcgugagcgucaucaccccaggcacaaacaccagcaaccagguggccgugcuguaccagggagugaacugcaccgaggugcccguggccauccacgccgaccagcugacccccaccuggcggguguacuccaccggcagcaacguguuccagacccgggccggcugccugaucggcgccgaguacgugaacaacagcuacgagugcgacauccccaucggcgcuggcaucugcgccagcuaccagacccagaccaacagcccccggcgggcccggagcguggccagccagagcaucaucgccuacaccaugagccugggcgccgagaacagcguggccuacagcaacaacagcaucgcgauccccaccaacuucaccaucagcgugaccaccgagauauuaccugugagcaugaccaagaccagcguggacuguaccauguacaucugcggcgacagcaccgagugcagcaaccugcugcugcaguacggcagcuucugcacccagcugaaccgggcccugaccggcaucgccguggagcaggacaagaacacccaagagguguucgcccaggugaagcagaucuacaagacuccacccaucaaggacuucggcggcuucaacuucagccagauccugcccgaccccagcaagcccagcaagcggagcuucaucgaggaccugcuguucaacaaggugacccuggccgacgccggcuucaucaagcaguacggcgacugccugggggacaucgccgcucgggaucugaucugcgcccagaaguucaacggccugaccgugcugccuccccugcugaccgacgagaugaucgcccaguacaccagcgcccugcuggccggcaccaucaccagcggcuggaccuucggcgccggcgcagcccuucagauccccuucgccaugcagauggccuaccgguucaacggcaucggcgugacccagaacgugcuguacgagaaccagaagcugaucgccaaccaguucaacagcgccaucggcaagauccaggacagccugagcagcaccgccagcgcccugggcaagcugcaggacguggugaaccagaacgcucaggcccugaacacccuggugaagcagcugagcucaaacuuuggcgccaucagcagcgugcugaaugacauccugagccggcuggacaagguggaggccgaggugcagaucgacaggcugaucaccggccggcugcagagccugcagaccuacgugacccagcagcugauccgggccgccgagauccgggccagcgccaaccuggcagccauuaagaugagcgagugcgugcugggccagagcaagcggguggacuucugcggcaagggcuaccaccugaugagcuucccccagagcgcuccccacggcgugguguuccugcacgucaccuacgugccagcccaggagaagaacuucacaaccgcccccgccaucugccacgacggcaaggcccacuucccccgggagggaguguucgugagcaacggcacccacugguucgugacccagcggaacuucuacgagccccagaucaucaccaccgacaacaccuucgugagcggcaacugcgacguggugaucggcaucgugaacaacaccguguacgacccccuccagcccgagcuggacagcuucaaggaggagcuggacaaguacuucaagaaccacaccagcccugacguggaccugggcgauaucagcggcaucaacgccagcguggugaacauccagaaggagaucgaccggcugaacgagguggccaagaaccugaacgagagccugaucgaccugcaggagcugggcaaguacgagcaguacaucaaguggcccugguacaucuggcugggcuucaucgccggccugaucgccaucgugauggugaccaucaugcugugcugcaugaccagcugcuguagcugccugaagggcugcugcagcugcggcagcugcugcaaguucgacgaggacgacagcgagcccgugcugaagggcgugaagcugcacuacaccugaggacuaguuauaagacugacuagcccgaugggccucccaacgggcccuccuccccuccuugcaccgagauuaauagaucucaaaggcucuuuucagagccaccaaaaaaaaaaaaaaaaaaaaaaaaaaaaaaaaaaaaaaaaaaaaaaaaaaaaaaaaaaaaaaaaaaaaaaaaaaaaaaaaaaaaaaaaaaaaaaaaaaaaa

SEQ ID NO: 24360 - RNA, 4041 nt, Artificial Sequence
  SARS-CoV-2/Wuhan/WIV05/2019__EPI_ISL_402128 spike protein mRNA gc (1-1273)(S13I_W152C_L452R_D614G)
aggagaaagcuuaccauguucguguuccuggugcugcugccccuggugagcauccagugcgugaaccugaccacccggacccagcugcccccugccuacaccaacagcuucacccggggcguguacuaccccgacaagguguuccggagcagcgugcugcacagcacccaggaccuguuccugcccuucuucagcaacgugaccugguuccacgccauccacgugagcggcaccaacggcaccaagcgguucgacaacccagugcugcccuucaacgacggcguguacuucgccagcaccgagaagucaaacaucauccggggcuggaucuucggcaccacccuggacagcaagacacagagccugcugaucgugaacaacgccaccaacguggugaucaaggugugcgaguuucaguucugcaacgaccccuuccugggcguguacuaccacaagaacaacaagagcugcauggagagcgaguuccgggucuacagcagcgcuaacaauugcaccuucgaguacgugagccagcccuuccugauggaccucgagggcaagcagggcaacuucaagaaccugcgggaguucguguucaagaacaucgauggcuacuucaagaucuacagcaagcacacccccaucaaccuggugcgggaccugccccagggauucagcgcccuggagccucugguggaccugcccaucggcaucaacaucaccagguuccagacccugcuggcccugcaccggagcuaccugacccccggcgacagcagcagcggcuggaccgccggcgccgccgcauacuacgugggcuaccugcagccacggaccuuccugcugaaguacaacgagaacggcaccaucaccgacgccguggacugcgcccuggacccccugagcgagaccaaguguacccuaaagagcuucaccguggagaagggcaucuaccagaccagcaacuuccgggugcagcccacugagagcauugugcgguuccccaacaucaccaaccugugccccuucggcgagguguucaacgccacccgguucgccagcguguacgccuggaaccggaagcggaucagcaacugcguggccgacuacagcgugcuguacaacagcgccagcuucagcaccuucaagugcuacggcgugagcccuaccaagcugaacgaccugugcuucaccaacguguacgcugacagcuucgugauccggggcgacgaggugcggcagaucgcccccggccagaccggcaagaucgccgacuacaacuacaagcugcccgacgacuucaccggcugcgugaucgccuggaacagcaacaaccuggacagcaaggugggcggcaacuacaacuaccgguaccggcuguuccguaagagcaaccugaagccauucgagcgggacaucagcaccgagaucuaccaggccggcagcacccccugcaacgguguggagggcuuuaacugcuacuucccccugcagagcuacggcuuccagcccaccaacggcgugggcuaccagcccuaccgggugguggugcugagcuucgagcugcugcacgcccccgccaccgugugcggcccuaaaaagagcaccaaccuggugaagaacaagugcgugaacuucaauuucaacggccugaccggcaccggcgugcugaccgagagcaacaagaaguuccugcccuuccagcaguucggccgggauaucgccgacaccaccgacgcagugcgggacccccagacccuggagauccuggacaucaccccaugcagcuucggcggcgugagcgucaucacccccggcacaaacaccagcaaccagguggccgugcuguaccagggagugaacugcaccgaggugcccguggccauccacgccgaccagcugacccccaccuggcggguguacagcaccggcagcaacguguuccagacccgggccggcugccugaucggcgccgagcacgugaacaacagcuacgagugcgacauccccaucggcgcuggcaucugugccuccuaccagacccagaccaacagcccccggcgggcccggagcguggccagccagagcaucaucgccuacaccaugagccugggcgccgagaacagcguggccuacagcaacaacagcaucgcgaucccuaccaacuucaccauaagcgugaccaccgagaucuuacccgugagcaugaccaagaccagcguggacugcaccauguacaucugcggcgacagcaccgagugcagcaaccugcugcugcaguacggcagcuucugcacccagcugaaccgggcccugaccggcaucgccguggagcaggacaagaacacccaagagguguucgcccaggugaagcagaucuacaagacucccccaaucaaggacuucggcggcuucaacuucagccagauccugcccgaccccagcaagcccagcaagcggagcuucaucgaggaccugcuguucaacaaggugacccuggccgacgccggcuucaucaagcaguacggcgacugccugggggauaucgccgcucgggaccugaucugcgcccagaaguucaacggccugaccgugcugcccccucugcugaccgacgagaugaucgcccaguacaccagcgcccugcuggccggcaccaucaccagcggcuggaccuucggcgccggcgcagcccuucagauccccuucgccaugcagauggccuacagguucaacggcaucggcgugacccagaacgugcuguacgagaaccagaagcugaucgccaaccaguucaacagcgccaucggcaagauccaggacagccugagcagcaccgccagcgcccugggcaagcugcaggacguggugaaccagaacgcucaggcccugaacacccuggugaagcagcugagcagcaacuucggcgccaucagcagcgugcugaaugacauccugucacggcuggacaagguggaggccgaggugcagaucgaccggcugaucaccggccggcugcagagccugcagaccuacgugacccagcagcugauccgggccgccgagauucgggccagcgccaaccuggcagccaccaagaugagcgagugcgugcugggccagagcaagcggguggacuuuugcggcaagggcuaccaccugaugagcuucccccagagcgccccacacggcgugguguuccugcacgucacauacgugcccgcccaggagaagaacuucaccaccgcccccgccaucugccacgacggcaaggcucacuucccccgggagggaguguucgugagcaacggcacccacugguucgugacccagcggaacuucuacgagccccagaucaucaccaccgacaacaccuucgugagcggcaacugcgacguggugaucggcaucgugaacaacaccguguacgacccccuccagccugagcuggacagcuucaaggaggagcuggacaaguacuucaagaaccacaccagccccgacguggaucugggcgacaucagcggcaucaacgccagcguggugaacauccagaaggagaucgaccggcugaacgagguggccaagaaccugaacgagagccugaucgaccugcaggagcugggcaaguacgagcaguacaucaaguggcccugguacaucuggcugggcuucaucgccggccugaucgccaucgugauggugaccaucaugcugugcugcaugaccagcuguugcagcugccugaagggcugcugcagcugcggcagcugcugcaaguucgacgaggacgacagcgagccagugcugaagggcgugaagcugcacuacaccugaggacuaguuauaagacugacuagcccgaugggccucccaacgggcccuccuccccuccuugcaccgagauuaauagaucucaaaggcucuuuucagagccaccaaaaaaaaaaaaaaaaaaaaaaaaaaaaaaaaaaaaaaaaaaaaaaaaaaaaaaaaaaaaaaaaaaaaaaaaaaaaaaaaaaaaaaaaaaaaaaaaaaaaa

SEQ ID NO: 24361 - RNA, 4041 nt, Artificial Sequence
  SARS-CoV-2/Wuhan/WIV05/2019__EPI_ISL_402128 spike protein mRNA gc mod (1-1273)
aggagaaagcuuaccauguucguguuucuggugcugcugccccugguguccagccagugugugaaccugaccaccagaacacagcugccuccagccuacaccaacagcuucaccagaggcguguacuaccccgacaagguguucagauccagcgugcugcacucuacccaggaccuguuccugccuuucuucagcaacgugaccugguuccacgccauccacguguccggcaccaauggcaccaagagauucgacaaccccgugcugcccuucaacgacgggguguacuuugccagcaccgagaaguccaacaucaucagaggcuggaucuucggcaccacacuggacagcaagacccagagccugcugaucgugaacaacgccaccaacguggucaucaaagugugcgaguuccaguucugcaacgaccccuuccugggcgucuacuaccacaagaacaacaagagcuggauggaaagcgaguuccggguguacagcagcgccaacaacugcaccuucgaguacgugucccagccuuuccugauggaccuggaaggcaagcagggcaacuucaagaaccugcgcgaguucguguucaagaacaucgacggcuacuucaaaaucuacagcaagcacaccccuaucaaccucgugcgggaucugccucagggcuucucugcucuggaaccccugguggaucugcccaucggcaucaacaucacccgguuucagacacugcuggcccugcacagaagcuaccugacaccuggcgauagcagcagcggauggacagcuggugccgccgcuuacuaugugggcuaccugcagccuagaaccuuccugcugaaguacaacgagaacggcaccaucaccgacgccguggauugugcucuggauccucugagcgagacaaagugcacccugaaguccuucaccguggaaaagggcaucuaccagaccagcaacuuccgggugcagcccaccgaauccaucgugcgguuccccaauaucaccaaucugugccccuucggcgagguguucaaugccaccagauucgccucuguguacgccuggaaccggaagcggaucagcaauugcguggccgacuacuccgugcuguacaacuccgccagcuucagcaccuucaagugcuacggcguguccccuaccaagcugaacgaccugugcuucacaaacguguacgccgacagcuucgugauccggggagaugaagugcggcagauugccccuggacagacaggcaagaucgccgacuacaacuacaagcugcccgacgacuucaccggcugugugauugccuggaacagcaacaaccuggacuccaaagucggcggcaacuacaauuaccuguaccggcuguuccggaaguccaaucugaagcccuucgagcgggacaucagcaccgaaaucuaucaggccggcagcaccccuugcaacggcguggaaggcuucaacugcuacuucccacugcaguccuacggcuuucagcccacaaauggcgugggcuaucagcccuacagagugguggugcugagcuucgaacugcugcaugcuccugccacagugugcggcccuaagaaaagcaccaaucucgugaagaacaaaugcgugaacuucaacuucaacggccugaccggcaccggcgugcugacagagagcaacaagaaguuccugccauuccagcaguuuggccgggauaucgccgauaccacagacgccguuagagauccccagacacuggaaauccuggacaucaccccaugcagcuucggcggagugucugugaucaccccuggcaccaacaccagcaaucagguggcagugcuguaccaggacgugaacuguaccgaagugcccguggccauucacgccgaucagcugacaccuacauggcggguguacuccaccggcagcaauguguuucagaccagagccggcugucugaucggagccgagcacgugaacaauagcuacgagugcgacauccccaucggcgcuggcaucugugccagcuaccagacacagacaaacagccccagacgggcuagaagcguggccagccagagcaucauugccuacacaaugucucugggcgccgagaacagcguggccuacuccaacaacucuaucgcuauccccaccaacuucaccaucagcgugaccaccgagauccugccuguguccaugaccaagaccagcguggacugcaccauguacaucugcggcgauuccaccgagugcuccaaccugcugcugcaguacggcagcuucugcacccagcugaauagagcccugacagggaucgccguggaacaggacaagaacacccaagagguguucgcccaagugaagcaaaucuacaagaccccuccuaucaaggacuucggcggcuucaauuucagccagauucugcccgauccuagcaagcccagcaagcggagcuucaucgaggaccugcuguucaacaaagugacacuggccgacgccggcuucaucaagcaguauggcgauugucugggcgacauugccgccagggaucugauuugcgcccagaaguuuaacggacugacagugcugccuccucugcugaccgaugagaugaucgcccaguacacaucugcccugcuggccggcacaaucacaagcggcuggacauuuggagcuggcgccgcucugcagauccccuuugcuaugcagauggccuaccgguucaacggcaucggagugacccagaaugugcuguacgagaaccagaagcugaucgccaaccaguucaacagcgccaucggcaagauccaggacagccugagcagcacagcaagcgcccugggaaagcugcaggacguggucaaccagaaugcccaggcacugaacacccuggucaagcagcuguccuccaacuucggcgccaucagcucugugcugaacgauauccugagcagacuggacaaggucgaggccgaggugcagaucgacagacugaucacaggcagacugcagagccuccagacauacgugacccagcagcugaucagagccgccgagauuagagccucugccaaucuggccgccaccaagaugucugagugugugcugggccagagcaagagaguggacuuuugcggcaagggcuaccaccugaugagcuucccucagucugccccucacggcgugguguuucugcacgugacauaugugcccgcucaagagaagaauuucaccaccgcuccagccaucugccacgacggcaaagcccacuuuccuagagaaggcguguucguguccaacggcacccauugguucgugacacagcggaacuucuacgagccccagaucaucaccaccgacaacaccuucgugucuggcaacugcgacguugugaucggcauugugaacaauaccguguacgacccucugcagcccgagcuggacagcuucaaagaggaacuggacaaguacuuuaagaaccacacaagccccgacguggaccugggcgauaucagcggaaucaaugccagcgucgugaacauccagaaagagaucgaccggcugaacgagguggccaagaaucugaacgagagccugaucgaccugcaagaacuggggaaguacgagcaguacaucaaguggcccugguacaucuggcugggcuuuaucgccggacugauugccaucgugauggucacaaucaugcuguguugcaugaccagcugcuguagcugccugaagggcuguuguagcuguggcagcugcugcaaguucgacgaggacgauucugagcccgugcugaagggcgugaaacugcacuacaccugaggacuaguuauaagacugacuagcccgaugggccucccaacgggcccuccuccccuccuugcaccgagauuaauagaucucaaaggcucuuuucagagccaccaaaaaaaaaaaaaaaaaaaaaaaaaaaaaaaaaaaaaaaaaaaaaaaaaaaaaaaaaaaaaaaaaaaaaaaaaaaaaaaaaaaaaaaaaaaaaaaaaaaaa

SEQ ID NO: 24362 - RNA, 4041 nt, Artificial Sequence
  SARS-CoV-2/Wuhan/WIV05/2019__EPI_ISL_402128 spike protein mRNA gc mod (1-1273)(D614G)
aggagaaagcuuaccauguucguguuucuggugcugcugccccugguguccagccagugugugaaccugaccaccagaacacagcugccuccagccuacaccaacagcuucaccagaggcguguacuaccccgacaagguguucagauccagcgugcugcacucuacccaggaccuguuccugccuuucuucagcaacgugaccugguuccacgccauccacguguccggcaccaauggcaccaagagauucgacaaccccgugcugcccuucaacgacgggguguacuuugccagcaccgagaaguccaacaucaucagaggcuggaucuucggcaccacacuggacagcaagacccagagccugcugaucgugaacaacgccaccaacguggucaucaaagugugcgaguuccaguucugcaacgaccccuuccugggcgucuacuaccacaagaacaacaagagcuggauggaaagcgaguuccggguguacagcagcgccaacaacugcaccuucgaguacgugucccagccuuuccugauggaccuggaaggcaagcagggcaacuucaagaaccugcgcgaguucguguucaagaacaucgacggcuacuucaaaaucuacagcaagcacaccccuaucaaccucgugcgggaucugccucagggcuucucugcucuggaaccccugguggaucugcccaucggcaucaacaucacccgguuucagacacugcuggcccugcacagaagcuaccugacaccuggcgauagcagcagcggauggacagcuggugccgccgcuuacuaugugggcuaccugcagccuagaaccuuccugcugaaguacaacgagaacggcaccaucaccgacgccguggauugugcucuggauccucugagcgagacaaagugcacccugaaguccuucaccguggaaaagggcaucuaccagaccagcaacuuccgggugcagcccaccgaauccaucgugcgguuccccaauaucaccaaucugugccccuucggcgagguguucaaugccaccagauucgccucuguguacgccuggaaccggaagcggaucagcaauugcguggccgacuacuccgugcuguacaacuccgccagcuucagcaccuucaagugcuacggcguguccccuaccaagcugaacgaccugugcuucacaaacguguacgccgacagcuucgugauccggggagaugaagugcggcagauugccccuggacagacaggcaagaucgccgacuacaacuacaagcugcccgacgacuucaccggcugugugauugccuggaacagcaacaaccuggacuccaaagucggcggcaacuacaauuaccuguaccggcuguuccggaaguccaaucugaagcccuucgagcgggacaucagcaccgaaaucuaucaggccggcagcaccccuugcaacggcguggaaggcuucaacugcuacuucccacugcaguccuacggcuuucagcccacaaauggcgugggcuaucagcccuacagagugguggugcugagcuucgaacugcugcaugcuccugccacagugugcggcccuaagaaaagcaccaaucucgugaagaacaaaugcgugaacuucaacuucaacggccugaccggcaccggcgugcugacagagagcaacaagaaguuccugccauuccagcaguuuggccgggauaucgccgauaccacagacgccguuagagauccccagacacuggaaauccuggacaucaccccaugcagcuucggcggagugucugugaucaccccuggcaccaacaccagcaaucagguggcagugcuguaccagggcgugaacuguaccgaagugcccguggccauucacgccgaucagcugacaccuacauggcggguguacuccaccggcagcaauguguuucagaccagagccggcugucugaucggagccgagcacgugaacaauagcuacgagugcgacauccccaucggcgcuggcaucugugccagcuaccagacacagacaaacagccccagacgggcuagaagcguggccagccagagcaucauugccuacacaaugucucugggcgccgagaacagcguggccuacuccaacaacucuaucgcuauccccaccaacuucaccaucagcgugaccaccgagauccugccuguguccaugaccaagaccagcguggacugcaccauguacaucugcggcgauuccaccgagugcuccaaccugcugcugcaguacggcagcuucugcacccagcugaauagagcccugacagggaucgccguggaacaggacaagaacacccaagagguguucgcccaagugaagcaaaucuacaagaccccuccuaucaaggacuucggcggcuucaauuucagccagauucugcccgauccuagcaagcccagcaagcggagcuucaucgaggaccugcuguucaacaaagugacacuggccgacgccggcuucaucaagcaguauggcgauugucugggcgacauugccgccagggaucugauuugcgcccagaaguuuaacggacugacagugcugccuccucugcugaccgaugagaugaucgcccaguacacaucugcccugcuggccggcacaaucacaagcggcuggacauuuggagcuggcgccgcucugcagauccccuuugcuaugcagauggccuaccgguucaacggcaucggagugacccagaaugugcuguacgagaaccagaagcugaucgccaaccaguucaacagcgccaucggcaagauccaggacagccugagcagcacagcaagcgcccugggaaagcugcaggacguggucaaccagaaugcccaggcacugaacacccuggucaagcagcuguccuccaacuucggcgccaucagcucugugcugaacgauauccugagcagacuggacaaggucgaggccgaggugcagaucgacagacugaucacaggcagacugcagagccuccagacauacgugacccagcagcugaucagagccgccgagauuagagccucugccaaucuggccgccaccaagaugucugagugugugcugggccagagcaagagaguggacuuuugcggcaagggcuaccaccugaugagcuucccucagucugccccucacggcgugguguuucugcacgugacauaugugcccgcucaagagaagaauuucaccaccgcuccagccaucugccacgacggcaaagcccacuuuccuagagaaggcguguucguguccaacggcacccauugguucgugacacagcggaacuucuacgagccccagaucaucaccaccgacaacaccuucgugucuggcaacugcgacguugugaucggcauugugaacaauaccguguacgacccucugcagcccgagcuggacagcuucaaagaggaacuggacaaguacuuuaagaaccacacaagccccgacguggaccugggcgauaucagcggaaucaaugccagcgucgugaacauccagaaagagaucgaccggcugaacgagguggccaagaaucugaacgagagccugaucgaccugcaagaacuggggaaguacgagcaguacaucaaguggcccugguacaucuggcugggcuuuaucgccggacugauugccaucgugauggucacaaucaugcuguguugcaugaccagcugcuguagcugccugaagggcuguuguagcuguggcagcugcugcaaguucgacgaggacgauucugagcccgugcugaagggcgugaaacugcacuacaccugaggacuaguuauaagacugacuagcccgaugggccucccaacgggcccuccuccccuccuugcaccgagauuaauagaucucaaaggcucuuuucagagccaccaaaaaaaaaaaaaaaaaaaaaaaaaaaaaaaaaaaaaaaaaaaaaaaaaaaaaaaaaaaaaaaaaaaaaaaaaaaaaaaaaaaaaaaaaaaaaaaaaaaaa

SEQ ID NO: 24363 - RNA, 4041 nt, Artificial Sequence
  SARS-CoV-2/Wuhan/WIV05/2019__EPI_ISL_402128 spike protein mRNA gc mod (1-1273)(A222V_D614G)
aggagaaagcuuaccauguucguguuucuggugcugcugccccugguguccagccagugugugaaccugaccaccagaacacagcugccuccagccuacaccaacagcuucaccagaggcguguacuaccccgacaagguguucagauccagcgugcugcacucuacccaggaccuguuccugccuuucuucagcaacgugaccugguuccacgccauccacguguccggcaccaauggcaccaagagauucgacaaccccgugcugcccuucaacgacgggguguacuuugccagcaccgagaaguccaacaucaucagaggcuggaucuucggcaccacacuggacagcaagacccagagccugcugaucgugaacaacgccaccaacguggucaucaaagugugcgaguuccaguucugcaacgaccccuuccugggcgucuacuaccacaagaacaacaagagcuggauggaaagcgaguuccggguguacagcagcgccaacaacugcaccuucgaguacgugucccagccuuuccugauggaccuggaaggcaagcagggcaacuucaagaaccugcgcgaguucguguucaagaacaucgacggcuacuucaaaaucuacagcaagcacaccccuaucaaccucgugcgggaucugccucagggcuucucugugcuggaaccccugguggaucugcccaucggcaucaacaucacccgguuucagacacugcuggcccugcacagaagcuaccugacaccuggcgauagcagcagcggauggacagcuggugccgccgcuuacuaugugggcuaccugcagccuagaaccuuccugcugaaguacaacgagaacggcaccaucaccgacgccguggauugugcucuggauccucugagcgagacaaagugcacccugaaguccuucaccguggaaaagggcaucuaccagaccagcaacuuccgggugcagcccaccgaauccaucgugcgguuccccaauaucaccaaucugugccccuucggcgagguguucaaugccaccagauucgccucuguguacgccuggaaccggaagcggaucagcaauugcguggccgacuacuccgugcuguacaacuccgccagcuucagcaccuucaagugcuacggcguguccccuaccaagcugaacgaccugugcuucacaaacguguacgccgacagcuucgugauccggggagaugaagugcggcagauugccccuggacagacaggcaagaucgccgacuacaacuacaagcugcccgacgacuucaccggcugugugauugccuggaacagcaacaaccuggacuccaaagucggcggcaacuacaauuaccuguaccggcuguuccggaaguccaaucugaagcccuucgagcgggacaucagcaccgaaaucuaucaggccggcagcaccccuugcaacggcguggaaggcuucaacugcuacuucccacugcaguccuacggcuuucagcccacaaauggcgugggcuaucagcccuacagagugguggugcugagcuucgaacugcugcaugcuccugccacagugugcggcccuaagaaaagcaccaaucucgugaagaacaaaugcgugaacuucaacuucaacggccugaccggcaccggcgugcugacagagagcaacaagaaguuccugccauuccagcaguuuggccgggauaucgccgauaccacagacgccguuagagauccccagacacuggaaauccuggacaucaccccaugcagcuucggcggagugucugugaucaccccuggcaccaacaccagcaaucagguggcagugcuguaccagggcgugaacuguaccgaagugcccguggccauucacgccgaucagcugacaccuacauggcggguguacuccaccggcagcaauguguuucagaccagagccggcugucugaucggagccgagcacgugaacaauagcuacgagugcgacauccccaucggcgcuggcaucugugccagcuaccagacacagacaaacagccccagacgggcuagaagcguggccagccagagcaucauugccuacacaaugucucugggcgccgagaacagcguggccuacuccaacaacucuaucgcuauccccaccaacuucaccaucagcgugaccaccgagauccugccuguguccaugaccaagaccagcguggacugcaccauguacaucugcggcgauuccaccgagugcuccaaccugcugcugcaguacggcagcuucugcacccagcugaauagagcccugacagggaucgccguggaacaggacaagaacacccaagagguguucgcccaagugaagcaaaucuacaagaccccuccuaucaaggacuucggcggcuucaauuucagccagauucugcccgauccuagcaagcccagcaagcggagcuucaucgaggaccugcuguucaacaaagugacacuggccgacgccggcuucaucaagcaguauggcgauugucugggcgacauugccgccagggaucugauuugcgcccagaaguuuaacggacugacagugcugccuccucugcugaccgaugagaugaucgcccaguacacaucugcccugcuggccggcacaaucacaagcggcuggacauuuggagcuggcgccgcucugcagauccccuuugcuaugcagauggccuaccgguucaacggcaucggagugacccagaaugugcuguacgagaaccagaagcugaucgccaaccaguucaacagcgccaucggcaagauccaggacagccugagcagcacagcaagcgcccugggaaagcugcaggacguggucaaccagaaugcccaggcacugaacacccuggucaagcagcuguccuccaacuucggcgccaucagcucugugcugaacgauauccugagcagacuggacaaggucgaggccgaggugcagaucgacagacugaucacaggcagacugcagagccuccagacauacgugacccagcagcugaucagagccgccgagauuagagccucugccaaucuggccgccaccaagaugucugagugugugcugggccagagcaagagaguggacuuuugcggcaagggcuaccaccugaugagcuucccucagucugccccucacggcgugguguuucugcacgugacauaugugcccgcucaagagaagaauuucaccaccgcuccagccaucugccacgacggcaaagcccacuuuccuagagaaggcguguucguguccaacggcacccauugguucgugacacagcggaacuucuacgagccccagaucaucaccaccgacaacaccuucgugucuggcaacugcgacguugugaucggcauugugaacaauaccguguacgacccucugcagcccgagcuggacagcuucaaagaggaacuggacaaguacuuuaagaaccacacaagccccgacguggaccugggcgauaucagcggaaucaaugccagcgucgugaacauccagaaagagaucgaccggcugaacgagguggccaagaaucugaacgagagccugaucgaccugcaagaacuggggaaguacgagcaguacaucaaguggcccugguacaucuggcugggcuuuaucgccggacugauugccaucgugauggucacaaucaugcuguguugcaugaccagcugcuguagcugccugaagggcuguuguagcuguggcagcugcugcaaguucgacgaggacgauucugagcccgugcugaagggcgugaaacugcacuacaccugaggacuaguuauaagacugacuagcccgaugggccucccaacgggcccuccuccccuccuugcaccgagauuaauagaucucaaaggcucuuuucagagccaccaaaaaaaaaaaaaaaaaaaaaaaaaaaaaaaaaaaaaaaaaaaaaaaaaaaaaaaaaaaaaaaaaaaaaaaaaaaaaaaaaaaaaaaaaaaaaaaaaaaaa

SEQ ID NO: 24364 - RNA, 4041 nt, Artificial Sequence
  SARS-CoV-2/Wuhan/WIV05/2019__EPI_ISL_402128 spike protein mRNA gc mod (1-1273)(N439K_D614G)
aggagaaagcuuaccauguucguguuucuggugcugcugccccugguguccagccagugugugaaccugaccaccagaacacagcugccuccagccuacaccaacagcuucaccagaggcguguacuaccccgacaagguguucagauccagcgugcugcacucuacccaggaccuguuccugccuuucuucagcaacgugaccugguuccacgccauccacguguccggcaccaauggcaccaagagauucgacaaccccgugcugcccuucaacgacgggguguacuuugccagcaccgagaaguccaacaucaucagaggcuggaucuucggcaccacacuggacagcaagacccagagccugcugaucgugaacaacgccaccaacguggucaucaaagugugcgaguuccaguucugcaacgaccccuuccugggcgucuacuaccacaagaacaacaagagcuggauggaaagcgaguuccggguguacagcagcgccaacaacugcaccuucgaguacgugucccagccuuuccugauggaccuggaaggcaagcagggcaacuucaagaaccugcgcgaguucguguucaagaacaucgacggcuacuucaaaaucuacagcaagcacaccccuaucaaccucgugcgggaucugccucagggcuucucugcucuggaaccccugguggaucugcccaucggcaucaacaucacccgguuucagacacugcuggcccugcacagaagcuaccugacaccuggcgauagcagcagcggauggacagcuggugccgccgcuuacuaugugggcuaccugcagccuagaaccuuccugcugaaguacaacgagaacggcaccaucaccgacgccguggauugugcucuggauccucugagcgagacaaagugcacccugaaguccuucaccguggaaaagggcaucuaccagaccagcaacuuccgggugcagcccaccgaauccaucgugcgguuccccaauaucaccaaucugugccccuucggcgagguguucaaugccaccagauucgccucuguguacgccuggaaccggaagcggaucagcaauugcguggccgacuacuccgugcuguacaacuccgccagcuucagcaccuucaagugcuacggcguguccccuaccaagcugaacgaccugugcuucacaaacguguacgccgacagcuucgugauccggggagaugaagugcggcagauugccccuggacagacaggcaagaucgccgacuacaacuacaagcugcccgacgacuucaccggcugugugauugccuggaacagcaagaaccuggacuccaaagucggcggcaacuacaauuaccuguaccggcuguuccggaaguccaaucugaagcccuucgagcgggacaucagcaccgaaaucuaucaggccggcagcaccccuugcaacggcguggaaggcuucaacugcuacuucccacugcaguccuacggcuuucagcccacaaauggcgugggcuaucagcccuacagagugguggugcugagcuucgaacugcugcaugcuccugccacagugugcggcccuaagaaaagcaccaaucucgugaagaacaaaugcgugaacuucaacuucaacggccugaccggcaccggcgugcugacagagagcaacaagaaguuccugccauuccagcaguuuggccgggauaucgccgauaccacagacgccguuagagauccccagacacuggaaauccuggacaucaccccaugcagcuucggcggagugucugugaucaccccuggcaccaacaccagcaaucagguggcagugcuguaccagggcgugaacuguaccgaagugcccguggccauucacgccgaucagcugacaccuacauggcggguguacuccaccggcagcaauguguuucagaccagagccggcugucugaucggagccgagcacgugaacaauagcuacgagugcgacauccccaucggcgcuggcaucugugccagcuaccagacacagacaaacagccccagacgggcuagaagcguggccagccagagcaucauugccuacacaaugucucugggcgccgagaacagcguggccuacuccaacaacucuaucgcuauccccaccaacuucaccaucagcgugaccaccgagauccugccuguguccaugaccaagaccagcguggacugcaccauguacaucugcggcgauuccaccgagugcuccaaccugcugcugcaguacggcagcuucugcacccagcugaauagagcccugacagggaucgccguggaacaggacaagaacacccaagagguguucgcccaagugaagcaaaucuacaagaccccuccuaucaaggacuucggcggcuucaauuucagccagauucugcccgauccuagcaagcccagcaagcggagcuucaucgaggaccugcuguucaacaaagugacacuggccgacgccggcuucaucaagcaguauggcgauugucugggcgacauugccgccagggaucugauuugcgcccagaaguuuaacggacugacagugcugccuccucugcugaccgaugagaugaucgcccaguacacaucugcccugcuggccggcacaaucacaagcggcuggacauuuggagcuggcgccgcucugcagauccccuuugcuaugcagauggccuaccgguucaacggcaucggagugacccagaaugugcuguacgagaaccagaagcugaucgccaaccaguucaacagcgccaucggcaagauccaggacagccugagcagcacagcaagcgcccugggaaagcugcaggacguggucaaccagaaugcccaggcacugaacacccuggucaagcagcuguccuccaacuucggcgccaucagcucugugcugaacgauauccugagcagacuggacaaggucgaggccgaggugcagaucgacagacugaucacaggcagacugcagagccuccagacauacgugacccagcagcugaucagagccgccgagauuagagccucugccaaucuggccgccaccaagaugucugagugugugcugggccagagcaagagaguggacuuuugcggcaagggcuaccaccugaugagcuucccucagucugccccucacggcgugguguuucugcacgugacauaugugcccgcucaagagaagaauuucaccaccgcuccagccaucugccacgacggcaaagcccacuuuccuagagaaggcguguucguguccaacggcacccauugguucgugacacagcggaacuucuacgagccccagaucaucaccaccgacaacaccuucgugucuggcaacugcgacguugugaucggcauugugaacaauaccguguacgacccucugcagcccgagcuggacagcuucaaagaggaacuggacaaguacuuuaagaaccacacaagccccgacguggaccugggcgauaucagcggaaucaaugccagcgucgugaacauccagaaagagaucgaccggcugaacgagguggccaagaaucugaacgagagccugaucgaccugcaagaacuggggaaguacgagcaguacaucaaguggcccugguacaucuggcugggcuuuaucgccggacugauugccaucgugauggucacaaucaugcuguguugcaugaccagcugcuguagcugccugaagggcuguuguagcuguggcagcugcugcaaguucgacgaggacgauucugagcccgugcugaagggcgugaaacugcacuacaccugaggacuaguuauaagacugacuagcccgaugggccucccaacgggcccuccuccccuccuugcaccgagauuaauagaucucaaaggcucuuuucagagccaccaaaaaaaaaaaaaaaaaaaaaaaaaaaaaaaaaaaaaaaaaaaaaaaaaaaaaaaaaaaaaaaaaaaaaaaaaaaaaaaaaaaaaaaaaaaaaaaaaaaaa

SEQ ID NO: 24365 - RNA, 4041 nt, Artificial Sequence
  SARS-CoV-2/Wuhan/WIV05/2019__EPI_ISL_402128 spike protein mRNA gc mod (1-1273)(S477N_D614G)
aggagaaagcuuaccauguucguguuucuggugcugcugccccugguguccagccagugugugaaccugaccaccagaacacagcugccuccagccuacaccaacagcuucaccagaggcguguacuaccccgacaagguguucagauccagcgugcugcacucuacccaggaccuguuccugccuuucuucagcaacgugaccugguuccacgccauccacguguccggcaccaauggcaccaagagauucgacaaccccgugcugcccuucaacgacgggguguacuuugccagcaccgagaaguccaacaucaucagaggcuggaucuucggcaccacacuggacagcaagacccagagccugcugaucgugaacaacgccaccaacguggucaucaaagugugcgaguuccaguucugcaacgaccccuuccugggcgucuacuaccacaagaacaacaagagcuggauggaaagcgaguuccggguguacagcagcgccaacaacugcaccuucgaguacgugucccagccuuuccugauggaccuggaaggcaagcagggcaacuucaagaaccugcgcgaguucguguucaagaacaucgacggcuacuucaaaaucuacagcaagcacaccccuaucaaccucgugcgggaucugccucagggcuucucugcucuggaaccccugguggaucugcccaucggcaucaacaucacccgguuucagacacugcuggcccugcacagaagcuaccugacaccuggcgauagcagcagcggauggacagcuggugccgccgcuuacuaugugggcuaccugcagccuagaaccuuccugcugaaguacaacgagaacggcaccaucaccgacgccguggauugugcucuggauccucugagcgagacaaagugcacccugaaguccuucaccguggaaaagggcaucuaccagaccagcaacuuccgggugcagcccaccgaauccaucgugcgguuccccaauaucaccaaucugugccccuucggcgagguguucaaugccaccagauucgccucuguguacgccuggaaccggaagcggaucagcaauugcguggccgacuacuccgugcuguacaacuccgccagcuucagcaccuucaagugcuacggcguguccccuaccaagcugaacgaccugugcuucacaaacguguacgccgacagcuucgugauccggggagaugaagugcggcagauugccccuggacagacaggcaagaucgccgacuacaacuacaagcugcccgacgacuucaccggcugugugauugccuggaacagcaacaaccuggacuccaaagucggcggcaacuacaauuaccuguaccggcuguuccggaaguccaaucugaagcccuucgagcgggacaucagcaccgaaaucuaucaggccggcaacaccccuugcaacggcguggaaggcuucaacugcuacuucccacugcaguccuacggcuuucagcccacaaauggcgugggcuaucagcccuacagagugguggugcugagcuucgaacugcugcaugcuccugccacagugugcggcccuaagaaaagcaccaaucucgugaagaacaaaugcgugaacuucaacuucaacggccugaccggcaccggcgugcugacagagagcaacaagaaguuccugccauuccagcaguuuggccgggauaucgccgauaccacagacgccguuagagauccccagacacuggaaauccuggacaucaccccaugcagcuucggcggagugucugugaucaccccuggcaccaacaccagcaaucagguggcagugcuguaccagggcgugaacuguaccgaagugcccguggccauucacgccgaucagcugacaccuacauggcggguguacuccaccggcagcaauguguuucagaccagagccggcugucugaucggagccgagcacgugaacaauagcuacgagugcgacauccccaucggcgcuggcaucugugccagcuaccagacacagacaaacagccccagacgggcuagaagcguggccagccagagcaucauugccuacacaaugucucugggcgccgagaacagcguggccuacuccaacaacucuaucgcuauccccaccaacuucaccaucagcgugaccaccgagauccugccuguguccaugaccaagaccagcguggacugcaccauguacaucugcggcgauuccaccgagugcuccaaccugcugcugcaguacggcagcuucugcacccagcugaauagagcccugacagggaucgccguggaacaggacaagaacacccaagagguguucgcccaagugaagcaaaucuacaagaccccuccuaucaaggacuucggcggcuucaauuucagccagauucugcccgauccuagcaagcccagcaagcggagcuucaucgaggaccugcuguucaacaaagugacacuggccgacgccggcuucaucaagcaguauggcgauugucugggcgacauugccgccagggaucugauuugcgcccagaaguuuaacggacugacagugcugccuccucugcugaccgaugagaugaucgcccaguacacaucugcccugcuggccggcacaaucacaagcggcuggacauuuggagcuggcgccgcucugcagauccccuuugcuaugcagauggccuaccgguucaacggcaucggagugacccagaaugugcuguacgagaaccagaagcugaucgccaaccaguucaacagcgccaucggcaagauccaggacagccugagcagcacagcaagcgcccugggaaagcugcaggacguggucaaccagaaugcccaggcacugaacacccuggucaagcagcuguccuccaacuucggcgccaucagcucugugcugaacgauauccugagcagacuggacaaggucgaggccgaggugcagaucgacagacugaucacaggcagacugcagagccuccagacauacgugacccagcagcugaucagagccgccgagauuagagccucugccaaucuggccgccaccaagaugucugagugugugcugggccagagcaagagaguggacuuuugcggcaagggcuaccaccugaugagcuucccucagucugccccucacggcgugguguuucugcacgugacauaugugcccgcucaagagaagaauuucaccaccgcuccagccaucugccacgacggcaaagcccacuuuccuagagaaggcguguucguguccaacggcacccauugguucgugacacagcggaacuucuacgagccccagaucaucaccaccgacaacaccuucgugucuggcaacugcgacguugugaucggcauugugaacaauaccguguacgacccucugcagcccgagcuggacagcuucaaagaggaacuggacaaguacuuuaagaaccacacaagccccgacguggaccugggcgauaucagcggaaucaaugccagcgucgugaacauccagaaagagaucgaccggcugaacgagguggccaagaaucugaacgagagccugaucgaccugcaagaacuggggaaguacgagcaguacaucaaguggcccugguacaucuggcugggcuuuaucgccggacugauugccaucgugauggucacaaucaugcuguguugcaugaccagcugcuguagcugccugaagggcuguuguagcuguggcagcugcugcaaguucgacgaggacgauucugagcccgugcugaagggcgugaaacugcacuacaccugaggacuaguuauaagacugacuagcccgaugggccucccaacgggcccuccuccccuccuugcaccgagauuaauagaucucaaaggcucuuuucagagccaccaaaaaaaaaaaaaaaaaaaaaaaaaaaaaaaaaaaaaaaaaaaaaaaaaaaaaaaaaaaaaaaaaaaaaaaaaaaaaaaaaaaaaaaaaaaaaaaaaaaaa

SEQ ID NO: 24366 - RNA, 4041 nt, Artificial Sequence
  SARS-CoV-2/Wuhan/WIV05/2019__EPI_ISL_402128 spike protein mRNA gc mod (1-1273)(N501Y_D614G)
aggagaaagcuuaccauguucguguuucuggugcugcugccccugguguccagccagugugugaaccugaccaccagaacacagcugccuccagccuacaccaacagcuucaccagaggcguguacuaccccgacaagguguucagauccagcgugcugcacucuacccaggaccuguuccugccuuucuucagcaacgugaccugguuccacgccauccacguguccggcaccaauggcaccaagagauucgacaaccccgugcugcccuucaacgacgggguguacuuugccagcaccgagaaguccaacaucaucagaggcuggaucuucggcaccacacuggacagcaagacccagagccugcugaucgugaacaacgccaccaacguggucaucaaagugugcgaguuccaguucugcaacgaccccuuccugggcgucuacuaccacaagaacaacaagagcuggauggaaagcgaguuccggguguacagcagcgccaacaacugcaccuucgaguacgugucccagccuuuccugauggaccuggaaggcaagcagggcaacuucaagaaccugcgcgaguucguguucaagaacaucgacggcuacuucaaaaucuacagcaagcacaccccuaucaaccucgugcgggaucugccucagggcuucucugcucuggaaccccugguggaucugcccaucggcaucaacaucacccgguuucagacacugcuggcccugcacagaagcuaccugacaccuggcgauagcagcagcggauggacagcuggugccgccgcuuacuaugugggcuaccugcagccuagaaccuuccugcugaaguacaacgagaacggcaccaucaccgacgccguggauugugcucuggauccucugagcgagacaaagugcacccugaaguccuucaccguggaaaagggcaucuaccagaccagcaacuuccgggugcagcccaccgaauccaucgugcgguuccccaauaucaccaaucugugccccuucggcgagguguucaaugccaccagauucgccucuguguacgccuggaaccggaagcggaucagcaauugcguggccgacuacuccgugcuguacaacuccgccagcuucagcaccuucaagugcuacggcguguccccuaccaagcugaacgaccugugcuucacaaacguguacgccgacagcuucgugauccggggagaugaagugcggcagauugccccuggacagacaggcaagaucgccgacuacaacuacaagcugcccgacgacuucaccggcugugugauugccuggaacagcaacaaccuggacuccaaagucggcggcaacuacaauuaccuguaccggcuguuccggaaguccaaucugaagcccuucgagcgggacaucagcaccgaaaucuaucaggccggcagcaccccuugcaacggcguggaaggcuucaacugcuacuucccacugcaguccuacggcuuucagcccacauacggcgugggcuaucagcccuacagagugguggugcugagcuucgaacugcugcaugcuccugccacagugugcggcccuaagaaaagcaccaaucucgugaagaacaaaugcgugaacuucaacuucaacggccugaccggcaccggcgugcugacagagagcaacaagaaguuccugccauuccagcaguuuggccgggauaucgccgauaccacagacgccguuagagauccccagacacuggaaauccuggacaucaccccaugcagcuucggcggagugucugugaucaccccuggcaccaacaccagcaaucagguggcagugcuguaccagggcgugaacuguaccgaagugcccguggccauucacgccgaucagcugacaccuacauggcggguguacuccaccggcagcaauguguuucagaccagagccggcugucugaucggagccgagcacgugaacaauagcuacgagugcgacauccccaucggcgcuggcaucugugccagcuaccagacacagacaaacagccccagacgggcuagaagcguggccagccagagcaucauugccuacacaaugucucugggcgccgagaacagcguggccuacuccaacaacucuaucgcuauccccaccaacuucaccaucagcgugaccaccgagauccugccuguguccaugaccaagaccagcguggacugcaccauguacaucugcggcgauuccaccgagugcuccaaccugcugcugcaguacggcagcuucugcacccagcugaauagagcccugacagggaucgccguggaacaggacaagaacacccaagagguguucgcccaagugaagcaaaucuacaagaccccuccuaucaaggacuucggcggcuucaauuucagccagauucugcccgauccuagcaagcccagcaagcggagcuucaucgaggaccugcuguucaacaaagugacacuggccgacgccggcuucaucaagcaguauggcgauugucugggcgacauugccgccagggaucugauuugcgcccagaaguuuaacggacugacagugcugccuccucugcugaccgaugagaugaucgcccaguacacaucugcccugcuggccggcacaaucacaagcggcuggacauuuggagcuggcgccgcucugcagauccccuuugcuaugcagauggccuaccgguucaacggcaucggagugacccagaaugugcuguacgagaaccagaagcugaucgccaaccaguucaacagcgccaucggcaagauccaggacagccugagcagcacagcaagcgcccugggaaagcugcaggacguggucaaccagaaugcccaggcacugaacacccuggucaagcagcuguccuccaacuucggcgccaucagcucugugcugaacgauauccugagcagacuggacaaggucgaggccgaggugcagaucgacagacugaucacaggcagacugcagagccuccagacauacgugacccagcagcugaucagagccgccgagauuagagccucugccaaucuggccgccaccaagaugucugagugugugcugggccagagcaagagaguggacuuuugcggcaagggcuaccaccugaugagcuucccucagucugccccucacggcgugguguuucugcacgugacauaugugcccgcucaagagaagaauuucaccaccgcuccagccaucugccacgacggcaaagcccacuuuccuagagaaggcguguucguguccaacggcacccauugguucgugacacagcggaacuucuacgagccccagaucaucaccaccgacaacaccuucgugucuggcaacugcgacguugugaucggcauugugaacaauaccguguacgacccucugcagcccgagcuggacagcuucaaagaggaacuggacaaguacuuuaagaaccacacaagccccgacguggaccugggcgauaucagcggaaucaaugccagcgucgugaacauccagaaagagaucgaccggcugaacgagguggccaagaaucugaacgagagccugaucgaccugcaagaacuggggaaguacgagcaguacaucaaguggcccugguacaucuggcugggcuuuaucgccggacugauugccaucgugauggucacaaucaugcuguguugcaugaccagcugcuguagcugccugaagggcuguuguagcuguggcagcugcugcaaguucgacgaggacgauucugagcccgugcugaagggcgugaaacugcacuacaccugaggacuaguuauaagacugacuagcccgaugggccucccaacgggcccuccuccccuccuugcaccgagauuaauagaucucaaaggcucuuuucagagccaccaaaaaaaaaaaaaaaaaaaaaaaaaaaaaaaaaaaaaaaaaaaaaaaaaaaaaaaaaaaaaaaaaaaaaaaaaaaaaaaaaaaaaaaaaaaaaaaaaaaaa

SEQ ID NO: 24367 - RNA, 4035 nt, Artificial Sequence
  SARS-CoV-2/Wuhan/WIV05/2019__EPI_ISL_402128 spike protein mRNA gc mod (1-1273)(H69del_V70del_D614G)
aggagaaagcuuaccauguucguguuucuggugcugcugccccugguguccagccagugugugaaccugaccaccagaacacagcugccuccagccuacaccaacagcuucaccagaggcguguacuaccccgacaagguguucagauccagcgugcugcacucuacccaggaccuguuccugccuuucuucagcaacgugaccugguuccacgccaucuccggcaccaauggcaccaagagauucgacaaccccgugcugcccuucaacgacgggguguacuuugccagcaccgagaaguccaacaucaucagaggcuggaucuucggcaccacacuggacagcaagacccagagccugcugaucgugaacaacgccaccaacguggucaucaaagugugcgaguuccaguucugcaacgaccccuuccugggcgucuacuaccacaagaacaacaagagcuggauggaaagcgaguuccggguguacagcagcgccaacaacugcaccuucgaguacgugucccagccuuuccugauggaccuggaaggcaagcagggcaacuucaagaaccugcgcgaguucguguucaagaacaucgacggcuacuucaaaaucuacagcaagcacaccccuaucaaccucgugcgggaucugccucagggcuucucugcucuggaaccccugguggaucugcccaucggcaucaacaucacccgguuucagacacugcuggcccugcacagaagcuaccugacaccuggcgauagcagcagcggauggacagcuggugccgccgcuuacuaugugggcuaccugcagccuagaaccuuccugcugaaguacaacgagaacggcaccaucaccgacgccguggauugugcucuggauccucugagcgagacaaagugcacccugaaguccuucaccguggaaaagggcaucuaccagaccagcaacuuccgggugcagcccaccgaauccaucgugcgguuccccaauaucaccaaucugugccccuucggcgagguguucaaugccaccagauucgccucuguguacgccuggaaccggaagcggaucagcaauugcguggccgacuacuccgugcuguacaacuccgccagcuucagcaccuucaagugcuacggcguguccccuaccaagcugaacgaccugugcuucacaaacguguacgccgacagcuucgugauccggggagaugaagugcggcagauugccccuggacagacaggcaagaucgccgacuacaacuacaagcugcccgacgacuucaccggcugugugauugccuggaacagcaacaaccuggacuccaaagucggcggcaacuacaauuaccuguaccggcuguuccggaaguccaaucugaagcccuucgagcgggacaucagcaccgaaaucuaucaggccggcagcaccccuugcaacggcguggaaggcuucaacugcuacuucccacugcaguccuacggcuuucagcccacaaauggcgugggcuaucagcccuacagagugguggugcugagcuucgaacugcugcaugcuccugccacagugugcggcccuaagaaaagcaccaaucucgugaagaacaaaugcgugaacuucaacuucaacggccugaccggcaccggcgugcugacagagagcaacaagaaguuccugccauuccagcaguuuggccgggauaucgccgauaccacagacgccguuagagauccccagacacuggaaauccuggacaucaccccaugcagcuucggcggagugucugugaucaccccuggcaccaacaccagcaaucagguggcagugcuguaccagggcgugaacuguaccgaagugcccguggccauucacgccgaucagcugacaccuacauggcggguguacuccaccggcagcaauguguuucagaccagagccggcugucugaucggagccgagcacgugaacaauagcuacgagugcgacauccccaucggcgcuggcaucugugccagcuaccagacacagacaaacagccccagacgggcuagaagcguggccagccagagcaucauugccuacacaaugucucugggcgccgagaacagcguggccuacuccaacaacucuaucgcuauccccaccaacuucaccaucagcgugaccaccgagauccugccuguguccaugaccaagaccagcguggacugcaccauguacaucugcggcgauuccaccgagugcuccaaccugcugcugcaguacggcagcuucugcacccagcugaauagagcccugacagggaucgccguggaacaggacaagaacacccaagagguguucgcccaagugaagcaaaucuacaagaccccuccuaucaaggacuucggcggcuucaauuucagccagauucugcccgauccuagcaagcccagcaagcggagcuucaucgaggaccugcuguucaacaaagugacacuggccgacgccggcuucaucaagcaguauggcgauugucugggcgacauugccgccagggaucugauuugcgcccagaaguuuaacggacugacagugcugccuccucugcugaccgaugagaugaucgcccaguacacaucugcccugcuggccggcacaaucacaagcggcuggacauuuggagcuggcgccgcucugcagauccccuuugcuaugcagauggccuaccgguucaacggcaucggagugacccagaaugugcuguacgagaaccagaagcugaucgccaaccaguucaacagcgccaucggcaagauccaggacagccugagcagcacagcaagcgcccugggaaagcugcaggacguggucaaccagaaugcccaggcacugaacacccuggucaagcagcuguccuccaacuucggcgccaucagcucugugcugaacgauauccugagcagacuggacaaggucgaggccgaggugcagaucgacagacugaucacaggcagacugcagagccuccagacauacgugacccagcagcugaucagagccgccgagauuagagccucugccaaucuggccgccaccaagaugucugagugugugcugggccagagcaagagaguggacuuuugcggcaagggcuaccaccugaugagcuucccucagucugccccucacggcgugguguuucugcacgugacauaugugcccgcucaagagaagaauuucaccaccgcuccagccaucugccacgacggcaaagcccacuuuccuagagaaggcguguucguguccaacggcacccauugguucgugacacagcggaacuucuacgagccccagaucaucaccaccgacaacaccuucgugucuggcaacugcgacguugugaucggcauugugaacaauaccguguacgacccucugcagcccgagcuggacagcuucaaagaggaacuggacaaguacuuuaagaaccacacaagccccgacguggaccugggcgauaucagcggaaucaaugccagcgucgugaacauccagaaagagaucgaccggcugaacgagguggccaagaaucugaacgagagccugaucgaccugcaagaacuggggaaguacgagcaguacaucaaguggcccugguacaucuggcugggcuuuaucgccggacugauugccaucgugauggucacaaucaugcuguguugcaugaccagcugcuguagcugccugaagggcuguuguagcuguggcagcugcugcaaguucgacgaggacgauucugagcccgugcugaagggcgugaaacugcacuacaccugaggacuaguuauaagacugacuagcccgaugggccucccaacgggcccuccuccccuccuugcaccgagauuaauagaucucaaaggcucuuuucagagccaccaaaaaaaaaaaaaaaaaaaaaaaaaaaaaaaaaaaaaaaaaaaaaaaaaaaaaaaaaaaaaaaaaaaaaaaaaaaaaaaaaaaaaaaaaaaaaaaaaaaaa

SEQ ID NO: 24368 - RNA, 4041 nt, Artificial Sequence
  SARS-CoV-2/Wuhan/WIV05/2019__EPI_ISL_402128 spike protein mRNA gc mod (1-1273)(Y453F_D614G)
aggagaaagcuuaccauguucguguuucuggugcugcugccccugguguccagccagugugugaaccugaccaccagaacacagcugccuccagccuacaccaacagcuucaccagaggcguguacuaccccgacaagguguucagauccagcgugcugcacucuacccaggaccuguuccugccuuucuucagcaacgugaccugguuccacgccauccacguguccggcaccaauggcaccaagagauucgacaaccccgugcugcccuucaacgacgggguguacuuugccagcaccgagaaguccaacaucaucagaggcuggaucuucggcaccacacuggacagcaagacccagagccugcugaucgugaacaacgccaccaacguggucaucaaagugugcgaguuccaguucugcaacgaccccuuccugggcgucuacuaccacaagaacaacaagagcuggauggaaagcgaguuccggguguacagcagcgccaacaacugcaccuucgaguacgugucccagccuuuccugauggaccuggaaggcaagcagggcaacuucaagaaccugcgcgaguucguguucaagaacaucgacggcuacuucaaaaucuacagcaagcacaccccuaucaaccucgugcgggaucugccucagggcuucucugcucuggaaccccugguggaucugcccaucggcaucaacaucacccgguuucagacacugcuggcccugcacagaagcuaccugacaccuggcgauagcagcagcggauggacagcuggugccgccgcuuacuaugugggcuaccugcagccuagaaccuuccugcugaaguacaacgagaacggcaccaucaccgacgccguggauugugcucuggauccucugagcgagacaaagugcacccugaaguccuucaccguggaaaagggcaucuaccagaccagcaacuuccgggugcagcccaccgaauccaucgugcgguuccccaauaucaccaaucugugccccuucggcgagguguucaaugccaccagauucgccucuguguacgccuggaaccggaagcggaucagcaauugcguggccgacuacuccgugcuguacaacuccgccagcuucagcaccuucaagugcuacggcguguccccuaccaagcugaacgaccugugcuucacaaacguguacgccgacagcuucgugauccggggagaugaagugcggcagauugccccuggacagacaggcaagaucgccgacuacaacuacaagcugcccgacgacuucaccggcugugugauugccuggaacagcaacaaccuggacuccaaagucggcggcaacuacaauuaccuguuccggcuguuccggaaguccaaucugaagcccuucgagcgggacaucagcaccgaaaucuaucaggccggcagcaccccuugcaacggcguggaaggcuucaacugcuacuucccacugcaguccuacggcuuucagcccacaaauggcgugggcuaucagcccuacagagugguggugcugagcuucgaacugcugcaugcuccugccacagugugcggcccuaagaaaagcaccaaucucgugaagaacaaaugcgugaacuucaacuucaacggccugaccggcaccggcgugcugacagagagcaacaagaaguuccugccauuccagcaguuuggccgggauaucgccgauaccacagacgccguuagagauccccagacacuggaaauccuggacaucaccccaugcagcuucggcggagugucugugaucaccccuggcaccaacaccagcaaucagguggcagugcuguaccagggcgugaacuguaccgaagugcccguggccauucacgccgaucagcugacaccuacauggcggguguacuccaccggcagcaauguguuucagaccagagccggcugucugaucggagccgagcacgugaacaauagcuacgagugcgacauccccaucggcgcuggcaucugugccagcuaccagacacagacaaacagccccagacgggcuagaagcguggccagccagagcaucauugccuacacaaugucucugggcgccgagaacagcguggccuacuccaacaacucuaucgcuauccccaccaacuucaccaucagcgugaccaccgagauccugccuguguccaugaccaagaccagcguggacugcaccauguacaucugcggcgauuccaccgagugcuccaaccugcugcugcaguacggcagcuucugcacccagcugaauagagcccugacagggaucgccguggaacaggacaagaacacccaagagguguucgcccaagugaagcaaaucuacaagaccccuccuaucaaggacuucggcggcuucaauuucagccagauucugcccgauccuagcaagcccagcaagcggagcuucaucgaggaccugcuguucaacaaagugacacuggccgacgccggcuucaucaagcaguauggcgauugucugggcgacauugccgccagggaucugauuugcgcccagaaguuuaacggacugacagugcugccuccucugcugaccgaugagaugaucgcccaguacacaucugcccugcuggccggcacaaucacaagcggcuggacauuuggagcuggcgccgcucugcagauccccuuugcuaugcagauggccuaccgguucaacggcaucggagugacccagaaugugcuguacgagaaccagaagcugaucgccaaccaguucaacagcgccaucggcaagauccaggacagccugagcagcacagcaagcgcccugggaaagcugcaggacguggucaaccagaaugcccaggcacugaacacccuggucaagcagcuguccuccaacuucggcgccaucagcucugugcugaacgauauccugagcagacuggacaaggucgaggccgaggugcagaucgacagacugaucacaggcagacugcagagccuccagacauacgugacccagcagcugaucagagccgccgagauuagagccucugccaaucuggccgccaccaagaugucugagugugugcugggccagagcaagagaguggacuuuugcggcaagggcuaccaccugaugagcuucccucagucugccccucacggcgugguguuucugcacgugacauaugugcccgcucaagagaagaauuucaccaccgcuccagccaucugccacgacggcaaagcccacuuuccuagagaaggcguguucguguccaacggcacccauugguucgugacacagcggaacuucuacgagccccagaucaucaccaccgacaacaccuucgugucuggcaacugcgacguugugaucggcauugugaacaauaccguguacgacccucugcagcccgagcuggacagcuucaaagaggaacuggacaaguacuuuaagaaccacacaagccccgacguggaccugggcgauaucagcggaaucaaugccagcgucgugaacauccagaaagagaucgaccggcugaacgagguggccaagaaucugaacgagagccugaucgaccugcaagaacuggggaaguacgagcaguacaucaaguggcccugguacaucuggcugggcuuuaucgccggacugauugccaucgugauggucacaaucaugcuguguugcaugaccagcugcuguagcugccugaagggcuguuguagcuguggcagcugcugcaaguucgacgaggacgauucugagcccgugcugaagggcgugaaacugcacuacaccugaggacuaguuauaagacugacuagcccgaugggccucccaacgggcccuccuccccuccuugcaccgagauuaauagaucucaaaggcucuuuucagagccaccaaaaaaaaaaaaaaaaaaaaaaaaaaaaaaaaaaaaaaaaaaaaaaaaaaaaaaaaaaaaaaaaaaaaaaaaaaaaaaaaaaaaaaaaaaaaaaaaaaaaa

SEQ ID NO: 24369 - RNA, 4041 nt, Artificial Sequence
  SARS-CoV-2/Wuhan/WIV05/2019__EPI_ISL_402128 spike protein mRNA gc mod (1-1273)(D614G_I692V)
aggagaaagcuuaccauguucguguuucuggugcugcugccccugguguccagccagugugugaaccugaccaccagaacacagcugccuccagccuacaccaacagcuucaccagaggcguguacuaccccgacaagguguucagauccagcgugcugcacucuacccaggaccuguuccugccuuucuucagcaacgugaccugguuccacgccauccacguguccggcaccaauggcaccaagagauucgacaaccccgugcugcccuucaacgacgggguguacuuugccagcaccgagaaguccaacaucaucagaggcuggaucuucggcaccacacuggacagcaagacccagagccugcugaucgugaacaacgccaccaacguggucaucaaagugugcgaguuccaguucugcaacgaccccuuccugggcgucuacuaccacaagaacaacaagagcuggauggaaagcgaguuccggguguacagcagcgccaacaacugcaccuucgaguacgugucccagccuuuccugauggaccuggaaggcaagcagggcaacuucaagaaccugcgcgaguucguguucaagaacaucgacggcuacuucaaaaucuacagcaagcacaccccuaucaaccucgugcgggaucugccucagggcuucucugcucuggaaccccugguggaucugcccaucggcaucaacaucacccgguuucagacacugcuggcccugcacagaagcuaccugacaccuggcgauagcagcagcggauggacagcuggugccgccgcuuacuaugugggcuaccugcagccuagaaccuuccugcugaaguacaacgagaacggcaccaucaccgacgccguggauugugcucuggauccucugagcgagacaaagugcacccugaaguccuucaccguggaaaagggcaucuaccagaccagcaacuuccgggugcagcccaccgaauccaucgugcgguuccccaauaucaccaaucugugccccuucggcgagguguucaaugccaccagauucgccucuguguacgccuggaaccggaagcggaucagcaauugcguggccgacuacuccgugcuguacaacuccgccagcuucagcaccuucaagugcuacggcguguccccuaccaagcugaacgaccugugcuucacaaacguguacgccgacagcuucgugauccggggagaugaagugcggcagauugccccuggacagacaggcaagaucgccgacuacaacuacaagcugcccgacgacuucaccggcugugugauugccuggaacagcaacaaccuggacuccaaagucggcggcaacuacaauuaccuguaccggcuguuccggaaguccaaucugaagcccuucgagcgggacaucagcaccgaaaucuaucaggccggcagcaccccuugcaacggcguggaaggcuucaacugcuacuucccacugcaguccuacggcuuucagcccacaaauggcgugggcuaucagcccuacagagugguggugcugagcuucgaacugcugcaugcuccugccacagugugcggcccuaagaaaagcaccaaucucgugaagaacaaaugcgugaacuucaacuucaacggccugaccggcaccggcgugcugacagagagcaacaagaaguuccugccauuccagcaguuuggccgggauaucgccgauaccacagacgccguuagagauccccagacacuggaaauccuggacaucaccccaugcagcuucggcggagugucugugaucaccccuggcaccaacaccagcaaucagguggcagugcuguaccagggcgugaacuguaccgaagugcccguggccauucacgccgaucagcugacaccuacauggcggguguacuccaccggcagcaauguguuucagaccagagccggcugucugaucggagccgagcacgugaacaauagcuacgagugcgacauccccaucggcgcuggcaucugugccagcuaccagacacagacaaacagccccagacgggcuagaagcguggccagccagagcgugauugccuacacaaugucucugggcgccgagaacagcguggccuacuccaacaacucuaucgcuauccccaccaacuucaccaucagcgugaccaccgagauccugccuguguccaugaccaagaccagcguggacugcaccauguacaucugcggcgauuccaccgagugcuccaaccugcugcugcaguacggcagcuucugcacccagcugaauagagcccugacagggaucgccguggaacaggacaagaacacccaagagguguucgcccaagugaagcaaaucuacaagaccccuccuaucaaggacuucggcggcuucaauuucagccagauucugcccgauccuagcaagcccagcaagcggagcuucaucgaggaccugcuguucaacaaagugacacuggccgacgccggcuucaucaagcaguauggcgauugucugggcgacauugccgccagggaucugauuugcgcccagaaguuuaacggacugacagugcugccuccucugcugaccgaugagaugaucgcccaguacacaucugcccugcuggccggcacaaucacaagcggcuggacauuuggagcuggcgccgcucugcagauccccuuugcuaugcagauggccuaccgguucaacggcaucggagugacccagaaugugcuguacgagaaccagaagcugaucgccaaccaguucaacagcgccaucggcaagauccaggacagccugagcagcacagcaagcgcccugggaaagcugcaggacguggucaaccagaaugcccaggcacugaacacccuggucaagcagcuguccuccaacuucggcgccaucagcucugugcugaacgauauccugagcagacuggacaaggucgaggccgaggugcagaucgacagacugaucacaggcagacugcagagccuccagacauacgugacccagcagcugaucagagccgccgagauuagagccucugccaaucuggccgccaccaagaugucugagugugugcugggccagagcaagagaguggacuuuugcggcaagggcuaccaccugaugagcuucccucagucugccccucacggcgugguguuucugcacgugacauaugugcccgcucaagagaagaauuucaccaccgcuccagccaucugccacgacggcaaagcccacuuuccuagagaaggcguguucguguccaacggcacccauugguucgugacacagcggaacuucuacgagccccagaucaucaccaccgacaacaccuucgugucuggcaacugcgacguugugaucggcauugugaacaauaccguguacgacccucugcagcccgagcuggacagcuucaaagaggaacuggacaaguacuuuaagaaccacacaagccccgacguggaccugggcgauaucagcggaaucaaugccagcgucgugaacauccagaaagagaucgaccggcugaacgagguggccaagaaucugaacgagagccugaucgaccugcaagaacuggggaaguacgagcaguacaucaaguggcccugguacaucuggcugggcuuuaucgccggacugauugccaucgugauggucacaaucaugcuguguugcaugaccagcugcuguagcugccugaagggcuguuguagcuguggcagcugcugcaaguucgacgaggacgauucugagcccgugcugaagggcgugaaacugcacuacaccugaggacuaguuauaagacugacuagcccgaugggccucccaacgggcccuccuccccuccuugcaccgagauuaauagaucucaaaggcucuuuucagagccaccaaaaaaaaaaaaaaaaaaaaaaaaaaaaaaaaaaaaaaaaaaaaaaaaaaaaaaaaaaaaaaaaaaaaaaaaaaaaaaaaaaaaaaaaaaaaaaaaaaaaa

SEQ ID NO: 24370 - RNA, 4041 nt, Artificial Sequence
  SARS-CoV-2/Wuhan/WIV05/2019__EPI_ISL_402128 spike protein mRNA gc mod (1-1273)(D614G_M1229I)
aggagaaagcuuaccauguucguguuucuggugcugcugccccugguguccagccagugugugaaccugaccaccagaacacagcugccuccagccuacaccaacagcuucaccagaggcguguacuaccccgacaagguguucagauccagcgugcugcacucuacccaggaccuguuccugccuuucuucagcaacgugaccugguuccacgccauccacguguccggcaccaauggcaccaagagauucgacaaccccgugcugcccuucaacgacgggguguacuuugccagcaccgagaaguccaacaucaucagaggcuggaucuucggcaccacacuggacagcaagacccagagccugcugaucgugaacaacgccaccaacguggucaucaaagugugcgaguuccaguucugcaacgaccccuuccugggcgucuacuaccacaagaacaacaagagcuggauggaaagcgaguuccggguguacagcagcgccaacaacugcaccuucgaguacgugucccagccuuuccugauggaccuggaaggcaagcagggcaacuucaagaaccugcgcgaguucguguucaagaacaucgacggcuacuucaaaaucuacagcaagcacaccccuaucaaccucgugcgggaucugccucagggcuucucugcucuggaaccccugguggaucugcccaucggcaucaacaucacccgguuucagacacugcuggcccugcacagaagcuaccugacaccuggcgauagcagcagcggauggacagcuggugccgccgcuuacuaugugggcuaccugcagccuagaaccuuccugcugaaguacaacgagaacggcaccaucaccgacgccguggauugugcucuggauccucugagcgagacaaagugcacccugaaguccuucaccguggaaaagggcaucuaccagaccagcaacuuccgggugcagcccaccgaauccaucgugcgguuccccaauaucaccaaucugugccccuucggcgagguguucaaugccaccagauucgccucuguguacgccuggaaccggaagcggaucagcaauugcguggccgacuacuccgugcuguacaacuccgccagcuucagcaccuucaagugcuacggcguguccccuaccaagcugaacgaccugugcuucacaaacguguacgccgacagcuucgugauccggggagaugaagugcggcagauugccccuggacagacaggcaagaucgccgacuacaacuacaagcugcccgacgacuucaccggcugugugauugccuggaacagcaacaaccuggacuccaaagucggcggcaacuacaauuaccuguaccggcuguuccggaaguccaaucugaagcccuucgagcgggacaucagcaccgaaaucuaucaggccggcagcaccccuugcaacggcguggaaggcuucaacugcuacuucccacugcaguccuacggcuuucagcccacaaauggcgugggcuaucagcccuacagagugguggugcugagcuucgaacugcugcaugcuccugccacagugugcggcccuaagaaaagcaccaaucucgugaagaacaaaugcgugaacuucaacuucaacggccugaccggcaccggcgugcugacagagagcaacaagaaguuccugccauuccagcaguuuggccgggauaucgccgauaccacagacgccguuagagauccccagacacuggaaauccuggacaucaccccaugcagcuucggcggagugucugugaucaccccuggcaccaacaccagcaaucagguggcagugcuguaccagggcgugaacuguaccgaagugcccguggccauucacgccgaucagcugacaccuacauggcggguguacuccaccggcagcaauguguuucagaccagagccggcugucugaucggagccgagcacgugaacaauagcuacgagugcgacauccccaucggcgcuggcaucugugccagcuaccagacacagacaaacagccccagacgggcuagaagcguggccagccagagcaucauugccuacacaaugucucugggcgccgagaacagcguggccuacuccaacaacucuaucgcuauccccaccaacuucaccaucagcgugaccaccgagauccugccuguguccaugaccaagaccagcguggacugcaccauguacaucugcggcgauuccaccgagugcuccaaccugcugcugcaguacggcagcuucugcacccagcugaauagagcccugacagggaucgccguggaacaggacaagaacacccaagagguguucgcccaagugaagcaaaucuacaagaccccuccuaucaaggacuucggcggcuucaauuucagccagauucugcccgauccuagcaagcccagcaagcggagcuucaucgaggaccugcuguucaacaaagugacacuggccgacgccggcuucaucaagcaguauggcgauugucugggcgacauugccgccagggaucugauuugcgcccagaaguuuaacggacugacagugcugccuccucugcugaccgaugagaugaucgcccaguacacaucugcccugcuggccggcacaaucacaagcggcuggacauuuggagcuggcgccgcucugcagauccccuuugcuaugcagauggccuaccgguucaacggcaucggagugacccagaaugugcuguacgagaaccagaagcugaucgccaaccaguucaacagcgccaucggcaagauccaggacagccugagcagcacagcaagcgcccugggaaagcugcaggacguggucaaccagaaugcccaggcacugaacacccuggucaagcagcuguccuccaacuucggcgccaucagcucugugcugaacgauauccugagcagacuggacaaggucgaggccgaggugcagaucgacagacugaucacaggcagacugcagagccuccagacauacgugacccagcagcugaucagagccgccgagauuagagccucugccaaucuggccgccaccaagaugucugagugugugcugggccagagcaagagaguggacuuuugcggcaagggcuaccaccugaugagcuucccucagucugccccucacggcgugguguuucugcacgugacauaugugcccgcucaagagaagaauuucaccaccgcuccagccaucugccacgacggcaaagcccacuuuccuagagaaggcguguucguguccaacggcacccauugguucgugacacagcggaacuucuacgagccccagaucaucaccaccgacaacaccuucgugucuggcaacugcgacguugugaucggcauugugaacaauaccguguacgacccucugcagcccgagcuggacagcuucaaagaggaacuggacaaguacuuuaagaaccacacaagccccgacguggaccugggcgauaucagcggaaucaaugccagcgucgugaacauccagaaagagaucgaccggcugaacgagguggccaagaaucugaacgagagccugaucgaccugcaagaacuggggaaguacgagcaguacaucaaguggcccugguacaucuggcugggcuuuaucgccggacugauugccaucgugaucgucacaaucaugcuguguugcaugaccagcugcuguagcugccugaagggcuguuguagcuguggcagcugcugcaaguucgacgaggacgauucugagcccgugcugaagggcgugaaacugcacuacaccugaggacuaguuauaagacugacuagcccgaugggccucccaacgggcccuccuccccuccuugcaccgagauuaauagaucucaaaggcucuuuucagagccaccaaaaaaaaaaaaaaaaaaaaaaaaaaaaaaaaaaaaaaaaaaaaaaaaaaaaaaaaaaaaaaaaaaaaaaaaaaaaaaaaaaaaaaaaaaaaaaaaaaaaa

SEQ ID NO: 24371 - RNA, 4035 nt, Artificial Sequence
  SARS-CoV-2/Wuhan/WIV05/2019__EPI_ISL_402128 spike protein mRNA gc mod (1-1273)(H69del_V70del_A222V_Y453F_S477N_D614G_I692V)
aggagaaagcuuaccauguucguguuucuggugcugcugccccugguguccagccagugugugaaccugaccaccagaacacagcugccuccagccuacaccaacagcuucaccagaggcguguacuaccccgacaagguguucagauccagcgugcugcacucuacccaggaccuguuccugccuuucuucagcaacgugaccugguuccacgccaucuccggcaccaauggcaccaagagauucgacaaccccgugcugcccuucaacgacgggguguacuuugccagcaccgagaaguccaacaucaucagaggcuggaucuucggcaccacacuggacagcaagacccagagccugcugaucgugaacaacgccaccaacguggucaucaaagugugcgaguuccaguucugcaacgaccccuuccugggcgucuacuaccacaagaacaacaagagcuggauggaaagcgaguuccggguguacagcagcgccaacaacugcaccuucgaguacgugucccagccuuuccugauggaccuggaaggcaagcagggcaacuucaagaaccugcgcgaguucguguucaagaacaucgacggcuacuucaaaaucuacagcaagcacaccccuaucaaccucgugcgggaucugccucagggcuucucugugcuggaaccccugguggaucugcccaucggcaucaacaucacccgguuucagacacugcuggcccugcacagaagcuaccugacaccuggcgauagcagcagcggauggacagcuggugccgccgcuuacuaugugggcuaccugcagccuagaaccuuccugcugaaguacaacgagaacggcaccaucaccgacgccguggauugugcucuggauccucugagcgagacaaagugcacccugaaguccuucaccguggaaaagggcaucuaccagaccagcaacuuccgggugcagcccaccgaauccaucgugcgguuccccaauaucaccaaucugugccccuucggcgagguguucaaugccaccagauucgccucuguguacgccuggaaccggaagcggaucagcaauugcguggccgacuacuccgugcuguacaacuccgccagcuucagcaccuucaagugcuacggcguguccccuaccaagcugaacgaccugugcuucacaaacguguacgccgacagcuucgugauccggggagaugaagugcggcagauugccccuggacagacaggcaagaucgccgacuacaacuacaagcugcccgacgacuucaccggcugugugauugccuggaacagcaacaaccuggacuccaaagucggcggcaacuacaauuaccuguuccggcuguuccggaaguccaaucugaagcccuucgagcgggacaucagcaccgaaaucuaucaggccggcaacaccccuugcaacggcguggaaggcuucaacugcuacuucccacugcaguccuacggcuuucagcccacaaauggcgugggcuaucagcccuacagagugguggugcugagcuucgaacugcugcaugcuccugccacagugugcggcccuaagaaaagcaccaaucucgugaagaacaaaugcgugaacuucaacuucaacggccugaccggcaccggcgugcugacagagagcaacaagaaguuccugccauuccagcaguuuggccgggauaucgccgauaccacagacgccguuagagauccccagacacuggaaauccuggacaucaccccaugcagcuucggcggagugucugugaucaccccuggcaccaacaccagcaaucagguggcagugcuguaccagggcgugaacuguaccgaagugcccguggccauucacgccgaucagcugacaccuacauggcggguguacuccaccggcagcaauguguuucagaccagagccggcugucugaucggagccgagcacgugaacaauagcuacgagugcgacauccccaucggcgcuggcaucugugccagcuaccagacacagacaaacagccccagacgggcuagaagcguggccagccagagcgugauugccuacacaaugucucugggcgccgagaacagcguggccuacuccaacaacucuaucgcuauccccaccaacuucaccaucagcgugaccaccgagauccugccuguguccaugaccaagaccagcguggacugcaccauguacaucugcggcgauuccaccgagugcuccaaccugcugcugcaguacggcagcuucugcacccagcugaauagagcccugacagggaucgccguggaacaggacaagaacacccaagagguguucgcccaagugaagcaaaucuacaagaccccuccuaucaaggacuucggcggcuucaauuucagccagauucugcccgauccuagcaagcccagcaagcggagcuucaucgaggaccugcuguucaacaaagugacacuggccgacgccggcuucaucaagcaguauggcgauugucugggcgacauugccgccagggaucugauuugcgcccagaaguuuaacggacugacagugcugccuccucugcugaccgaugagaugaucgcccaguacacaucugcccugcuggccggcacaaucacaagcggcuggacauuuggagcuggcgccgcucugcagauccccuuugcuaugcagauggccuaccgguucaacggcaucggagugacccagaaugugcuguacgagaaccagaagcugaucgccaaccaguucaacagcgccaucggcaagauccaggacagccugagcagcacagcaagcgcccugggaaagcugcaggacguggucaaccagaaugcccaggcacugaacacccuggucaagcagcuguccuccaacuucggcgccaucagcucugugcugaacgauauccugagcagacuggacaaggucgaggccgaggugcagaucgacagacugaucacaggcagacugcagagccuccagacauacgugacccagcagcugaucagagccgccgagauuagagccucugccaaucuggccgccaccaagaugucugagugugugcugggccagagcaagagaguggacuuuugcggcaagggcuaccaccugaugagcuucccucagucugccccucacggcgugguguuucugcacgugacauaugugcccgcucaagagaagaauuucaccaccgcuccagccaucugccacgacggcaaagcccacuuuccuagagaaggcguguucguguccaacggcacccauugguucgugacacagcggaacuucuacgagccccagaucaucaccaccgacaacaccuucgugucuggcaacugcgacguugugaucggcauugugaacaauaccguguacgacccucugcagcccgagcuggacagcuucaaagaggaacuggacaaguacuuuaagaaccacacaagccccgacguggaccugggcgauaucagcggaaucaaugccagcgucgugaacauccagaaagagaucgaccggcugaacgagguggccaagaaucugaacgagagccugaucgaccugcaagaacuggggaaguacgagcaguacaucaaguggcccugguacaucuggcugggcuuuaucgccggacugauugccaucgugauggucacaaucaugcuguguugcaugaccagcugcuguagcugccugaagggcuguuguagcuguggcagcugcugcaaguucgacgaggacgauucugagcccgugcugaagggcgugaaacugcacuacaccugaggacuaguuauaagacugacuagcccgaugggccucccaacgggcccuccuccccuccuugcaccgagauuaauagaucucaaaggcucuuuucagagccaccaaaaaaaaaaaaaaaaaaaaaaaaaaaaaaaaaaaaaaaaaaaaaaaaaaaaaaaaaaaaaaaaaaaaaaaaaaaaaaaaaaaaaaaaaaaaaaaaaaaaa

SEQ ID NO: 24372 - RNA, 4035 nt, Artificial Sequence
  SARS-CoV-2/Wuhan/WIV05/2019__EPI_ISL_402128 spike protein mRNA gc mod (1-1273)(H69del_V70del_Y453F_D614G_I692V_M1229I)
aggagaaagcuuaccauguucguguuucuggugcugcugccccugguguccagccagugugugaaccugaccaccagaacacagcugccuccagccuacaccaacagcuucaccagaggcguguacuaccccgacaagguguucagauccagcgugcugcacucuacccaggaccuguuccugccuuucuucagcaacgugaccugguuccacgccaucuccggcaccaauggcaccaagagauucgacaaccccgugcugcccuucaacgacgggguguacuuugccagcaccgagaaguccaacaucaucagaggcuggaucuucggcaccacacuggacagcaagacccagagccugcugaucgugaacaacgccaccaacguggucaucaaagugugcgaguuccaguucugcaacgaccccuuccugggcgucuacuaccacaagaacaacaagagcuggauggaaagcgaguuccggguguacagcagcgccaacaacugcaccuucgaguacgugucccagccuuuccugauggaccuggaaggcaagcagggcaacuucaagaaccugcgcgaguucguguucaagaacaucgacggcuacuucaaaaucuacagcaagcacaccccuaucaaccucgugcgggaucugccucagggcuucucugcucuggaaccccugguggaucugcccaucggcaucaacaucacccgguuucagacacugcuggcccugcacagaagcuaccugacaccuggcgauagcagcagcggauggacagcuggugccgccgcuuacuaugugggcuaccugcagccuagaaccuuccugcugaaguacaacgagaacggcaccaucaccgacgccguggauugugcucuggauccucugagcgagacaaagugcacccugaaguccuucaccguggaaaagggcaucuaccagaccagcaacuuccgggugcagcccaccgaauccaucgugcgguuccccaauaucaccaaucugugccccuucggcgagguguucaaugccaccagauucgccucuguguacgccuggaaccggaagcggaucagcaauugcguggccgacuacuccgugcuguacaacuccgccagcuucagcaccuucaagugcuacggcguguccccuaccaagcugaacgaccugugcuucacaaacguguacgccgacagcuucgugauccggggagaugaagugcggcagauugccccuggacagacaggcaagaucgccgacuacaacuacaagcugcccgacgacuucaccggcugugugauugccuggaacagcaacaaccuggacuccaaagucggcggcaacuacaauuaccuguuccggcuguuccggaaguccaaucugaagcccuucgagcgggacaucagcaccgaaaucuaucaggccggcagcaccccuugcaacggcguggaaggcuucaacugcuacuucccacugcaguccuacggcuuucagcccacaaauggcgugggcuaucagcccuacagagugguggugcugagcuucgaacugcugcaugcuccugccacagugugcggcccuaagaaaagcaccaaucucgugaagaacaaaugcgugaacuucaacuucaacggccugaccggcaccggcgugcugacagagagcaacaagaaguuccugccauuccagcaguuuggccgggauaucgccgauaccacagacgccguuagagauccccagacacuggaaauccuggacaucaccccaugcagcuucggcggagugucugugaucaccccuggcaccaacaccagcaaucagguggcagugcuguaccagggcgugaacuguaccgaagugcccguggccauucacgccgaucagcugacaccuacauggcggguguacuccaccggcagcaauguguuucagaccagagccggcugucugaucggagccgagcacgugaacaauagcuacgagugcgacauccccaucggcgcuggcaucugugccagcuaccagacacagacaaacagccccagacgggcuagaagcguggccagccagagcgugauugccuacacaaugucucugggcgccgagaacagcguggccuacuccaacaacucuaucgcuauccccaccaacuucaccaucagcgugaccaccgagauccugccuguguccaugaccaagaccagcguggacugcaccauguacaucugcggcgauuccaccgagugcuccaaccugcugcugcaguacggcagcuucugcacccagcugaauagagcccugacagggaucgccguggaacaggacaagaacacccaagagguguucgcccaagugaagcaaaucuacaagaccccuccuaucaaggacuucggcggcuucaauuucagccagauucugcccgauccuagcaagcccagcaagcggagcuucaucgaggaccugcuguucaacaaagugacacuggccgacgccggcuucaucaagcaguauggcgauugucugggcgacauugccgccagggaucugauuugcgcccagaaguuuaacggacugacagugcugccuccucugcugaccgaugagaugaucgcccaguacacaucugcccugcuggccggcacaaucacaagcggcuggacauuuggagcuggcgccgcucugcagauccccuuugcuaugcagauggccuaccgguucaacggcaucggagugacccagaaugugcuguacgagaaccagaagcugaucgccaaccaguucaacagcgccaucggcaagauccaggacagccugagcagcacagcaagcgcccugggaaagcugcaggacguggucaaccagaaugcccaggcacugaacacccuggucaagcagcuguccuccaacuucggcgccaucagcucugugcugaacgauauccugagcagacuggacaaggucgaggccgaggugcagaucgacagacugaucacaggcagacugcagagccuccagacauacgugacccagcagcugaucagagccgccgagauuagagccucugccaaucuggccgccaccaagaugucugagugugugcugggccagagcaagagaguggacuuuugcggcaagggcuaccaccugaugagcuucccucagucugccccucacggcgugguguuucugcacgugacauaugugcccgcucaagagaagaauuucaccaccgcuccagccaucugccacgacggcaaagcccacuuuccuagagaaggcguguucguguccaacggcacccauugguucgugacacagcggaacuucuacgagccccagaucaucaccaccgacaacaccuucgugucuggcaacugcgacguugugaucggcauugugaacaauaccguguacgacccucugcagcccgagcuggacagcuucaaagaggaacuggacaaguacuuuaagaaccacacaagccccgacguggaccugggcgauaucagcggaaucaaugccagcgucgugaacauccagaaagagaucgaccggcugaacgagguggccaagaaucugaacgagagccugaucgaccugcaagaacuggggaaguacgagcaguacaucaaguggcccugguacaucuggcugggcuuuaucgccggacugauugccaucgugaucgucacaaucaugcuguguugcaugaccagcugcuguagcugccugaagggcuguuguagcuguggcagcugcugcaaguucgacgaggacgauucugagcccgugcugaagggcgugaaacugcacuacaccugaggacuaguuauaagacugacuagcccgaugggccucccaacgggcccuccuccccuccuugcaccgagauuaauagaucucaaaggcucuuuucagagccaccaaaaaaaaaaaaaaaaaaaaaaaaaaaaaaaaaaaaaaaaaaaaaaaaaaaaaaaaaaaaaaaaaaaaaaaaaaaaaaaaaaaaaaaaaaaaaaaaaaaaa

SEQ ID NO: 24373 - RNA, 4032 nt, Artificial Sequence
  SARS-CoV-2/Wuhan/WIV05/2019__EPI_ISL_402128 spike protein mRNA gc mod (1-1273)(H69del_V70del_Y144del_N501Y_A570D_D614G_P681H_T716I_S982 A_D1118H)
aggagaaagcuuaccauguucguguuucuggugcugcugccccugguguccagccagugugugaaccugaccaccagaacacagcugccuccagccuacaccaacagcuucaccagaggcguguacuaccccgacaagguguucagauccagcgugcugcacucuacccaggaccuguuccugccuuucuucagcaacgugaccugguuccacgccaucuccggcaccaauggcaccaagagauucgacaaccccgugcugcccuucaacgacgggguguacuuugccagcaccgagaaguccaacaucaucagaggcuggaucuucggcaccacacuggacagcaagacccagagccugcugaucgugaacaacgccaccaacguggucaucaaagugugcgaguuccaguucugcaacgaccccuuccugggcgucuaccacaagaacaacaagagcuggauggaaagcgaguuccggguguacagcagcgccaacaacugcaccuucgaguacgugucccagccuuuccugauggaccuggaaggcaagcagggcaacuucaagaaccugcgcgaguucguguucaagaacaucgacggcuacuucaaaaucuacagcaagcacaccccuaucaaccucgugcgggaucugccucagggcuucucugcucuggaaccccugguggaucugcccaucggcaucaacaucacccgguuucagacacugcuggcccugcacagaagcuaccugacaccuggcgauagcagcagcggauggacagcuggugccgccgcuuacuaugugggcuaccugcagccuagaaccuuccugcugaaguacaacgagaacggcaccaucaccgacgccguggauugugcucuggauccucugagcgagacaaagugcacccugaaguccuucaccguggaaaagggcaucuaccagaccagcaacuuccgggugcagcccaccgaauccaucgugcgguuccccaauaucaccaaucugugccccuucggcgagguguucaaugccaccagauucgccucuguguacgccuggaaccggaagcggaucagcaauugcguggccgacuacuccgugcuguacaacuccgccagcuucagcaccuucaagugcuacggcguguccccuaccaagcugaacgaccugugcuucacaaacguguacgccgacagcuucgugauccggggagaugaagugcggcagauugccccuggacagacaggcaagaucgccgacuacaacuacaagcugcccgacgacuucaccggcugugugauugccuggaacagcaacaaccuggacuccaaagucggcggcaacuacaauuaccuguaccggcuguuccggaaguccaaucugaagcccuucgagcgggacaucagcaccgaaaucuaucaggccggcagcaccccuugcaacggcguggaaggcuucaacugcuacuucccacugcaguccuacggcuuucagcccacauacggcgugggcuaucagcccuacagagugguggugcugagcuucgaacugcugcaugcuccugccacagugugcggcccuaagaaaagcaccaaucucgugaagaacaaaugcgugaacuucaacuucaacggccugaccggcaccggcgugcugacagagagcaacaagaaguuccugccauuccagcaguuuggccgggauaucgacgauaccacagacgccguuagagauccccagacacuggaaauccuggacaucaccccaugcagcuucggcggagugucugugaucaccccuggcaccaacaccagcaaucagguggcagugcuguaccagggcgugaacuguaccgaagugcccguggccauucacgccgaucagcugacaccuacauggcggguguacuccaccggcagcaauguguuucagaccagagccggcugucugaucggagccgagcacgugaacaauagcuacgagugcgacauccccaucggcgcuggcaucugugccagcuaccagacacagacaaacagccacagacgggcuagaagcguggccagccagagcaucauugccuacacaaugucucugggcgccgagaacagcguggccuacuccaacaacucuaucgcuauccccaucaacuucaccaucagcgugaccaccgagauccugccuguguccaugaccaagaccagcguggacugcaccauguacaucugcggcgauuccaccgagugcuccaaccugcugcugcaguacggcagcuucugcacccagcugaauagagcccugacagggaucgccguggaacaggacaagaacacccaagagguguucgcccaagugaagcaaaucuacaagaccccuccuaucaaggacuucggcggcuucaauuucagccagauucugcccgauccuagcaagcccagcaagcggagcuucaucgaggaccugcuguucaacaaagugacacuggccgacgccggcuucaucaagcaguauggcgauugucugggcgacauugccgccagggaucugauuugcgcccagaaguuuaacggacugacagugcugccuccucugcugaccgaugagaugaucgcccaguacacaucugcccugcuggccggcacaaucacaagcggcuggacauuuggagcuggcgccgcucugcagauccccuuugcuaugcagauggccuaccgguucaacggcaucggagugacccagaaugugcuguacgagaaccagaagcugaucgccaaccaguucaacagcgccaucggcaagauccaggacagccugagcagcacagcaagcgcccugggaaagcugcaggacguggucaaccagaaugcccaggcacugaacacccuggucaagcagcuguccuccaacuucggcgccaucagcucugugcugaacgauauccuggccagacuggacaaggucgaggccgaggugcagaucgacagacugaucacaggcagacugcagagccuccagacauacgugacccagcagcugaucagagccgccgagauuagagccucugccaaucuggccgccaccaagaugucugagugugugcugggccagagcaagagaguggacuuuugcggcaagggcuaccaccugaugagcuucccucagucugccccucacggcgugguguuucugcacgugacauaugugcccgcucaagagaagaauuucaccaccgcuccagccaucugccacgacggcaaagcccacuuuccuagagaaggcguguucguguccaacggcacccauugguucgugacacagcggaacuucuacgagccccagaucaucaccacccacaacaccuucgugucuggcaacugcgacguugugaucggcauugugaacaauaccguguacgacccucugcagcccgagcuggacagcuucaaagaggaacuggacaaguacuuuaagaaccacacaagccccgacguggaccugggcgauaucagcggaaucaaugccagcgucgugaacauccagaaagagaucgaccggcugaacgagguggccaagaaucugaacgagagccugaucgaccugcaagaacuggggaaguacgagcaguacaucaaguggcccugguacaucuggcugggcuuuaucgccggacugauugccaucgugauggucacaaucaugcuguguugcaugaccagcugcuguagcugccugaagggcuguuguagcuguggcagcugcugcaaguucgacgaggacgauucugagcccgugcugaagggcgugaaacugcacuacaccugaggacuaguuauaagacugacuagcccgaugggccucccaacgggcccuccuccccuccuugcaccgagauuaauagaucucaaaggcucuuuucagagccaccaaaaaaaaaaaaaaaaaaaaaaaaaaaaaaaaaaaaaaaaaaaaaaaaaaaaaaaaaaaaaaaaaaaaaaaaaaaaaaaaaaaaaaaaaaaaaaaaaaaaa

SEQ ID NO: 24374 - RNA, 4041 nt, Artificial Sequence
  SARS-CoV-2/Wuhan/WIV05/2019__EPI_ISL_402128 spike protein mRNA gc mod (1-1273)(K417N_E484K_N501Y_D614G)
aggagaaagcuuaccauguucguguuucuggugcugcugccccugguguccagccagugugugaaccugaccaccagaacacagcugccuccagccuacaccaacagcuucaccagaggcguguacuaccccgacaagguguucagauccagcgugcugcacucuacccaggaccuguuccugccuuucuucagcaacgugaccugguuccacgccauccacguguccggcaccaauggcaccaagagauucgacaaccccgugcugcccuucaacgacgggguguacuuugccagcaccgagaaguccaacaucaucagaggcuggaucuucggcaccacacuggacagcaagacccagagccugcugaucgugaacaacgccaccaacguggucaucaaagugugcgaguuccaguucugcaacgaccccuuccugggcgucuacuaccacaagaacaacaagagcuggauggaaagcgaguuccggguguacagcagcgccaacaacugcaccuucgaguacgugucccagccuuuccugauggaccuggaaggcaagcagggcaacuucaagaaccugcgcgaguucguguucaagaacaucgacggcuacuucaaaaucuacagcaagcacaccccuaucaaccucgugcgggaucugccucagggcuucucugcucuggaaccccugguggaucugcccaucggcaucaacaucacccgguuucagacacugcuggcccugcacagaagcuaccugacaccuggcgauagcagcagcggauggacagcuggugccgccgcuuacuaugugggcuaccugcagccuagaaccuuccugcugaaguacaacgagaacggcaccaucaccgacgccguggauugugcucuggauccucugagcgagacaaagugcacccugaaguccuucaccguggaaaagggcaucuaccagaccagcaacuuccgggugcagcccaccgaauccaucgugcgguuccccaauaucaccaaucugugccccuucggcgagguguucaaugccaccagauucgccucuguguacgccuggaaccggaagcggaucagcaauugcguggccgacuacuccgugcuguacaacuccgccagcuucagcaccuucaagugcuacggcguguccccuaccaagcugaacgaccugugcuucacaaacguguacgccgacagcuucgugauccggggagaugaagugcggcagauugccccuggacagacaggcaacaucgccgacuacaacuacaagcugcccgacgacuucaccggcugugugauugccuggaacagcaacaaccuggacuccaaagucggcggcaacuacaauuaccuguaccggcuguuccggaaguccaaucugaagcccuucgagcgggacaucagcaccgaaaucuaucaggccggcagcaccccuugcaacggcgugaagggcuucaacugcuacuucccacugcaguccuacggcuuucagcccacauacggcgugggcuaucagcccuacagagugguggugcugagcuucgaacugcugcaugcuccugccacagugugcggcccuaagaaaagcaccaaucucgugaagaacaaaugcgugaacuucaacuucaacggccugaccggcaccggcgugcugacagagagcaacaagaaguuccugccauuccagcaguuuggccgggauaucgccgauaccacagacgccguuagagauccccagacacuggaaauccuggacaucaccccaugcagcuucggcggagugucugugaucaccccuggcaccaacaccagcaaucagguggcagugcuguaccagggcgugaacuguaccgaagugcccguggccauucacgccgaucagcugacaccuacauggcggguguacuccaccggcagcaauguguuucagaccagagccggcugucugaucggagccgagcacgugaacaauagcuacgagugcgacauccccaucggcgcuggcaucugugccagcuaccagacacagacaaacagccccagacgggcuagaagcguggccagccagagcaucauugccuacacaaugucucugggcgccgagaacagcguggccuacuccaacaacucuaucgcuauccccaccaacuucaccaucagcgugaccaccgagauccugccuguguccaugaccaagaccagcguggacugcaccauguacaucugcggcgauuccaccgagugcuccaaccugcugcugcaguacggcagcuucugcacccagcugaauagagcccugacagggaucgccguggaacaggacaagaacacccaagagguguucgcccaagugaagcaaaucuacaagaccccuccuaucaaggacuucggcggcuucaauuucagccagauucugcccgauccuagcaagcccagcaagcggagcuucaucgaggaccugcuguucaacaaagugacacuggccgacgccggcuucaucaagcaguauggcgauugucugggcgacauugccgccagggaucugauuugcgcccagaaguuuaacggacugacagugcugccuccucugcugaccgaugagaugaucgcccaguacacaucugcccugcuggccggcacaaucacaagcggcuggacauuuggagcuggcgccgcucugcagauccccuuugcuaugcagauggccuaccgguucaacggcaucggagugacccagaaugugcuguacgagaaccagaagcugaucgccaaccaguucaacagcgccaucggcaagauccaggacagccugagcagcacagcaagcgcccugggaaagcugcaggacguggucaaccagaaugcccaggcacugaacacccuggucaagcagcuguccuccaacuucggcgccaucagcucugugcugaacgauauccugagcagacuggacaaggucgaggccgaggugcagaucgacagacugaucacaggcagacugcagagccuccagacauacgugacccagcagcugaucagagccgccgagauuagagccucugccaaucuggccgccaccaagaugucugagugugugcugggccagagcaagagaguggacuuuugcggcaagggcuaccaccugaugagcuucccucagucugccccucacggcgugguguuucugcacgugacauaugugcccgcucaagagaagaauuucaccaccgcuccagccaucugccacgacggcaaagcccacuuuccuagagaaggcguguucguguccaacggcacccauugguucgugacacagcggaacuucuacgagccccagaucaucaccaccgacaacaccuucgugucuggcaacugcgacguugugaucggcauugugaacaauaccguguacgacccucugcagcccgagcuggacagcuucaaagaggaacuggacaaguacuuuaagaaccacacaagccccgacguggaccugggcgauaucagcggaaucaaugccagcgucgugaacauccagaaagagaucgaccggcugaacgagguggccaagaaucugaacgagagccugaucgaccugcaagaacuggggaaguacgagcaguacaucaaguggcccugguacaucuggcugggcuuuaucgccggacugauugccaucgugauggucacaaucaugcuguguugcaugaccagcugcuguagcugccugaagggcuguuguagcuguggcagcugcugcaaguucgacgaggacgauucugagcccgugcugaagggcgugaaacugcacuacaccugaggacuaguuauaagacugacuagcccgaugggccucccaacgggcccuccuccccuccuugcaccgagauuaauagaucucaaaggcucuuuucagagccaccaaaaaaaaaaaaaaaaaaaaaaaaaaaaaaaaaaaaaaaaaaaaaaaaaaaaaaaaaaaaaaaaaaaaaaaaaaaaaaaaaaaaaaaaaaaaaaaaaaaaa
